United States Patent Application Publication US 2003/0143606 A1 - sequence listing, part 2

SEQ ID NO: 407 - DNA, 6298 bp, Artificial Sequence
  chemically treated genomic DNA (Homo sapiens)
gtattagtttttagttttttatttagtagttcgaagtaaggtatggtaggagaatttatattaggagaattagtataagttataaattaagtttttttttttatgttttatttttggagagttgggttatttaacgatgattgatatgttattgtgtatatgtttattggaggagataggtttattgaattgttttggtaatatttgagttttttggtatttatagagaaaaaggagatagtggtagttttatagtttttattgttagagaggaaaagtattatatggtttttttaagggatggtaatattttttttaggttttagagttatacgggttttttttttaggttttttagtatagataatgtttttgataataattttattttattgtaaaagtagagggattttaaagttgttgtttgttacgttagttaaggttgttattttggatcgatgttagggtaatggggtttgagtttgtagtttttggatgtttgttgagatttgtgaatatagtttagaatgtttagaaaaggttggattgtatatttttatattttatgttatttatttattttttaaattttttaggatgttggttatgtgtatagtttttagttaggtatggaagtaatttatttatttatttatttatttattggagatggtgtatttaggtgtaaaggagtttaggatataaagatagatgaaatagggtttttatttttaggttttataagattttttatttatagaataatttattagatatttagggttggaatttggaggaggtgagggaggtatttattttgggtgtaaaacgtaagagggtattataaaaattagtaattaagataatatattggttaggtacggtgatttacgtttgtaattttattattttgggaggttgaggtgggtggattatttgaggtcgggagtttgagattagtttggttaatatggtaaaatttcgtttttattaaaaatataaaaattagttaggtgtggtggtaggtatttgtaattttagttatttaggaggttgaggtaggagaattgtttgaatttgggagatggaggttgtagtgaggtaagattatgttattgtattttagtttgggcgacgagagtaaaattttattttaaaaaaaaaaaaaaaaaaaaaaaaaaaaaaaaatatatatatatatatatatatatatatatatatatatatgtatatatataatttataaaattaaaattagtgtagaaaattataatgtataagatatgaatattttaaataaggataggttgttgtggtttgttttatttttttttagtgttgggtaagggagtatagttaattttaattagcgaggggttatttggttaggaggtatttgaaggggaggtttatgtgggtgtaaataaattgggttacggggagtattatatatagtttttgtgcgtgtgtgtttcggttgtagggtttttattgattttttttatttggtttaaaatataagagggtattttgattattgtatttaggggcgtataattatttttgtgttttaaattttaataataaggtattgtttgtgttttttttagattttttatttacgttttatttagttataagtggtggatattattattttttttttttttttttgttttatagaagggaaaagtggggtttatagaagtttggtaaaatagtataggtagtaatattgtaatatagttatgtaatattttaagatggtgtatgattaaagcggttggttgagaatatttgggaaaattttagttttggtgtaataaattgtattttagagatagtgttatatgttgggtttttaaagaataggtaaatgtagttttcgtttgtttttttaggagtttaggagtttaggggttaatgcgagtaaataatttgggtttaagttggtgagtgttgtttagagggttttaggaagttgtggttttaagaagggtggaggggatggttagaggcgtttggggaagaagttggggtttcggttagagaagatttagtttgattttagggtgttttagtttttattagaataggaggttgatgttagggttgtttttgagtttgtttgtaaaatgggtgtatagtagatttgttttatttttgttaattagttgttgcgagaattagatgatatgttgtagaggaaggtattttttatagggtgtatgtgttgaggcgggcggattagttgagattaggagttcgagattattttgggtaatatagtgaaattttatttttattaaaaatataaaaattagttaggtgtggtggtgggcgtttgtaattttatttatttaggagattgaggtataagaaacgtttgaattcgggaggcggaggttgtagtgagttgagattgtattattgtagtttgggcgatagagtaagattgtttaaaaaaaaaatatatatatatataaaatatatatgtataatatataatatatatataaatatatatatatatatatgggggtttggatataaagaggtaatagggtttttatttttaggttttgtaaaatttattatttatagaataattgaatagtgagttttaataatttagtggtgggaaaatgtttgttttaaaaatatatagtgtatttaaatttatgaaaattttttatttatttttgtgttaagttatatagtttttttttttagagataatatttttagtagttttcgatgtttttttttagaggtggtttgtggtgtatatataggtgggtaatgatacgttttatatgttgggagtattatttttaagggatttataatgaagagagtttttagtatattatataatggggaatttttgaaaatggttgggaaatggaatattttgggtattaaattatattttattagtaatttaaattagggtttttcgattttagtattattgtattgatattttgggtcgaaatgtttattgtttcgggaggtaggagtggggagggagttgttttgtgtattgtaggatgtttagtagtagttttggtttttatttatttaatgttaggagtatacggttttttttattttagttgtggttgttaaaaatgttttttgggggaaagggagtaatattattttattaagaatcgttgttttaaattttgtatgatatttgtagaaaattggtagataagagaaaaaatgtagaagatttaaagggataggaaagagaaatttgtgaagataatggaaagagtttgtagttttagttatttgggaggttgaggtaggaggattgtttgagtttaggaatttgaggtggtagtgagttatgatcgtgttattgtattttagtttgggagatagggtgagattttgtttcgaatgaataaaaaatttaaaggttattatttcgtaattattgaaagaatttttttatgaaggatggtaataattagttttttatttttatatagagtaaagtaaaaagaagtaggtttaaatggaagagaaattaaaattggatatatagatggttaaatattaataacggtttttgaatggtatttttttttttaaagatttttatgagtagaataatttaggatggttagggattgttttttcgggattttgtggttaagaatttaggatttttaagtaatgaaatttgtattaaaaaattagttaaaattgtttattttataattatgtttatatggtgtttttaagaaaataatttttttgttgttgtaaaagtaatatatatttattgtggaaaaattagacgatatttttaagtttaaaagaagaaaaatttaaaatatttttaattttattaattagtgagatattatgtttgatattttagtgaatttattttttaatagttttttgtgttcgtaaaggtatatgtgtagatataaatatattatatttatatagaaacgacggattatttagtatataatgttttgaagtttttattttttttttatttaattcgttgtatatgtttttttttattcgtgtgtattatcgtattagttttaatttttttattgtatagatggtttataatttaaaatattttttgtttttggagatttaatttgtttttagtgttttgagattataagtaatattgtagtaaattttttttagttaggggtttgtatatcgtttttttttttatttttattttttatattttaggataaatttttggatattaagttgttggagtatatgatattaatagttgtagggttcggagtaattggcgaaattgtgtatttgtaaggtatttggtaggaaaaatgttaaatagattattaaaaagattgtttaatttatatttttatgggtggtattggtttttgttttttttggttttgttttttaattttggttaaaatgataatttgaaaggcgagggtggagggtgtttagatagtttttttattttgttgagaattgtttggtttagttttgggttttgtttgaattgtcggtttgttgtaatgttttttataattgagtagttatttagaaaaaagagaaggtgaaattaatttattgtaaaaaaattgttttaggatgaagaaggttgtttgtatttcgttattttagttaagtcggaatacggagtaaggttgtttgtatcgtgttattattttttttaggttgtagggtattttgtatatttattattttttattgatgttggaaaattcggttatagaatttcgtgtagtttagtttttgagggtggggcgttttgtttttcggacgtcgggttttttttggatacgaatgtttcgggggtaggaggcgaatgatattggtacggcggggtttcggagttaagaggtgattaggttggttgggtagggttgagtggttgggtcgagtacgtgatgtttttagtcggttttcggggtttttcgggttgaaatcgatatttgtttttggtaggaaaatgagtttgttagtttttgtttttattagatttttaatttaaaggagtaggagatttcggtagcgttttaattttattttagaatttgaaagcggaaggtaagttgtttattatttagaaaaataaatttgagaggagtgatttagtaaagtatattgcgattttgttgatttttaaaatttggtgttgaaaataattgatcgttgtgagagttaagggttgtatttatttttaaattagagattaattttttgaatagaaatttggttaatttggagggaattacggtataagggttagggttaaatatagaaggatacgaaagttgatggaataaattgtaagtaaatttaattttaatttgtttgtaaaataatttattttatgttttttttagggttgtgagtaaagggaatgttaaaattgtgatttttaatttaagtgaaagtaaatgaatttatttgtaattggaatataaataaaagtagtttttgtttttgtttttttatattttaaaaacgtttgtgtattttggtaaaagaaaagtttatatgtgtattgtttaagtttgaaatacgttattttaaatttataaaattattatagttgtaattttttaaagtttttttaggtaaggttgttttagttgtgaatgagaaatgttgatattgtatatattttttgtgatagtaaaatgatttatttttttagaatgtgataaagattagaaaatgtgaaataatgagttattgtgaattaagttatgttttagagattaaatgttttgttagaagatgtaagaaaatagagatataaatataattatgtttacgtagtagtgttttattttaaattattatatatttaagtaagtagtagaaatacgtggtgttattatttttttttttggtaaatataaattaatattggaatgtatttatttagagtaattaaagtattatttattcgtgtaattagtataatgttttataatgaattgttttgaattaaagtgtttggtataatagtcgatatacggtttgaaatatagaaattttagataaagtatgtttatgttatattttgtgttattttgatttgtataaaatgtttatttttttattgtatttgataaatattagttttaaaataaaatatgaaattgtatttttttttattgtaatttttttattgttaatttttttgaaattttattattcgtttggagtttgtaataatttggatttttttttttgtgtgttgttttttataatttttcgcgaaagg

SEQ ID NO: 408 - DNA, 6298 bp, Artificial Sequence
  chemically treated genomic DNA (Homo sapiens)
tttttcgcgaagaattatgaaaaataatatataggaggagaaatttaaattattataggttttaagcgagtaataggattttaaaagaattagtaataaagggattatagtgaaaggaaatataattttatgttttattttaaaattagtatttattaaatgtagtggagaaataaatattttgtgtaaattaaaatgatataaaatatagtatggatatattttgtttagagtttttatgttttaagtcgtatatcgattattatattaaatattttagtttaaagtaatttattatggaatattatattaattgtacggatgaataatgttttaattattttgaataggtgtattttaatattaatttgtatttgttaaaggaaaaaatggtgatattacgtatttttattatttatttaaatatgtgatgatttaaaataaagtattgttacgtgagtatggttgtatttgtgtttttgtttttttatattttttggtaaggtatttaatttttgagatatgatttaatttataataatttattattttatattttttaatttttattatattttgaagaagtgagttattttattattatagaaaatatgtataatgttaatattttttatttataattgaaatagttttgtttagaaagattttagaaaattataattgtgataattttgtaaatttgaaatagcgtattttaaatttaagtagtgtatatataaattttttttttgttaaaatatataagcgtttttgaaatgtaaaaggataaaagtaaagattgtttttatttgtattttaattgtaaatagatttatttatttttatttgagttaaaaattataattttaatattttttttgtttatagttttgaaagagatatgaaatagattgttttataagtaggttagagttaagtttatttgtagtttattttattagttttcgtgtttttttatatttaattttggtttttatatcgtgattttttttaaattaattaaatttttgtttagaaggttaatttttaatttggggataaatatagtttttgatttttatagcgattaattatttttaatattagattttaaaaattaataaagtcgtagtgtattttattaggttattttttttaaatttgtttttttgagtgataagtagtttatttttcgtttttagattttgagataaagttaaaacgttatcgaaattttttgtttttttgggttgagggtttaatggaggtagaaattgataagtttatttttttgttagaggtaaatgtcgattttagttcggagggtttcggaggtcggttgggagtattacgtgttcggtttagttatttagttttgtttagttagtttggttattttttggtttcggagtttcgtcgtgttagtgttattcgttttttattttcggagtattcgtgtttagagaaaattcggcgttcgggagataggacgttttatttttaggggttgggttgtacggaattttgtgatcggattttttagtattaatgggaggtggtgggtatataaaatgttttgtagtttgaagaggatggtagtacggtgtagatagttttgtttcgtgtttcggtttggttgaaatgacgaaatataggtaattttttttattttggagtagtttttttgtagtaggttagttttatttttttttttttttaggtgattgtttaattgtaaaaaatattgtagtaaatcggtaatttagataaggtttagaattgggttaagtaatttttaatagaatgagagagttgtttgaatattttttattttcgttttttaaattgttattttagttaagattaaaaaataaaattaaaaaaagtaaaaattaatattatttatgggaatgtaagttgagtaatttttttggtggtttgtttagtattttttttattaaatgttttataaatatatagtttcgttaattatttcgggttttatagttgttggtattatgtgttttagtaatttgatgtttaagaatttgttttggggtgtggggagtgggggtggggggaagaacggtgtgtaaatttttgattagggaaagtttgttgtaatattatttatgattttagagtattggaaataagttaaatttttaaaaataggggatgttttaaattataagttatttgtgtagtggaagaattaaaattaatacggtggtatatacggatggaaaaagatatgtgtagcggattaaatggaaaaaaaatggaagttttaaagtattatgtgttgagtgattcgtcgtttttatgtaggtgtaatatatttatatttatatatatatttttgcgaatatagaaaattattaggaaatgaatttattaaagtattaaatatggtattttattggttagtgggattaagggtgttttaaatttttttttttttaagtttagagatatcgtttaatttttttatagtgaatatgtattgtttttatagtaataaaaaaattgtttttttaaaagtattatatagatatgattatggaataaatagttttggttaattttttaatgtagattttattatttgaagattttgaatttttaattataaagtttcgagggaataatttttagttattttagattattttgtttatgaagatttttaggaaagaaagtgttatttaggggtcgttgttaatatttaattatttgtatgtttagttttaattttttttttatttaaatttatttttttttattttgttttgtgtggagatagaaagttggttattattattttttatgaaaagatttttttaatagttacggaataataatttttgagttttttgtttattcgagatagggttttattttgttttttaggttggagtgtagtggtacgattatggtttattgttattttaaatttttgggtttaagtaatttttttgttttagttttttaagtaattgggattataggttttttttattgtttttatagattttttttttttatttttttgaattttttatatttttttttttatttgttagttttttatagatgttatataaggtttagaatagcggtttttaatggggtgatgttgtttttttttttttaggggatatttttggtagttataattgaagtgggaggagtcgtgtgtttttggtattgagtgggtagaggttagggttgttgttgaatattttatagtgtataggatagttttttttttatttttatttttcgggataatgaatatttcggtttaaaatattagtataatagtgttgaagtcgagaaattttggtttgaattattgatggagtataatttgatgtttaagatgttttattttttagttatttttaagagttttttattgtatgatgtgttggaagttttttttattataaattttttaaaggtagtatttttagtatgtgggacgtgttattgtttatttgtgtgtgtattataaattatttttgaaaagagatatcgggaattgttaagggtgttatttttagggaggaaaattgtgtggtttggtatagaggtggatgggaaatttttatagatttggatgtattgtatatttttaaaatagatatttttttattattaaattgttaaaatttattatttaattattttataaatggtgggttttataaaatttagaggtgaggattttattgtttttttgtgtttaagtttttatatatatgtgtgtgtgtttgtatatatattatatattatatatatatattttatatatatatatattttttttttagatagttttgttttgtcgtttaggttatagtggtgtaattttaatttattataattttcgtttttcgggtttaagcgttttttgtgttttagttttttgagtaggtgggattataggcgtttattattatatttggttaatttttgtatttttagtagagatggggttttattatgttgtttaggatggtttcgaatttttgattttaattgattcgttcgttttagtatatgtattttgtagagagtgtttttttttgtagtatgttatttgattttcgtagtagttggttaataggagtagggtagatttgttgtgtatttattttgtagataggtttagagatagttttgatattagttttttgttttgatggaggttggagtattttggggttaggttaggttttttttggtcgggattttagttttttttttaggcgtttttgattattttttttattttttttggagttatagttttttgggattttttggatagtatttattagtttagatttaaattatttattcgtattaatttttgagtttttgagtttttggaaggatagacgggagttgtatttatttgttttttgaaagtttagtatatagtattgtttttgggatatagtttgttatattagaattaaaatttttttaaatgtttttagttaatcgttttaattatatattattttgaagtattatatggttgtattgtagtattattgtttgtgttattttgttaagtttttgtaagttttattttttttttttgtaaaataaggagaaggaggaagagtaatagtatttattatttgtagttgagtgagacgtaagtgagagatttggaaagagtataagtagtgttttattattagaatttgagatataagaatagttgtgcgtttttaaatatagtgattaagatatttttttgtattttgaattaagtgaaaaaagttagtaaagattttataatcgaaatatatacgtatagaaattatgtataatgtttttcgtggtttaatttatttgtatttatataaattttttttttagatattttttggttaagtaatttttcgttgattggaattgattatgtttttttgtttaatattgaaggggagtgaaataaattataatagtttgtttttatttaaaatgtttatattttgtatattgtaattttttgtattaattttgattttataaattatatatgtatatatatatgtgtgtgtgtgtatatatatatatatatatatttttttttttttttttttttttttttttttttgagatggggttttgttttcgtcgtttaggttggagtgtagtggtatgattttgttttattgtaatttttattttttaggtttaaataatttttttgttttagttttttgagtagttgggattataggtgtttattattatatttggttaatttttgtatttttagtagagacggggttttgttatgttggttaggttggttttaaattttcgattttaggtgatttatttattttagttttttaaagtggtgggattataggcgtgagttatcgtgtttggttagtatattattttgattattgatttttgtggtgtttttttacgttttgtatttaaggtaagtgttttttttattttttttaaattttagttttgagtatttggtaaattattttataaatgggggattttataaaatttggaggtgaagattttattttatttatttttgtattttgaatttttttatatttgaatatattatttttaatgaatgaatgaatgaatgaatgagttgtttttatatttagttgggggttatgtatatggttagtattttaaaagatttggggaataagtaagtgatatgggatataagaatatgtaatttagttttttttaggtattttgggttgtgtttatagattttagtagatatttaaaagttgtaaatttagattttattgttttgatatcgatttaaagtgatagttttgattgacgtgataaataatagttttgaaatttttttgtttttgtagtggagtggagttgttgttaaggatattgtttgtgttgggaagtttgagaaaagagttcgtgtagttttaaggtttaagagaagtgttgttattttttaaaaaaattatatggtgttttttttttttgataataagaattgtggagttgttattgttttttttttttttgtgagtgttaggagatttagatgttgttaaggtaatttagtaggtttgttttttttagtaggtatatgtatagtggtatgttagttatcgttaaataatttagttttttaagggtggggtatggggagggaggtttgatttgtagtttgtgttgatttttttggtgtaaatttttttgttatgttttgtttcgaattattgaatggggagttggaaattgatgt

SEQ ID NO: 409 - DNA, 5632 bp, Artificial Sequence
  chemically treated genomic DNA (Homo sapiens)
tttggttaatatggtaaaattttgtttttattaagaatataaaaattagttgggtgtagtggtatatatttgtaattttagttatttgggtagttgaggtaggagaattgtttgatttcgggaggcggaggttgcgatgagtcgagatcgtgttattgtattttagtttgggtgatagagtgatattattttttagaaataaataaataaaataaaataaaatttaaaaagtttagtttgttattatagtgtgttataattttggggtattatttatgtttttaagttgtggtgggattagtttggtgaagttagatttttgtagagtttttttcgaaggtttttttgtttttttcgttgtttgttggtttttgttgagggttattttttagggaattatttgtataggtatgtttatgttaggttgtgtttttagggaatttgaattaacgtgatgggattggtagagaggtagggagattatgttagatagatatttgaaaaattttgttttatttttttagagttttttgagaatttagtagtttaatttgtggaagtagaattttgagttattggttttttcgtgattcgtataatttagtatggattttggtatttagaatatggagaatttaatagggttgttatttttttatttgtaatttagttatgttttttttatagttagggtttagggtgggatcgtgtattttttatcggtaggagagttgtggttagaatttatttataaggaacgaggtggttagggttgttacgttgtagttgtcggggtaggatttggagtcggataggtggtcgttggtggtttggaagtatttttggaggaagtggtaggaggattgagtagggtgggttaggttttcggtcgatatttttttagtattattatttattttcgttttttagtttattaagttttttggttagtgggtagggatagggtagttaaagttagggagattttattaatttttacgggataatttttatttattgttttattagattttggttttagggttagtgggattgtgtgtttgagttgggtataggggagagaggggtggtggtgttagttggggtcggttagaatggggatatataagtgtattgatttgttaaggattttaatagaaatttatttgtttgttttaaaataagaggagagagaggattaggtagggtttggtacgttgtgtcggtagatggttcgagttttggggttttgggtgagggtgggggttagttttttggtgtttcgtgaggtcggggtttgtttttttatgggttatgttttggtgtttttcggtatgtagaggaagaaggtgggggtaatagtggtgttgggaggagaggtagtaggtgtcgtttatagagtaggtttgggtgtgggttttgattttgttattttttagttggtgtttttagattatttttaatagtttcgaatacgtttttttttttgtaaaatggcgataatgttatttattttacgagttgtggtgaggattaaataatataacggaggttgagaagagttgagtgtagtgtttagtaggaggggtgtgttattggagagaaggtaattatattatttagtgggtttatgttatagattttggagtaagggcggaaattatgtattagaatttggggtttttagtgattttgagtgatattttttaaatttatttagattgagaattttttttttttttttttaattttttttattttaaattattattttgtttgagtttttgtttatattatttttttttttaataaagagttttttttgttgtatttaagattttttcgttcgtttatttcggattggtttttatttttgttttttttcggggggttttgttttttttgttgcggtatgatcgtgttatttttgttttattagttcggaagtatttcgttagtatcgtacgtattgttatgttttttgggttcgggattttgttttgtagtgttttttttttgtttttttattattgggtcgggtcgttagtattttagtagtttaagtattttttttttttttttttatttttttgttttgttttttttttgagatagaattatatttaggttggagtatagtggtacgattttagtttattgtaatttttgtttttcgggtttaagcgatttttttgttttagttttttaagtagttgggattataggtgtgcgttattttatttagttaatttttgtatttatggtagagatagggtttcgttaagttggttaggttggtttcgagtttttggttttaggtgatttgttggtttgggttttttaaagcgttgggattataggtattgtgtttggtttcgtattttttgtttttttagatttttgttatgattattgtttttttttagcgtttttttgttttttttttattggatgtgtagaagtttgtgttagttttagtttttcgggatgattttagtaggcgttttttttttttcgatttttgtttcgtgtttggtgggtttttagtttataggttagtatatttaggttggtattttaaggtattcggtatggagtggttaagtgaaggggaagggatttggttattgaggaaatatttagattttttttatttggagttgggtttagttagagattgtttagaatttttggggtttttggagttatttttagattttgggagtttggtgtttttaaggaatttttagtattttttattttttaaatttttttttttttttattgaagatagtgggattaggtaaggtatgggaaggggttgtgggggtgagttggtaaggtttttgttttgggaaggggtgggagatggggggtttgttagttttttagttgtttttatagtttttttgggaagttaggaataattagagtttttttttttttttaggtatttggtagtgggggtgtaattattggaataaaagtagggtaggggattttgttttatgttatttgttaggatgtaaagtagtgtggggatttagtgatttttgaatgtgggttttttgtatcgtttcgtttttatttatatttgttttgttttttttagcgtgttttgttttttatttcgtttttagttgttttgaggcgagggggttgtgtaggttttgggtattcgatttttattgttatgagatagagatttaggttttaggtttagtttatttgatagaggaggaaaatagaggtttcggatggtgatggtgttagggttatagagtcgttttgggtttttttttgttgtttttttattgagttttcgttattgttgttaggcgattaatatggaaggggagaaattagggttgatgtggaggtagtgggtttgggagggatttgtattgggttttgcgttttttggttgttttttttttagttttttggggtatatagggttggggggtgagggtggatgtggatatgtagtgtcggttgtgggatagtagttagtagttgttttagattagatattggggattcggatgttgatagggtagttagttttggtgttgtgtagagttaataggttagggtggttaagatgaaggtgggttcgggtttatgtagagcggtaatttttattttattttttataatatatatttttaattttgatttgatttgtttggtatttaggggtaaagggtggtttagggttttagattttaataattatttaagggttattatgttatttagagagtggttttgtttgggtaggattggaggtaattgtttttaatattttgttttaaagtggtattagatataatttttttgttttgtgtttaaattattgttttggtttagttttaggagttggaggagttttgggtaggggaagagttgtatagtgtggggttgggtttagtttttgttgtgtgattttggatgagtgatttatttttttgattatttataaaatggcgaggttttttttatttatagggtgtggggaggaggatttgagttgcggatgtgacgtttttgatacgttgtaggtatacggtacgtgtttgtttttcgttatgtttttttatatttgtgttgttattttttgttggggtgggataaattttgtggaattatttagaagtttttattagagtcgttggtttttggacgtgtgttttgagaggtattttttgagtttggagggtttggatataggattaagtttgagtttttgattttaatttattgttttgttttaggtgtcggttttttcgttagttttggataagatgggttattaggatgggatcgtgtggtatagtttgcgggttttggagttaggtaaatttgggttgggaattttggcgttgtttcggttttcgtgattttagacgggtagttttatttttttgagatattatttttttataacgggattacgttgtttgtttcgtgggattttcgtgggtatttagggtaattaatttaggggaaggttgattttttatttggtatatagggaggttgtggttatgttggttttatttatttttgtcggtttgttttttttttttttgtttagtttttttttttttttttttgtgtttttttaaattttttatgtttagttttgagatttttggattttgagttttagttttggtagatgatttttttttgttttgttgtgtgcgtgagttttttttttttagttttcgtttagtagtatttaggagtttgagtatagttgggtattattttttgtgtagttatggtgggtggggaggtttttgtttttttttttgttggtagttttgttttgttttgtttcggtttgggtagttttgatcggtttttaaggatattttaagtgttcgttataaattttgggtttaggcgggaaaggggggaggatgttgattgttggaatatatatttgtttaggtgtaggggagttggaggttttgtgagaggagggttagtttagttatagtaggaggattgataggtgaggggtcgttgtaagatgttggggtttgttagggttagataggtagggcgggggggggggggtggtaagggtaggagttagtattttattttggttttggtgggatttttttttgggtttggggttttgttgtttttgtggtttgagttggggttaggggtgtttataggtggatagggagagttagagttatttatgggattttgtagtgagagtgttatagttttgggtagagattgtttttagtagtggaagcgttaagtgatttaggagggtgggagcggttgttatcgaaggggaaggggttttgagtagggtttgggtttcggtttgtgtttagtttgttgttggatatagggggatatttaggaattttatttttattttatataatgatatatataggtatatatttttagtgacggaaatttagggatgaaggtatatatagatttagtgtgataattttatatatatatatatatatatatatacgtataattttttttttttatgggtggggagagtattggaagggtttagaggtagtgcgaggacgtgtagtagtttatcgcggtttttttttttattcgtttttttagg

SEQ ID NO: 410 - DNA, 5632 bp, Artificial Sequence
  chemically treated genomic DNA (Homo sapiens)
tttggagaagcggatagagggagggatcgcggtgagttgttgtacgttttcgtattgtttttaggtttttttagtgttttttttatttatgaagaggaaagattgtgcgtgtgtgtgtgtgtgtgtgtgtatgtgaagttattatattaggtttgtgtgtgtttttatttttgagttttcgttattgagggtgtgtgtttgtgtgtgttattgtgtgggatgggggtgggatttttaggtgtttttttgtgtttagtagtagattgggtataggtcggagtttaagttttgtttagagttttttttttttcggtggtagtcgtttttatttttttgggttatttggcgtttttattgttgggagtagtttttgtttagggttgtgatatttttattgtagagttttatggatggttttgattttttttgtttatttatgagtatttttgattttagtttaggttatagaggtagtaaaattttaggtttagaagaagattttattagggttaaagtgaggtgttggtttttgtttttattattttttttttttcgttttgtttgtttggttttggtaggttttagtattttgtagcgattttttatttgttagtttttttgttgtggttgagttggttttttttttatagagtttttagtttttttgtatttggataggtgtgtgttttaataattaatatttttttttttttttcgtttgggtttagggtttatggcgaatatttagaatgtttttgaaaatcgattagaattgtttaggtcggagtagagtagagtagagttgttaatagggaggggaataggagtttttttatttattatagttgtatagagggtggtgtttagttgtatttaggtttttgggtgttgttggacgggggttgggaagggggagtttacgtatatagtaggatagagaggggttatttgttaaggttgaggtttagggtttaggggttttagagttggatatggaaggtttggaaaagtatagagggagaggggaggaggttgggtagagaaggagaaagtaggtcggtaaaggtgagtggggttagtatgattatagtttttttgtgtgttaggtagagagttagtttttttttagattaattattttgagtgtttacggaaattttacgaggtaggtagcgtgatttcgttgtagagaaatggtgttttagggaggtggggttgttcgtttaagattacggaggtcgaggtagcgttaggatttttagtttaggtttgtttggttttaaagttcgtaggttgtgttatacggttttattttgatgatttattttgtttagggttggcgaggaggtcgatatttggggtaaggtagtgaattggggttaggaatttagatttgattttgtgtttagattttttaggtttaggaaatgttttttaaagtatacgtttaagggttagcggttttggtggggatttttgggtaattttatagagtttgttttattttaatagaggatggtagtataggtgtgaggggatatggcgaggaataagtacgtgtcgtgtgtttgtaacgtgttagaagcgttatattcgtagtttaagtttttttttttatattttgtgaatggggagagtttcgttattttgtagatggttagagaggtgagttatttatttaaggttatatagtagaggttgaatttagttttatattgtgtagttttttttttgtttaaagtttttttagtttttgaggttgaattagggtaatggtttgggtatagaatagaagagttgtgtttgatgttattttggggtaagatgttgggggtaattgtttttagttttatttagataaagttattttttgaataatatgatggtttttggatgattgttaaaatttgggattttgggttattttttgtttttagatgttaggtaagttaaattaaaattgaaggtgtgtgttgtgggaggtgggatgggggttgtcgttttgtatgaattcgagtttatttttattttggttattttgatttgttgattttgtatagtattagaattggttgttttgttaatattcggatttttagtgtttggtttggggtagttgttggttattgttttatagtcggtattgtatgtttatatttatttttattttttagttttgtgtgttttaggaggttgagaagagggtagttagggggcgtaggatttaatgtaggttttttttaaatttattgtttttatattagttttaatttttttttttttatattagtcgtttggtagtagtagcgggggtttagtagagagatagtaggggagaatttagggcggttttgtgattttaatattattattattcggagtttttgttttttttttttgttaaatgagttgagtttgagatttgggtttttgttttatgatagtgggggtcgggtgtttaggatttgtatagttttttcgttttagagtagttgaggacgggatgggggatagggtacgttgaaagagatagggtaggtatgggtgggagcggggcggtatagagaatttatatttagaggttattgagtttttatattattttgtattttggtaggtgatatgaagtagggttttttgttttgtttttattttaatggttatatttttattgttaggtgtttaggaggggagggaggttttggttatttttggttttttagaggaattgtggggatagttggggagttagtagattttttattttttatttttttttaagatagaggttttattagtttatttttatagtttttttttatgttttatttggttttattgtttttagtgagaggggaagggagtttgaagagtgaggagtgttgggggttttttaggaatattaggtttttagagtttgagggtggttttagaaattttaaaggttttaggtagtttttggttgggtttagttttaggtggaggggatttgagtgtttttttagtgattaggtttttttttttttatttggttattttatgtcgggtgttttggggtgttagtttaggtgtattggtttgtgggttgaggatttattaagtacgggatagaggtcggggaggaagagacgtttgttaaggttatttcgagaggttggggttgatatagatttttgtatatttaatgagaagggagtagaggaacgttggagggaaatagtggttatgataaggatttgaaaagataggagatgcggagttaggtatagtgtttgtaattttagcgttttgggaggtttaggttagtagattatttgaggttaggagttcgagattagtttggttaatttggcgaagttttgtttttattataaatataaaaattagttgggtaaggtggcgtatatttgtaattttagttatttgggagattgaggtaggagaatcgtttgaattcgggaggtagaggttgtagtgagttgagatcgtgttattgtattttagtttgggtgtgattttgttttaaaaaaagaataaaataaaaagataaaaaaaaaaaaagaagatgtttgggttgttggggtgttgacggttcgatttagtggtaaggggatagaggggagatattgtaggataaagtttcgagtttaagagatatggtagtacgtgcgatgttggcgggatgttttcgggttgatggagtagagatggtacggttatgtcgtagtagagagagtaaggtttttcgggggagggtagggatgggagttagttcgggatggacgggcgagaaggttttaagtgtagtaggaaaagttttttgttggagaaggaggtgatgtgagtaaaggtttaggtagggtggtgatttggggtggaaagaattgaaaaaagaaaaaaagaatttttagtttagatagatttggaagatgttatttagggttattagaggttttaaattttggtgtataattttcgtttttgttttagggtttgtggtatgaatttattggatgatataattattttttttttagtggtatattttttttgttaagtattgtatttagttttttttagttttcgttatgttatttagtttttattataattcgtgaggtgaatgatattgtcgttattttgtagaggaagagacgtgttcggagttgttaggaatagtttagggatattagttgggaaatggtaaagttagagtttatatttaagtttgttttataagcggtatttgttgtttttttttttagtattattgttgtttttattttttttttttgtatgtcgggggatattagagtatgatttatgagagggtagatttcgattttacggagtattagaaggttgatttttatttttatttagggttttaggattcgggttatttgtcggtatagcgtgttaggttttgtttgattttttttttttttttgttttaggataaatagatggatttttgttgggatttttggtaggttagtgtatttgtgtgtttttattttagtcggttttagttgatattattattttttttttttttgtgtttagtttaggtatatagttttattagttttaagattagaatttgatgaaatagtgggtgggggttgtttcgtgggagttagtaggatttttttggttttagttgttttgtttttgtttattggttagaggatttggtgagttgggagacggggatgggtggtggtgttggagggatgtcggtcggaagtttggtttattttgtttaatttttttgttattttttttagaggtgtttttagattattaacggttatttgttcgattttaggttttgtttcggtaattataacgtggtagttttggttatttcgttttttgtgggtaggttttggttataatttttttgtcggtggagaatgtacggttttattttagattttggttgtgggaagggtatggttgagttgtaggtgggaggatggtagttttgttggattttttatgttttaaatgttagagtttatgttgggttatgcgggttacggggggattagtggtttagggttttgtttttataggttaaattgttgggtttttaagaagttttgagggggtggggtagagttttttagatgtttgtttggtatggtttttttgtttttttgttagttttattacgttagtttaggttttttggaagtatagtttgatatgggtatgtttgtgtaggtgattttttggggaatggtttttaataaaagttagtaggtagcgggggaggtagaggggttttcggaaggggttttgtaggagtttagttttattaagttggttttattatagtttgggagtatgaatagtattttagaattatggtatattatggtgataggttggattttttaaattttattttattttatttgtttatttttgagagatggtgttattttgttatttaggttggagtgtagtggtacgatttcggtttatcgtaattttcgtttttcgggattaagtaatttttttgttttagttgtttaagtagttgggattataggtgtgtgttattatatttagttaatttttgtatttttagtagagatagggttttattatgttgattaga

SEQ ID NO: 411 - DNA, 5337 bp, Artificial Sequence
  chemically treated genomic DNA (Homo sapiens)
gtgcggtttttttaggtttttgggaaggtttcggaggttttaggttttatagatttcgcgtgtttgggatttgtttttaggttttttttttgtttttttttgtttagggttagaatttttatgagttttattttttttgttttttttttttcgggttgtttagttggggtttgggtattttttattagtttaggtttttggtttttggtgacgttgtgtgtgaggttattttattttacgtttagtaggttatagttagtttgggtcgttttattttttttttttgtgagtttttttttaggtttggtttttggagttgtttttaagtcggtagtgtttttagtttttttatttgagggtagtttagttattggatttttgttgttttttttttttttttgggttttttttgtttgtattagtttttttattttggttcggtcggttttgatttttaagttttgttttattttagtttttttattacgtaggtttatttggtttttaaagtttttttttgttttttggttttttatagtttttttttttgcggtttggtttttagtagttttttttgtttttttagtgtttaggatttgggtttgtttggggaaagggtttattttagtttttttttttttatttttttttttttttaggatttagatttttttagtagtttttaggagttttttttttgggattgttttatattttgtttgtttgatttttagtaggttagttttttttttgtttgaggttgtttaggtttcgtttttttttgaggttgtttcggttttttttttttttgaggttgttttagttttttcgtttgaggttatttcggtttttttttttttcgaggttgtttcggtttttttttcgtttgaggttgttttagtttttttttcgtttgaggttgttttagtttttttttcgtttgagattgttttggttttttttttatttaaaattgttttggttttttttttatttggggttgttttggttttttttttgtttaagattttttagtttttaggttttgtttttgggttttacgttttttatgttttagtgtttttataggttttttttattattattattttttttttttttttagttttttcggttttaggttttttagttttttttgtatttgtttttttgattttttgttttatttttcggttgttttttgtcgtttttggtttaatagtattagttttttttttcgtttttttatgttaggtttattttgatttcgtttttttggttatttttggtttttttgttttgatttttttttttttttttttttgtttttagttttttagttttttttttttgtttattttttgtttatgggatttttgttttttttgggtttggtcgtttttgttttggtaagttttagattttgttttggatttttttttggtttttaagtgggcgtttggtttttggtatttggtagttttggttgtttttttagttttattgttttgtttttttgtttgggatttatgggagttgttatttttttagttttaggtttgttttatagttgagttttttattttatgttttttgttatttttaggtttttttagttttttagttttttcgttttggttgtttttaaggttttttaggtttttttgggtttttttttttataattttttttgttttttttatcgttattatttttagttttttagtcgtttgcgtttttcgttttatagtggggattgtattttttaggaggtaggagataaaggtgtcgagggaattttaggaaaaaagagagagagaggggagagttattgaggagagttttagttttttttttgggggttttggttggaggagtttaggttaaggaagagggtattgggatttgaaaggagaagaagaggatttgtagaaggagttagaaggggtatcgattaggggtacgaggacgtatggttggaggtggggattgaaatttagaaaatattaggttaggagtttgtttgaatttgagaaagtaatttttagtttgaggagattagaaggaggaggggaaaggtgaggttttaggggaggtgttcggaagtgaggttttagggaatggggtgtaagtatttggtagttgtttgttttttttattagtgttttttttaaggtttggtgtagtttagggaggtatagtcggaggaagtttattttgtttgtttttgtttgtgtgtttagaaagttgataatgatcgtttttatttattaagataagttaattttttttaggattaaaggtattttttttttttttgtttttttgatgcgtttttattttaggttttgtttacggtttttgatgtttatagtagtttttattgtagttcgggaaatgggtgtatattatataggggatttaggtgtatatttggaaataaaggataagtaagaggttagaaaggataaagtgggagtaggagattttagaattggggagggggagagggaggggatatgtggtaatagtagtttaagtgatttaggtttcgtattcgtattttagttatttttgttttttttataagttatagttattttgtaagaggaagttggggtttgtggtttttgttttgtttgggaagaaagagtagtagtgaagagggggttggtgggagttttgatatatttcggcgttattaatgttttttttaggggcggaaggggtcggattggtggttttggggtgtatttttttatttatgattaggtttgtaaaaaagaatttggttaaattttatattgtggatatttgtgtttgttttttatttttttgtgatttttttgatggtagatgttatgtatgaaacgttgttgaatttttagagttttgtacgttagtaggattttattttttattagttgagtgatttgggaggtatattagagagggtatattttttttttttttttttttttttttttttgagatagttttattttgttatttaggttggagtgtagtggcgtagttttagtttattgtaatttttgttttttgggtttaagtgatttttttgttttagtttttcgagtagttgggattataggtgcgtgttattatatttggttaatttttgtatttttagtagagatagggttttattatgttagttaggttggtttcgaatttttgattttaggtgatttgtttattttggttttttaaagtgttgggatgataggtatgagttattatatttagacgagagggtatatttttaattgtattttgaaggtttggtggtgagaaagagtatatagaggtggtatagtttatagtagagatgaggttaaggataagaagagaatgtaggatgtcgttttttatttagaagaaggtaagggtatgattttttatttggaattatataaagtgattttgttttattttttttttttatatttttttttttttttttttagttttatttttttattttaattagggtaattttatgaaattatagtattagaattttaggttttaaaattatttagtttggttaggtgtagtggtttacgtttgtagttttagtattttgggaagttaaggtaggtggattgtttgagtttaggagtttgaggttattttgggtaacgtggtaaaatttagtttttataaaaaatataaaaattagttgggtatagtggtgcgtatttgttgttttagttattcgggaggttgaggtgggaggattatttgagtttgggaggttaaggttgtagtaaattaagattttgttattgtattttagtttgggtaatagagtaaaattttgttaaaaaaaaaaaaaatttggtttaagtattatttttgatggaggtaggaattttgtagtagtttggagttaatttaatggttttttgtttttggtgttttattttttattattatataggtttttaaggttatttttaggtttaatattgtatgaatgattgttagtaattttttaattttttttatatatatatattttttttattttattttttattttttttttttttgagataggattttattttgttatttaggttggagtgtagtggcgtgattatagtttattgtagttttaattttttgggtataagtgatttttttattttagtttttaaggtatttgtgattataggaatgcgttattatgttcggttaattttgttatatatatatatatatatatttgtattttggtttttttatttgtaatattaggggttgaagtgttgtgatattttttggttttaggataatttggaaatagggattttttaatattttggatattgttaatagattatttacgaaatttttttagatgagtgttatgtttatttaggtttttaaaataatttgtaaggttaatagatggggataagaatgatttgaagttggtcgtttttgttcgtaattagaaatagttttgttttaaaaaaaaaaaaaaaaaaaaagggagtaggtaggtggttatatttgtttttggtaagtgagtgttgaaggaaaggagttgaagttttttatagttataattggtgttggtaggttattgtttcggttttgggcgttattgatttaaggttacggttttgtttgttgtttttattcgttttagtttaaaatttgcggttttagggttttttagttttttttttttttacgtttcgaagtcgagaaggtttaaagcgaagatagagaggattcggaagtagggaaaatttttgagtacgtgatgggggaatacgcgggtgttgttacgtgattcgataaacggtttttgtatagtgtagaatattttgttgtttttaaaggtataggttttagggtttttgttgtagacggggcgggggagagtacgatgggtggggcgtggtgggtcgtagggcgttcgagatggagtttttagtttttttgatggatcgcggggcgcgagtgttttagataagtcggagttgggatcggtaatcgggcgttgatttttgttatttgtcgtagatttttatttttttcgtgggagttttttttggatattttatgattttggattttcgggggatttgaatttgatgcgatgggaggttgtgtaggttcgcggcggcgtttttcggatttcgagggtgagtattttcgtttatttttatggaacgattatttttggttcgtagtttatttgaggggaatgagagttgattcggtttcgggaggatacgtaaggagcggtcgtgtatttgagagtaggtgggggttatgtttttttttcgtttttttagg

SEQ ID NO: 412 - DNA, 5337 bp, Artificial Sequence
  chemically treated genomic DNA (Homo sapiens)
tttgggagagcgagaagagggtatgatttttatttatttttaggtgtacgatcgttttttgcgtgttttttcggggtcgagttagtttttattttttttaggtgggttgcgagttagaggtggtcgttttatgagggtgggcgggaatatttattttcggaattcgaaaagcgtcgtcgcgagtttgtatagttttttatcgtattaagtttaggtttttcgagggtttagggttatagagtgtttaaagggggtttttacgggagggatgagggtttgcgataggtgataaggattaacgttcgattgtcggttttagtttcggtttgtttagggtattcgcgtttcgcgatttattaaggaagttgggggttttatttcgagcgttttacgatttattacgttttatttatcgtattttttttcgtttcgtttatagtagggattttgaggtttgtatttttaagagtagtagaatgttttgtattatgtagaggtcgtttgtcggattacgtgatagtattcgcgtgtttttttattacgtgtttagaggttttttttattttcgggttttttttgttttcgttttgggttttttcggtttcggagcgtgaaaaagggaggggttggagaattttggaatcgtaggttttaaattggagcgggtgggagtagtaagtagagtcgtgattttagattagtggcgtttaagatcgagatagtagtttgttagtattagttatgattgtgggaggttttagttttttttttttagtatttatttgttagaaataaatatggttatttgtttattttttttttttttttttttttttttgaggtaggattgtttttggttgcgaataaagacgattagttttaggttatttttatttttatttgttgattttataaattgttttagagatttaagtaaatataatatttatttaaagggatttcgtgaatgatttattggtagtatttaagatgttaagagatttttatttttaaattattttagaattaaaaaatattatagtattttaatttttggtgttatagatgagaaaattaaggtataaatatatatatatatatatataataaaattagtcgggtatggtggcgtatttttgtagttataggtattttggaagttgaggtgggaggattatttgtgtttaggaggttgaagttatagtgagttatgattacgttattgtattttagtttgggtgatagagtgagattttgttttaaaaaaagaaaaagtaaaaaataaaataaaaaaaatatatatatatgaaaaaaattggaaagttgttgataattatttatataatgttagatttaaaggtgattttagagatttgtatggtgataagaaatagagtattagaggtagggagttattgggttggttttaggttgttgtaggatttttgtttttattaaaggtggtgtttagattagattttttttttttttgatagggttttgttttgttgtttaggttggagtgtagtggtaggattttggtttgttgtaattttgattttttaggtttaggtgatttttttattttagtttttcgagtagttgggatagtaggtgcgtattattgtgtttagttaatttttgtgttttttgtagagattggattttgttacgttgtttagggtggttttaaatttttgagtttaagtaatttatttgttttggttttttaaagtgttaggattataggcgtgagttattgtatttggttagattaaatgattttaaggtttaagattttgatgttgtgattttatagaattgttttaattggaataggaaagtggggttggggaggggagaaggagggtatggggaagagaagtagagtaaggttattttatgtagttttaaataaggaattatatttttatttttttttaggtggaaagcggtattttgtattttttttttgtttttggttttatttttgttatgggttgtgttatttttatatgtttttttttattattaggtttttagaatgtagttggaaatgtgttttttcgtttgggtgtggtggtttatgtttgttattttagtattttgggaggttaaggtgggtagattatttgaggttaggagttcgaaattagtttggttaatatggtgaaattttgtttttattaaagatataaaaattaattaggtgtggtggtacgtatttgtaattttagttattcgggaggttgaggtaggagaattatttgaatttaggaggtagaggttgtagtgagttgagattgcgttattatattttagtttgggtgatagagtgagattgttttaaaaaaaaaaagaaaagaaaagaaaagaaatgtgttttttttagtgtgttttttaggttatttagttgatggaaaatggaattttattaacgtgtagggttttagaaatttagtagcgttttatatatggtatttgttattaaggaagttataggaaggtgggaggtagatatagatatttataatataaagtttagttaagtttttttttgtaagtttaattataggtgaggggatgtattttagagttattaattcggtttttttcgtttttgggggaagtattaatgacgtcgaaatgtgttagagtttttattagttttttttttattgttattttttttttttaggtaaaataggaattataaattttagtttttttttgtagagtggttgtggtttgtaggggaggtagaaatggttgaggtgcggatacgagatttgagttatttgagttgttgttgttatatgttttttttttttttttttttttagttttaaggttttttgtttttattttgttttttttggttttttgtttgttttttatttttaaatgtgtatttgagttttttgtgtgatgtatatttatttttcgggttgtagtgggggttattgtgggtattaggggtcgtgggtagggtttggggtggggacgtattagggagataggggaagaggaagtgtttttggttttggggaaggttggtttgttttggtgggtggggacggttattattagttttttggatatatagatagagatagataggatggatttttttcggttatatttttttgggttgtattaggttttgaggggggtattggtgagaagggtagatagttgttagatatttgtattttattttttggggttttattttcgggtattttttttggggttttatttttttttttttttttttgatttttttaaattggagattgtttttttaggtttaggtagatttttggtttaatattttttgaattttagtttttatttttaattatgcgttttcgtatttttaatcgatgttttttttggttttttttgtaaattttttttttttttttttagattttagtatttttttttttaatttgggtttttttagttagggtttttagggaaagggttgggattttttttaatgatttttttttttttttttttttttttttaggattttttcggtatttttgttttttattttttgggagatgtagtttttattgtagagcgggaggcgtaggcggttgaggaattgggggtggtggcggtgggaaagatagggaagattgtagaggaggaagtttaggaggatttggagggttttagaggtagttaaaacgagggggttggaaggttgagagggtttggagatgatagaagatatgaagtggggagtttagttgtagaatagatttggggttggggagatggtagtttttatgggttttaagtagagaggtaggatagtggggttggggagatagttaaggttgttaggtgttaggagttaagcgtttatttggaggttagaaagaaatttaaggtagggtttggggtttgttaagataggagcggttaagtttaggagaggtaggagttttatgagtaggaagtgaatagagaggagaggttgagaagttgggaataggaggaggaggaggaagaggttagggtaagagagttagggatggttagaggggcggagttagagtggatttggtatggggagacggaggggaaggttggtgttgttgggttaaaggcggtaggggataatcgggagatggagtagggggttagggaggtagatgtaggggaaattgaggagtttggggtcgaaggggttgggaaaggagaagaggtggtagtggtggagaaggtttgtgaaagtattagggtatgggggacgtggggtttaggggtagagtttgaggattggggaattttaggtagagaggaggttaggataattttaggtagggaagaggttagggtaattttagatggggaggaagttaggataattttaggcggggaggaggttgagatagttttaggcggggaggaggttgaaatagttttaggcggggaggaggtcgggatagtttcgggaggggaggaggtcgggatagttttaggcggggaggttgggatagttttaggaggggaggaggtcgggatagttttaggaggggacgaggtttggataattttaggtaaagaggaggttgatttgttgggagttagatagatagaatatggagtagttttaggagaaaggtttttagaggttattggaaaagtttgggttttagaggaggagggggatgaggagagagaggttgaggtgagttttttttttaaataggtttaggttttgggtattgaaagaatagaagaggttgttgagagttagatcgtagggagggaagttgtgggaggttaggaggtaggggagagttttgagggttaggtagatttgcgtggtaaggaggttgagatgaggtaggatttggggattagggtcgatcgggttaggatggaagagttggtataggtagaggaggtttaggaggagagagggagtagtagggatttagtggttgagttgtttttagatggagaggttgaaggtattgtcgatttggaggtaattttagaggttaggtttgaggaggagtttataggggaggagagtgaggcggtttagattagttgtggtttattgggcgtggaatggggtggttttatatatagcgttattaaaggttagggatttgagttgatggggggtgtttagattttaattaagtaattcgaggaaagggaggtaggggaggtggagtttatgggagttttggttttgagtaaagaggagtaggagaggagtttggaggtaggttttaggtacgcggggtttgtaaagtttgaggttttcgaggtttttttaggagtttgggaaaatcgtat

SEQ ID NO: 413 - DNA, 11577 bp, Artificial Sequence
  chemically treated genomic DNA (Homo sapiens)
attttttattgattttgtttttttggagaattttgattagaataatatagtttttttaggttttttttggttattatttattgagtttttttttggtggttttaaatttttttttttttttttattggtttttattttattggagtaattgagttttttagagttgtttttagttttgtttttgtttttaaaattttttttttttagtttattttttttattattttttttttttttatgattttaatttttattttcggtatataaatgtatttaagtatttaagttttttttatttaaatattattttaattttagagttttttttagttatagttttttttttttttttttttttttttttttttttttttttttgagatggagttttattttgtatttaggtaggagtgtagtgggatgattttagtttattgtaatttttattttttaggtttaagtaatttttatgttttagtttttttaatagtcgggattataggtatatgttattatgttcggttaatttttatatttttagtagaggtgagtttttgttatgttggttaggttgattttaaatttttggttttaagtgatttgttcgttttagttttttaaagtgttgggattataggtatgagttattatgttcggtttttattgtaaattttttttttttttttttttttttttttgagacggagttttatttttgttgtttagattggagtgtaatggcgtgatttcggtttatcgtaaattttcgttttttgggtttaagtgatttttttgttttagtttttcgagttagttgggattataggtatgtgttattatatttagttaattttgtatttttagtagagacggggtttttttatgttggttaggttggtttcgaatttttgattttagatgatttatttttttcggttttttaaagtgttgggattataggtgtgagttacggtgttcggttgtaaagttttttaatgttttttatatttaaatttgtttttattttttattttatattaggtaaaatttttttttttttttttttttttttgagatagagttttatattgttgtttaggttggagtgtagtagcgtgatttcggtttattgtaattttcgttttttgggtttaagcgatttttttattttagttttttgagtagttggaattataggtgtatattattatgtttggttaatttttgtatttttagtggagacggggttttataatgttgtttaagttggtttcgaatttttgattttaaatggtttatttattttggttttttaaagtgttgggattataggcgtgagttattgtgtttggtttggattaggtagaattttttatgatagaaatataatttaaaattgttttaaggggaaaaaaaatagaatttatttgtttatagagttaaaaagtatagaagtagattttttattttaagtatggttgaatttaggtttttaatgatattaataggaagttgttttttttattttttgtatttttttatgttgattttatttttatttttaatttttttttttgatgataagatgattataagaagttttaagtttatattttgtttgtttgttagttttagtagaaagagttagttttttttttaagattttagtaatagttttggaattgagttttatgagtttggtttgatttatttgtttatttttaattatttgggtagggaatgggatgttttaattggttaggtttgggttatatgggggtggtttatttaatttaaattataaaattgaaaatgaggaagaatggttttttaaaggaatattggagtgttggtattagaataaagggaattggatgtaggtaggtagaattaatagatgtttattatgtttttattttttaatttagtgtaaattgatttttatttttggtatttattgatattttttttattaaggtgattagggaatttgatggttaagagtatttgtttagtttttattttttatttttttgttagttattttttttttttgtaaattttgtttgatttttattatttagttttaattgaattttttttaatttttttgatttatttttttattttttttatatatagttattttttaagatttaggttttagtttttttttttttagtttttatttgtggttttatttttttttatatatatttttgttgggagtcgaaaaggttaaagggatcgtgattaatttagtattttattggaggttatatgattaaatagtaaattgtttattatgaatgtaggatgtgagtaaatatattgtatttgttattaaaaggtttgttgatggatattattttttggtgtagggttttttgaagttatttaagaaatttagtatttattgtttaaaagatgtagttttataagtttgttgtgaattaaatttttaattgataattatcgataattattttttttttttcgtttttttttgtttacgaaatacggagggatgtgtaaaatttagggtttttgtttattagaggtaaagtgttttttgatttttttttttaaatatatttttttgttttgttttttatttttattgtttatttatttttgtttagtttattagggattatggtaggttatatatttttagtttttggatattttttaaattttttgttttttagtaattatttgggtttttttaaagtttttaaattaatggttttggtaattttatagatttatgatttatgattttattttttttttttgttttttttttagttcgtatttttggtcggttattaagttagttatttttttattgggattcgtttttttattaacgttttttatttagttttatatttttgttttgtttagatttttattatgttatttttgatatttttgtttatagtttttgttttatttattttgtaattagggattcgattaattttttaagtagtagttgattaaaatatttttttatttgaaattttttatggttttttattgttattaagattttttaatatggaatgtttttagggttttagaatttgtttttagatttttttttaattatttattttgttgagttttttagattttaattaatttatttattgtttttaaaatatgttaaatatttttttatttttgaatttttatatgatattaatattagatttttattattgatttttttaaacgttttttatattttaaaattgagttttaagttatttttgtgaaattattcgtaaatatattagttatttttttaattttgagtgtatatttgtttgttgtttttgtataatatgtaatgttttttttagtaagggaattataggagagttttttttaaagttatgtatttttttaaaaagaatgttgtttgtttcggagttattattgttgtgagtaattaaaagttgttttttttgggtttttttatagtagtttttgttttttttttttttatgagattatgttaaggttaatgtgaaaatattttatgtattgttgttaatgtatgttagggatgagtataaaataatagataaggggaaatagaattaattgtagattttaatattttaatttttttaaatgtttttttttaatatttttttatggtttatattttaaatgattttaaaattatgttttaagtaaatatatgttttaaataatttttatttgttttattttttttttatagttatttttttttttttgttattaaagatatgtgcgttttttataaaaatatttttttgttttttgttgattatttttggaagttttttgttgatttttggttttttggtttttttttttggttttttattttttagggtggtggtggtggtagtgaaggagaggggttttttggtggtttttgtataagtatttttttttaatatgagtatgattaattggaattattgttatttttgtggtgtagataaaatgagttatgtagttattaatatttttttgatttaaaaagaaatacggaatttttttttttttgttgtttttagggaggaaaggtgtaaatataagagattgtagttagtattttggaagtttttaggagataggcgtttttttttggttattgattttttgggttattgacgttttttgaatagtagggttatcgtgtttttttttgaagtaagtgatttttaaggaattttttaggtttagtaatttttgtttagtttcgaaaagacgtaatggttgtaaaagtgtttcgttgaagaagataagatatatttatttttaaataaaaatatttatgggcgagaaaaatcggagtggattgaattaattatagtaaatttatgggttttaagggagtaaataatttaggttggttgaaagaattaaatattttaaatttataaagttagggatttttaaatttataaaaggatttaattttttttttttttttttttaggatttaattttttaataatttcgggagggggcgtaagagtaggatttttgtttttattttacgaatgaggaaattgaggtttagaaagtttaagtggtatgtttttttagtaatcggttaatcgtcgttgttttaattttattttattttttagtgtagtattagagtttttttaggggtggtcgtttttggttagtttagttttagtagacggggtgggtaggacgttttttattaggtagtattttcgtttttcggggttcgcgtagtttattttttttatttttcgttttattttagttacgagttgttttagggggatcgtttttttatttgttgattgggtagtttttgaattattgttgttttttgattggttgtttttttttcggttttgtaatatcgtttagatcgatcggatatacgggtagggttttcgttttattcgttttttttttggcgtttgttttttttttttagtcggtattatagcggtggttgtcgggcgtggtgtcggtgggtcggttggtttttgttttatcgttggtgttcgtgtcgtttagttgttcgttatggttgagttggattcgttcggcgtttttgtcggcgtttttggcggtttcgcgttggggaacggagtggtcggcgtcggcgaagaagattcggttgcggtttttttggcgtagtaagagagcgagattgcgggtatcgagaacgacgaggttttcgttattttggacggcggcgttttcgggttttagtcgtacggcgagtcgtcggggggttcgggtgagagtgcgggcgcgtttggggcgagaggatttgtttggaaattcggtttatagtgggttcgagagtttttgtgtgattcgtgttttttgttgaattaggaggttagggagtagtgtaaataggaaacgagattttggttcggttttttagaaatttaggttcgagaagtttgttcggtttttagtatgtttgagtgtttttgggcgcgggcggagcgagaaagtaagtgtagggtggtaggtttcggagtcggaagaagttcgtttaatttagtaattttttattaagtatttgttgtgtttttagttcggtttttgaagtaatcgtattggcgtagtttttttagatttataagtttataagtttgagtcgagtatagaattcgttattagaaaaggagggcggaaaaaaataagaatggaaatatcgtttttgagagatataaataaaagtagtaatgtagtttagtatttaagtatttaaggtgtatagagtgttggattacgaggaggaaggagggagtagggaattcgaaagatgatttaggtttggagaaagaattgttaagcgcggtaggagtttgttatcgttgagcgattgatttatagttaggatttttggagttttttttttgggaatagttttggtaggtaatattgtttaagtagaatttaagattagtttaaattaattagggagggatgaagaggtgaatagagaatgtttttagttaaatttaagtaaaaatggggtaggtaggatggtagtttgatttttggatgttttaatttgtgtgtgatgtttaggattatgagtggaaaagatttatttaataatataaagaagtaggaaatttagttagaagaaatgaaatacggttttttatttatttaaaaaattttaattaagggagaatagggtattattggggtatataggagtagtgtttattttaaatttaaattttaaggagttaggtaggtaatatatacgagagaagttggtttgatatgagatagtagaagtgttggagattgaggttttgttgtattatagtagtgttttgtgtaaaggtatttagatttagtagttttaagttattgtgttagttaggcggaattttttgatggatgggttggtgggtgtgttgttagtttgtagttttttgagtttttgattgtattatgttgttttttaaataaattagttttttaataagaatttagtgggaatatgtaatatgttcgaatatgtaattttatagcgggtaggttggattaaattaggttgtgattgtgagatgaagttggttttaagtgattaggggatatttttattgggtggtttttaatatttgtttgagaattttaaaattgattttttagatttttagtttaattttttttatttaatagaagagaagtaattttagagagaaacgatttgtttaaaaaagtacgagttaatagttgagttttaagtttatttatttttagaatatattatattttgttgtagtgtttagttgttttagtaggggtgtagtgcgataatagataggtagttgtggttgttttaggtggaatagatttgggagaagtagaatttaagatttgtagttggaagattgttttgatttaaggatagtgttatttttattgttttatttttattgtttagtagtgtgtttgatatgtagtagatgtttacgtttgataaagaaatgggtaaaaatgttagatttaagggttttatgtagaattgatagattttggtgacgggtagttagggaaggtaaaagggagagaatagagttggatgttcggttttttgtgtattaagttttcggtaaagggaaggaaagaaatggttgttgatttagtttttaggagggatttttttagtgaattaagtatttggtgatttaaagttagatttttgatagtgtaattgaagttggtaatatgtagtggttagtattttttttggagtttagagaattgattggatatttttttttttttagttttttttttttttttttttttttttttttaaagatatgttttagtggttaagattttatgttattttaaattgtttgagtgtgagtttagttttgtgattttagataatgtatataattattattattgttcggttttagtttttttttttgtaaaagttgtataatataatttataatgttatgtggtatttttaggattatattaaagagtgtttataaagtgtttatagttatattaagtatttagtgaattttagttattattagtgggagaaaggagttataaggtttttaggttttgaagtgtattgagtaaattgaggttttaggcgggagttttttttttgatgtattatatagagatatataggtagttagttatgatagattgatgagaggaaaataaattggttttagttttgcggaaagcgtttatggaggatgggtataggtaaaaattagaggggttagggttaagttttggatgatttttttggttgttaagagatttagaaaagagacgtaggtttagaggtaggaagaaattagttgggtgaagtgatattgaggtaattagttgtgggggatattgaggaagaataggtggttatgaaggaggtagtataagtggagttgttgaaaagtttttaattatgagggttgagtcggggaagagaataggagagataagttatagagagagtatagtagtaaggtattattatggtgttttgttgtttttgagatagtcgttttgttatttaggttggagtgtagtggtgcgatttcggtttattgtaattttcgttttttgggtttaagtagttattttgttttagtttttcgagtagttgggattataggcgtttattatcgtgtttagttaattttttgtatttttagtagagacggggttttattatgttggttagattggtttgaaatttttgattttaggtgagttattcgttttggttttttaaagtgttggaattataggtgtgaattatcgtattcggtgataagttattttttgtaggagaagaaagagatatgggtgaattaaagggaagttttttggagaagtaattttattggtagtagtggtggagggaagtttagggaaattttatgtatgatagttaattgtattgtatatttgttgtatattaggtatatttttagattttagtagtagttttataggttaagtggtagtgttatattttagatgagaatggatcggtgtggaagttgagtagtgttattaaggtagtaaggtaataaatggtttaagtgtagttttaaacgtaggtttgtttgattttaaatgtttttggaatgtggaaagttgaaagtgggtttgggatagttttttatttttgaaaattggttttttttttgtttggagtttttgaaaggttttagaaagtttttttttgaagtatcgtgttgtttagtttagttgttgtagtaagttaaggttttatatgttttttttgtatgtttttatagtaatagacgattttttggtttgagttagttgatttttgtaagaatgttagtgtagtaatatagtaattaataaagaggaaagtagatgttagtgggtttggaggagtttttagatagtatgtgatttttaaggagatgtgggatgaggattgttttttgttttgtatatggagtagtgattaaagttttttatattttagtttagggttggattatattagtggatagttggtatgttaattgtattatattaattataatgtaggtttggttagattagttattgtaggatttaggatttaaaattattttatttttttgttttatataaaaataaattttaggtggattaaagagagatatttaaaaagtaaaagaagaaaagtgagtatttgtttattttataataggaaaggtttttagtataaaagtagatatagaaattatgaagaaaaagtcgattatgtttatatatataaattaagttgttttaagtgttaaatattataaattaaattaaaagagaaattagggaaaatatttgattattagagagtaaatatttagagattaaaaaatagtaggaaaataggtaaatttagaaaatttagtaaagaagaaaattaggtgtcgggtatgtgattattttattggaaataagattggtataataaagttattatgagtttgttttttttttttattattaaattagtaaaaattttaaaatatgattaagtatagtttttagtattagggaaggtttaagaaatggggtatttgtgttgttagtagtaatataaattggtagattaataggaataagtgggtagaattttagaagtttttgaaatatatattttgggttaggtgcggtggtttacgtttgaaattttagtattttcggaggttgaagtgggcggattatttgaggttaggagtttgagattagtttgattaatatagtgaaatttcgtttttattaaaaaatataaaaattagtcgggtatggtggtacgtgtttgtaattttagttattcgggaggttgaggtaggagaattatttgaatttgggaggcggaggttgtagtaagtcgagatcgcgttagtgtattttagtttggttaatagcgtgagatttcgttttaaaaaaaataaaaaaatatatattttggttgggcgtagtggtttatgtttgtaattttagtattttgggaggttgaggtgggtggatcgtttgaggttaggagttcgagattattttggttaacgtggtgaaattttcgtttttattaaaattataaaaaaaattaggtgggtatgatagtttacgtttgtagttttagttatttaggaggttgaggtaagagaattatttgaataatttaggaggtggaggttgtagtgagttaagattgtattattgtattttagtttgggtaatagagtaagatttttttttaaaaaaaaataaaatatatattttgtgatttagtaatttttttttttttttttttttttttttttttttttttttattttttgagatggagtttcgtttcgttatttaggttggagtgtagtggcgcgattttggtttattgtaatttttgtttttcgagtttaagtaattttttttttttagttttttgagtagttgggattataggtttatgttattattttggttaatttttgtatttttagtatatggaggtgggttttattatgttggttaggtaggttttgaatttttgatttcgagtgatttttttattttggttttttaaagtgttgggattataggtgtgagttatcgcgtttagttgtaatttagtaattttatattaagaaatttattatagaggcgaaattgaatatgttttttttatgtttttattagtttgataaattttatatttttaaaattttatagagtgtttaaaaaattatataggtaggtggtatatgttttaaagtggtaaaaggttattgataaattataagaaatttatttttgtattgatatataggagtaaaagttaattaggaaaattaagaaaaatatgagaggttaggtatggtggtttatgtttgtaatttaatattttgggagatcgaggcgggtggatcgtttgagtttaggaaatcgatagtagtttgggtagtatggcgaaattttttttttataaaaaaatagaaaaattatttaggcgtggtggcgtatgtttgtaattttagtttttgtggggattgaggtgggaggttcgtttgagtttaaaaggtcgaggttatagtaagttatgattgggttattttgttttagtttgggcgatagagtaagattgttttaaagatgaagttgtaggtttttgtttattatgggtgattttaggttatattttttttttttttttatgtagaatttttatagagaaatattgttttttttttgttagttttttatttgttattattgtaaaatagaaaatagaaaataaaattaaaagtttttggatttgggagtttaaggatagatgtgtatatattttggtgaaatttgtatataagtatattttggttttatttgttgtatatagtatttattatagggatagtatttagtagtttaaggtttatatagtatatgatgttgtattttattgtataattttttggtttagtgtttgattagtttttattgatagattaaaattttatgttttgtaga

SEQ ID NO: 414 - DNA, 11577 bp, Artificial Sequence
  chemically treated genomic DNA (Homo sapiens)
tttgtaagatataagattttggtttattaataaggattggttaaatattgggttaaagggttgtatagtagaatatagtattatatgttgtatgaattttgagttattaaatgttatttttgtggtaggtgttatatataataaataaaattaagatgtgtttatatataaattttattaaaatgtgtatatatttgtttttaagtttttaagtttaaaagtttttgattttattttttgttttttattttatagtggtaataaatggaagattagtagaaagagaatagtgtttttttatgaaaattttgtatgagggaaaaaaaaaagtgtggtttggaattatttatagtgagtagagatttgtagttttatttttgagatagttttgttttgtcgtttaggttggagtaaagtggtttaattatggtttattgtagtttcgattttttgggtttaagcgaattttttattttagtttttataggagttgggattgtaggtatgcgttattacgtttggataatttttttatttttttgtaggaagggggtttcgttatgttgtttaggttgttatcgattttttggatttaagcgatttattcgtttcggttttttaaagtattggattataggtatgagttattatgtttggttttttatattttttttaatttttttagttgatttttatttttatatgttagtataaaaatgagttttttatagtttgttagtggttttttattattttaaggtatgtgttatttatttatgtagttttttaagtattttataaagttttggaaatatgaagtttattaaattagtgaaagtatgggggaagtatatttaatttcgtttttgtaataaattttttggtgtagaattgttgggttatagttgggcgcggtggtttatatttataattttagtattttgagaggttaaggtgggaggattattcgaggttaggagtttaagatttgtttggttaatatggtgaaatttatttttatatattaaaaatataaaaattagttagggtggtggtatgagtttgtaattttagttatttaggaggttgaaagaggagaattgtttgaattcgggaggtagaggttgtagtgagttaagatcgcgttattgtattttagtttgggtgacggagcgagattttattttaaaaaataaaaaaaaaaaaaaagaaaaaagaaagaaaaaaaaggaattgttggattataggatatgtattttatttttttttgagagagagttttgttttgttgtttaggttagagtatagtggtgtaattttggtttattgtaatttttattttttgggttgtttaagtgatttttttgttttagttttttgagtagttgggattataggcgtgagttattatgtttatttaattttttttgtagttttagtagagacgggggttttattacgttggttaggatggtttcgaatttttgattttagacgatttatttattttagttttttaaagtgttgggattataggtatgagttattgcgtttagttaggatatgtatttttttattttttttgagacggagttttacgttgttggttaggttagagtatattggcgcgatttcggtttgttgtaattttcgttttttaggtttaagtgatttttttgttttagtttttcgaatagttgggattataggtacgtgttattatgttcggttaatttttgtattttttagtagagacgaggttttattatgttggttaggttggttttaaatttttgattttaggtgattcgtttattttagttttcgaaagtgttgggattttaggcgtgagttatcgtatttggtttaggatatgtattttaaagatttttaaaattttatttatttgtttttattagtttattagtttatattattattagtagtataagtgttttattttttagattttttttgatattagggattgtgtttgattatgttttaaaatttttgttaatttgataatggaaaaaaaaaataaatttatggtggttttgttgtgttaattttatttttagtgaggtaattatatattcgatatttgatttttttttttattgaattttttgagtttgtttatttttttgttattttttgatttttaagtatttgttttttaatagttaaatattttttttagttttttttttgatttggtttatggtatttaatatttggaataatttaatttgtgtatgtagatatgatcgattttttttttatgatttttgtatttgtttttatgttgaaggttttttttattatgagatagataaatatttatttttttttttttattttttaaatgtttttttttaatttatttggaatttatttttgtgtaagatagaagagtgagatagttttaaattttagattttatagtggttagtttggttaggtttatattatggttaatatagtataattgatatattaattatttattaatatagtttagttttgggttggaatatgagagattttgattattattttatatataaaataagaagtaatttttattttatatttttttaaaaattatatgttgtttgaaggtttttttagatttattggtatttgtttttttttttattagttattgtattattgtattaatatttttataagaattaattggtttaagttaagggatcgtttgttgttgtggaaatatgtagaaaggatatgtagggttttgatttattataataattaaattaagtaatacgatgttttagaaggaaattttttagggttttttaggaattttagatagaaaaagggttagtttttaaaagtgaaagattgttttaaatttatttttaattttttatattttagaaatatttgaagttaagtagatttacgtttgaagttgtatttgagttatttattattttgttattttagtgatattgtttaatttttatatcgatttatttttatttgaaatatgatattattatttaatttgtggagttattgttgggatttgaaagtgtatttggtatatagtaaatgtgtagtataattaattattatgtatgagatttttttaaatttttttttattattgttattaataaaattatttttttagaaagtttttttttaatttatttatgtttttttttttttttataagaaataatttgttatcgggtgcggtggtttatatttgtaattttagtattttgggaggttaaggcgggtggtttatttgaggttaggagttttagattagtttggttaatatggtgaaatttcgtttttattaaaaatataaaaagttagttgggtacggtggtgggcgtttgtaattttagttattcgggaggttgaggtaggataattgtttgaatttaggaggcggaggttgtagtgaatcgagatcgtattattgtattttagtttgggtgatagagcgattgttttaaaaataataaaatattataatagtgttttattgttgtattttttttgtggtttgttttttttgttttttttttcgatttagtttttatgattgagagttttttaatagttttatttgtgttgttttttttatgattatttgtttttttttaatattttttatagttggttattttaatattattttatttagttggtttttttttgtttttaaatttacgttttttttttggattttttaataattaaaggagttatttaaggtttagttttaatttttttggtttttgtttgtgtttattttttatagacgtttttcgtaaggttggggttagtttattttttttttattaatttgttatagttgattgtttatatatttttgtataatatattagaaagagagttttcgtttaaaattttaatttatttagtatattttaaagtttaaaggttttgtaattttttttttttattaatagtagttggaatttattagatatttaatataattgtaagtattttatagatattttttaatgtaattttaaagatgttatatagtattataaattatattatgtaatttttataaaggagaaaattgaggtcgggtagtggtggtagttatatatattgtttgagattataaagttaaatttatatttaagtagtttaggatagtatagaattttaattattagagtatatttttaaaaaaaaaaaaaaagaaggaaaaagaaaattaagagagaaaaagtgtttaattagttttttaaattttaaaggaaatgttgattattgtatattattaattttaattatattgttaggaatttggttttaagttattaaatgtttagtttattaagaaagttttttttaggaattaagttagtaattatttttttttttttttttgtcgaaggtttgatgtataaaggatcgagtatttaattttatttttttttttttattttttttaattgttcgttattaagatttgttagttttatataggatttttggatttgatatttttgtttatttttttgttaaacgtgagtatttattatatgttagatatattgttaggtagtggagataaaatagtaagggtaatattgtttttgaattaggataattttttaattatagattttgggttttgttttttttaaatttgttttatttgggatagttatagttgtttgtttgttatcgtattatatttttgttaaaataattaaatattgtaatagaatgtggtatattttaagagtgggtagatttggggtttagttattaattcgtgtttttttaagtaagtcgtttttttttaggattgttttttttttattaaatgaggaaggttaaattaagggtttaagaagttaattttaaaatttttagataaatgttagagattatttaatgaaaatattttttaattatttaaggttaattttattttataattatagtttagtttagtttaatttattcgttataaagttgtatattcgggtatattatatgtttttattaagtttttattgggggattgatttgtttaggaagtaatatggtgtagttaaaaatttaagaggttgtaaattagtagtatatttattaatttatttattaaaaggtttcgtttggttggtatagtaatttgagattgttggatttgaatgtttttatatagagtattattatagtgtagtaaagttttagtttttaatatttttattgttttatgttaagttagtttttttcgtatatgttatttatttggttttttaaggtttgaatttagggtagatattatttttatatgttttagtagtgttttatttttttttagttggaattttttaagtgaatgaaaagtcgtattttattttttttagttaaattttttatttttttgtattattaagtaggttttttttatttatgattttaagtattatatataggttaaggtatttaaaggttaaattgttattttatttgttttatttttatttgagtttggttgagaatattttttatttatttttttatttttttttgattggtttaggttaattttgggttttgtttaggtaatattgtttattaaagttgtttttagaggaagagttttagaagttttagttgtaaattaatcgtttaacgatagtaaatttttatcgcgtttggtagttttttttttagatttagattatttttcgagttttttattttttttttttttttcgtaatttaatattttgtatattttaagtgtttaaatgttgaattgtattgttatttttgtttgtattttttaaaaacgatatttttatttttattttttttcgttttttttttttaataacgagttttgtgttcggtttagatttataagtttataagtttggaaaaattgcgttaatgcggttgttttagagatcggattaaaggtatagtaaatgtttaatgaaaagttgttgaattgaacgggtttttttcggtttcggagtttgttattttatatttgttttttcgtttcgttcgcgtttagaagtatttaaatatgttgagaatcgaataggtttttcgagtttaggtttttgaaagatcgggttagggtttcgttttttgtttgtattgttttttaattttttaatttagtaaggagtacgagttatatagaagttttcggatttattgtggatcgagtttttagataagttttttcgttttaaacgcgttcgtatttttattcggatttttcggcggttcgtcgtgcggttggggttcgggggcgtcgtcgtttaggatggcgaaggtttcgtcgttttcgatgttcgtaatttcgtttttttgttgcgttaagaaggtcgtagtcgggtttttttcgtcggcgtcggttatttcgttttttagcgcgggatcgttaggggcgtcggtaggggcgtcgaacggatttagtttagttatggcgggtaattgaacggtacggatattaacggtgagataaaaattaatcgatttatcgatattacgttcggtagttatcgttgtggtgtcgattgggagaggaggataagcgttaggagggagacgggtaaagcggaagttttattcgtgtattcggtcggtttaggcggtgttgtagagtcgaaaagggaataattaattagaggataataatggtttaggagttatttaattagtaagtggaggggcggtttttttaaaataattcgtgattggggtagggcgggaggtgagggaggtgagttgcgcgggtttcgggaggcggaagtgttgtttgatagggagcgttttatttatttcgtttgttggagttggattgattagggacggttatttttgaggggattttagtgttgtattgggaggtgaggtgaagttagggtagcgacgattggtcgattattgaagaggtatgttatttaggttttttgaattttagtttttttattcgtaaaatagaaataagaattttgtttttgcgttttttttcgggattattagaagattgaattttaaaaaaaaagaagaagaagattgaatttttttatggatttgagggtttttggttttataaatttaaaatatttaatttttttagttagtttggattatttgtttttttagagtttatagatttattgtaattgatttagtttatttcgatttttttcgtttataagtatttttatttaaaaatgaatatattttattttttttaacgaagtatttttgtagttattacgttttttcggagttagatagaagttattaaatttggaaaattttttaaggattatttgttttaaagggagatacggtggttttgttgtttaaggagcgttagtgatttagagagttagtgattaagaggaaacgtttgttttttggggatttttaagatattagttatagttttttatatttatattttttttttttaaggatagtaggaaaaagaaagtttcgtgtttttttttaaattagggagatgttaatagttatatggtttattttgtttatattatagaaataatagtggttttagttaattatgtttatgttgagggggagtgtttatgtaggggttattagaagattttttttttttattattattattattattttaagaaatgaaaagttaaaaaaagaaattaaaaaattagaggttaataagaagtttttagaggtagttagtaggggataagaaagtgtttttataaaaaacgtatatatttttgatgataaaaaaaaagggatagttatgaaggaaaaatgaagtaaataaaaattatttaaagtatatatttatttaaagtataattttaaagttatttaaagtatgaattataggaaagtgttgaagaaaaatatttaagaaagttaaaatgttagggtttgtaattgattttgtttttttttgtttgttgttttatgtttatttttaatatatattggtaatagtgtatgaagtatttttatattagttttgatatagttttatgaggaaaagaggggtagggattattatgagagagtttaaggaagataatttttagttgtttataatagtagtagtttcggaatagatagtattttttttggggaaatgtatgattttgggagaaatttttttgtgatttttttgttagaggaggtattatatattatgtaaaagtaataaataagtatatatttaaaattggaggaatagttgatgtgtttacggatgattttatagaggtggtttggagtttagttttgaaatatggggaacgtttagaagagttaataatgagggtttaatgttagtgttatgtaaaagtttagaggtgggaaaatgtttggtatgttttggggatagtgagtaaattagttggagtttgaagagtttagtaagatgaataattgaaggaaaatttggggatagattttggagttttgaaagtattttatgttaaggaattttaatggtaataaggaattatagaaggttttagataaaggaatgttttgattaattgttgtttaggaggttaatcgggtttttggttgtaggatggatggggtagaggttgtgggtagagatgttaggagtgatatgatgaaggtttgggtagggtagaggtatggagttgagtggggagcgttgatgggaaagcgggttttagtagggaagtgattaatttggtgatcgattagaggtacgggttgggaaaaaggtaaggggaaaggatggggttataaattatgaatttgtgaaattgttagaattattagtttgagggttttgggggagtttaggtgattgttgggagatagaagatttagaagatgtttaggaattagaagtgtgtagtttgttatgatttttggtggattgaataaaggtgggtgggtaatgggaataaaagataagataaaagagtatatttggaagaaggggttagggggtattttgtttttagtggataagggttttgagttttatatattttttcgtatttcgtaggtaaaagagagcgagaaagggggggtgattgtcggtaattgttagttagaggtttggtttatagtaggtttgtgagattgtattttttgaataataggtgttagattttttagataattttaaggagttttgtattaaggagtgatgtttattagtaaattttttggtggtaggtgtagtgtgtttgtttatattttatatttatgataaatagtttgttgtttgattatatagtttttagtggaatgttgagttggttacgatttttttggttttttcggtttttaatagaagtgtgtataggagagagtgggattatagatggagattagagagggaaggattgaggtttaaattttggaggatggttatatgtgaaggaggtagaggggtgggttagagagattggagagggtttagttagagttgggtgatggaagttaagtagagtttgtagaaggaaggagtgattagtagaaaggtgaagaatgagagttgagtagatgtttttggttattaagttttttggttattttggtgagagagatgttagtggatgttaggagtggaaattagtttgtattaggttgagggatggaagtatagtggatatttgttggttttgtttgtttatatttaattttttttgttttgatattagtattttaatatttttttggggaattatttttttttatttttagttttgtggtttggattgagtggattatttttatgtgatttaggtttggttaattagaatattttattttttgtttaaatgattgggaatggataagtgagttaaattaggtttatgaggtttaattttaggattgttattagaattttagggaaagagttaattttttttgttggagttgataagtaggtaaagtgtaagtttagagttttttgtggttattttgttattaagaggagagattgagagtgagaatgaggttaatatggaggaatgtagagagtgagaaagataattttttgttggtattattgaggatttggatttagttatgtttgaagtgaaagatttatttttgtattttttggttttgtgaataaataaattttattttttttttttttaagataattttgagttgtgtttttgttataaagaattttgtttaatttaggttaggtatagtggtttacgtttataattttagtattttgggaggttaagatgggtggattatttgaggttaggagttcgagattagtttggataatattgtgagatttcgtttttattaaaaatataaaaattagttaggtatggtagtgtgtatttgtaattttagttatttaggaggttgaggtaggagaatcgtttgaatttaggaggcggaggttgtagtgagtcgagattacgttgttgtattttagtttgggtaatagtgtgagattttgttttaaaaaaaaaaaaaaaaaaaaaagaattttgtttaatatagaatgagaagtgagggtaaatttaaatgtagaagatattagaaaattttgtagtcgggtatcgtggtttatatttgtaattttaatattttgggaggtcgaggagggtggattatttgaggttaggggttcgagattagtttgattaatataaagaaatttcgtttttattaaaaatataaaattagttgggtgtggtggtatatgtttgtaattttagttaattcgggaggttgaggtaggagaattatttgaatttaggaggcggaggtttgcggtgagtcgagattacgttattgtattttagtttgggtaataagagtgaaatttcgttttaaaaaaaaaaaaaaaaaaaaaaaaaaggtttgtaatgagggtcgggtatggtggtttatgtttataattttagtattttgggaggttgaggcgggtagattatttgaggttaggagtttaagattagtttggttaatatggtaaaaatttatttttattaaaaatataaaaattagtcggatatggtggtatgtgtttgtagtttcggttattggagaggttgaggtatgagaattgtttgaatttgggaggtggaggttgtagtgagttgagattattttattgtatttttgtttgggtatagagtgagattttattttaaaaaaaaaaaaggaaaggggaaaggaggaaaggagggagagttgtggttagagagggttttaaggttggggtgatgtttaggtaagagagatttgaatgtttgaatatatttgtatgtcgaagatagaggttgaagttatagaagaaggagaggtggtgggaaggatgggttaaggagggaggattttagaggtagagataaggttgaggataattttgagggatttaattgttttagtaaagtgagaattagtagaaaagagaggagaggtttagaattattaaggggaaatttaatagatgatggttaagaaagatttagaaggattgtattgttttagttagggttttttagagaaatagaattaatagaagat

SEQ ID NO: 415 - DNA, 4190 bp, Artificial Sequence
  chemically treated genomic DNA (Homo sapiens)
taatagatgttaatttgtaatgtgtttaggagaatttagaggaagtataagatttatttttttattaaaaaaattatagttaatgaggatatatttattaattatttattaagtggtgatatggtagtataaggtaaaatataaaggaataaaattaacgtttattaagaattaattatgtggtattttatattgagtattatatttaattttgaaaaaaatttttgtattgtattattttttatattttatggatgtagtaattaaggttgagaattttaaaattttttttaagtttagatatatagttaagtggtagaattaagatttaaatttattttatttaattgtagagtaaattgtatgttttaaatgttaaagtgaatattagtatagttaatataatgtttggaaatttagagaaggaatgatttttttgtattatagttattaaggaattattgttattatttaaatgttagtgtttttatattaggtttaaattttttgttttattaattgtgaattaagatttgatttaatttttatttgagtatttgtcgtaatgagaaattatttatttttattaattatatatttattttataataatagattgttagtaagtttttttttatatatatttaatagttgttttttaagatgttgtaggattatgtttagagttaaattagttagaagtaatgtttaaaatatattataatattgtgtagtaaaggttttattattatttgtttggtttaaatattttaggtagtattggatatttgaattattaattatttttataaattttgatttttttattagttatttttattagaagaattaattttatatgataatagtttttttatgttatttttttttaagttaaattgtatatttttttatttgattaatagagtttaagttatatgatttaaatgtaagagaaattgggaatggaagtttgtggattttattttagtaaggtaaagttattattgggaatttttttaatataggaagggtgttttagagatattaaggagttatataaatggaaaatgtttattataatttattatttggttgttttatattaatatttatttttttgttatatttaaagtttttaagaataaaaattattttattgaatataatttttattattttttatataaaggaaaattagatttgatttagtagaattgaaataatttagttttaatagttattgtttttaattttaagtattgtgtttttaggtgatatttgttttaataatagtttggttatatttttaatttgatattttttagttttttaatttgataattgtattttaaattataaagtttattattaatatgttatatataaaataattaaagggggaagaagaaagagaaaaaggaaattttttaaaatatataggtatatatatgataaagtaaagaaggaaatgtgagtagatagcgtagttttcgtttttgaaattggttttttgattggggttatatttattttatttttttatttttagttaggtaggtggagtaaaatttaagttttggtggatttgaattttgatgttgtggagttgttttattagttttagattatttgttttttaatttttaattatattagtgaaagtaaatagttttgatttgtttaagtttttgattttttggtttaattgatgtaagattataagataagagttttttagtttcggatttttttttgttttgttaatggtgaaatgtttagagaagagttgttaattttggtaaataaaaaatataggattttagttaaatttaaattttagataaataataattttttagtattagtgtgttttatttaatatttggatatatttaattaaaaaatgatttgttgtttatttgaaatataaatttaattgggtattttgaatattttttggtaattttcgagagagtgaagaaagtggtataaggatatttaagaagattagatttgaaaagatattacggatgtgtttaaatgttttattttagagagagttagagttgtaggtagaatttgggaaattaagttaaaagtaatagaggatttggttaatatatattaaggagtggattattttggttataagtttaatttgagattaagggtatagtgagatgatttgggaaaggtatttatatattatttattttcgtttttgaattaaatgttttataaatttttaagagaaatgatagtttattatgtggattgttttttgtaagtttagggaaaataaaagttatgtgtttgaaatttatttttgatattataaggtgtgtgatttttgttatgttaatgggtttgagtattaattttataattgtaaagtgatagtaatggtgtgtttttaggttgttgtggaaagtttgatttttaatgtaatagtaggaaattttaatttttttggagtaaatatttttttatatttttattttttttgtatattggtaggattttatttttttatttttttttagtgttagagtagaaagggattttgatttgatattaggaaaatttatttttgaattataagttatgatagttgatttaaaaaattgattattatgatatgataatgattataatggtaatatatattgatagggttgtcgtgaaagtaataatatatttaagagttgtgataatatatgatatatttagatttttagaaaatgttaattttaattttaattgttttttgtataaagttttgttttagggtttgttttttttttatatttattttttttggattttttttttgttaaaaatatgtggtttagaggaggagagagatttaggttaatgttttttaaattataaggaattattatttaaatggggttgttgtttaagttttgacgtgtagtggaatggagtggagtggagtggaatggaaattaatagaaaatattgtatatggttaagataaagattgttttttgaaatttttaatttgtgtttatatatttatatatatatatgtgtatgtattgggattttgtaatatgtatttttgattatggaatatagttataaaagtttttgtattgaacgtttagtgggttttttataagttgttttaattgggaaagaaaaatatggtttttttattttttgtttttaattttagaaaagttattatagttgagggtatatttgagaagttagtatttgggagtttagggtttaagtttttttttagaaaaatattgggtgattttaggggaatttttgattagaaatagttaatttagagtgagagaagaaaacgtgattatgtagtttttgtggttattagttttgttttttttttgttttttgggagttataaaatttaagattggaaaggaaaattagtatttgtttaggtagtttttttgggaagatgttgtttttttttttttttttgttgtttttttttttgtgttttagagttgaagttggtgagtattagggtttttttttttgaaatttgtagtattagtttttgaaataaagatgtttagtttgaaaatagttgatttttaaatagggttttaagatttttttttaagagttttagagggaaatttttatttgggatgtgtgttattttatttttatttttatttattgttattttttatagtttaggatagtttttaggaataaggaattttattttaattgtagaaaagtttagagtaagtggaaggaaaaggggtatttttaggaaaatagatatgtttttttaattttttgagtattagggttatttattattttgtgatttttttattttgtgattatgtttaagagttatggagaaatttaaaataggaatttggatagtgggttttatatagagatagaggagggtgggttagggtaaggtgggagtgggagaagtttgagatgaaaatattagaatggagtagaggtaagaatgagattttatttgggaggttatgggtggggaaagatacgaaatataggagataggagagggaagatgggcggaatatagggtgagaatgagattttagggaagtttagtttagttttaatttaatttgtttatttattggagagagtatttatggtcgtgtttaaattttggggtgttttgttttagg

SEQ ID NO: 416 - DNA, 4190 bp, Artificial Sequence
  chemically treated genomic DNA (Homo sapiens)
tttggaatagagtattttagggtttgaatacggttatagatattttttttaatgaatggataaattgggttaaagttgagttaggtttttttggaattttatttttattttgtgtttcgtttatttttttttttttgttttttgtatttcgtatttttttttatttataattttttaggtgaaattttatttttgtttttgttttattttgatgtttttattttagattttttttatttttattttgttttggtttatttttttttgtttttgtgtaggatttattgtttaggtttttgttttagatttttttatagtttttgagtatggttatagagtgagaaagttataaagtaatgggtagttttgatgtttagaagattaagaggatatgtttgtttttttggggatattttttttttttttatttgttttgggtttttttataattgaggtgaaattttttgtttttgggggttgttttaggttgtagagaatggtagtgggtgggggtgggggtggggtggtatatattttaagtggaaatttttttttgggatttttgaagagagattttggaattttgtttaggagttagttatttttagattaaatatttttgttttaggagttgatattgtagattttagagggaagaattttgatatttattagttttagttttggagtataagagaaagagtagtagggggagaggaagaagtagtatttttttagagaggttgtttgagtaaatgttggtttttttttttagttttgggttttataatttttagaaggtaagagaggggtaaggttggtaattataggaattgtatggttacgttttttttttttattttgaattggttgtttttgattagaagtttttttagaattatttagtgtttttttagaaaggaatttgagttttgaatttttaagtgttggttttttagatgtatttttaattatggtgatttttttggagttgggggtaggaaatggagggattatgttttttttttttaattagggtagtttgtgaaaggtttattgaacgtttagtgtaaagatttttatggttatgttttatagttagaaatgtatattgtagagttttagtgtatgtatatatgtatgtgtgagtatgtaagtataaattaaaggttttaggaaataatttttattttaattatgtgtagtgttttttgttagtttttattttattttattttattttattttattatacgttaaaatttgagtaataattttatttaaatgataattttttgtaatttgaaaaatattgatttggatttttttttttttttgaattatatgtttttgatagaagagagatttaaggagggtagatgtgggaaaagaatagattttaggatagaattttatgtaaagagtaattgggattggaattagtattttttgagagtttaggtgtattatatattgttataatttttagatatattattatttttacggtaattttattaatatgtattattattatgattattattatgttatgatagttaattttttaaattagttattatagtttatggtttagaaatagatttttttgatattaaattaaggtttttttttgttttagtattagagagaaatagaggaatagagttttgttaatgtgtaggggaagtaaagatgtagaagggtgtttgttttagagaggttggggttttttattgttgtattaagaattaagttttttataataatttggggatatattattattgttattttataattgtagaattgatatttagatttattaatatgataaagattatatattttataatattagaagtgggttttaagtatatagtttttattttttttggatttatagaaagtagtttatatggtggattgttattttttttggagatttataaggtatttagtttaaagacggggatgagtagtgtataagtgttttttttaaattattttattatgtttttggttttaggttgggtttgtgattagagtgatttattttttagtatatattggttaggttttttgttgtttttaatttaattttttaagttttatttatagttttaattttttttagaataagatatttaaatatattcgtaatgtttttttaaatttggtttttttaagtgtttttgtattattttttttattttttcgggggttgttagagaatatttagaatgtttagttaaatttgtattttagatgaataataaattattttttagttaagtatgtttaaatattgaatgggatatattaatattaaaaaattgttgtttatttaaaatttgaatttaattggaattttgtattttttatttgttaaagttggtaatttttttttgggtattttattattaatagaatagaagagaattcggagttggagaatttttgttttgtggttttatattagttagattaaaaaattagaggtttaaataaattaaagttgtttgtttttattgatataattagaaattgagaggtaggtagtttggggttagtaagatagttttatagtattaagatttagatttattaagatttaagttttgttttatttgtttggttgagggtgaggaaatggaataggtatagttttagttaggggattaattttagaaacgaggattgcgttatttgtttatatttttttttttgttttgttatatgtatatttgtgtattttaagagattttttttttttttttttttttttttttttggttattttatatatagtatgttggtagtgaattttatggtttagggtatagttattaagttgggagattagagaatattaaattgaaaatgtgattaaattattgttggagtaggtattatttagagatatagtatttgaagttaaaagtagtaattgttgagattgggttattttagttttgttgagttaagtttaatttttttttatataaaagatggtaaagattatgtttagtgggataatttttgtttttggaaattttaagtgtggtaaaagaatgaatgttgatgtggggtaattaagtgatggattgtagtggatattttttatttatatggttttttaatgtttttggaatattttttttgtattagaggaatttttaatgataattttgttttattaaggtagaatttataaatttttatttttagttttttttgtatttaggttatgtgatttagattttgttaattagataaaggggtgtataatttgatttagaagggagtaatatgagggagttattattatgtggaattaatttttttagtgagggtgattggtagaggggttagggtttgtggaaataattgatgatttagatatttagtgttgtttagaatgtttgggttaaataagtggtagtaggatttttgttgtatagtgttatggtgtattttggatattgtttttggttagtttgattttagatataattttatagtattttgggaagtagttgttgagtatgtataagaaaggatttattaataatttgttgttataaaataaatgtgtggttagtggaggtaagtgattttttattgcggtagatatttaagtagaggttgaattaagttttgatttatagttagtaggatagaaaatttgggtttgatgtagaagtattggtatttaaataatggtaatgattttttagtaattataatgtagagggattattttttttttgagtttttaaatattgtattaattgtgttagtatttattttgatatttaaggtatgtagtttgttttgtagttagatggggtgagtttgaattttggttttgttatttagttatgtgtttgaatttaggaaaaattttaaagtttttagttttagttattgtatttataaaatatgaagaatgatatagtataaggattttttttagaattaaatatgatgtttaatgtgaaatgttatatgattggtttttaataaacgttggttttatttttttgtgttttattttgtgttgttatattattatttgatggataattgatagatatatttttattggttataatttttttgatgaaagaataaattttatattttttttaaatttttttaaatatattatagattaatatttgtta

SEQ ID NO: 417 - DNA, 1904 bp, Artificial Sequence
  chemically treated genomic DNA (Homo sapiens)
  unsure 62, 64, 74, 76, 101..102, 104, 159: n is a or g or c or t
tttacgttttttttcgtttgttttgttcgtttcgttttattcgcgcgttttttttttttggngnagttttttgntntttttttcgcgttttttagtttcgnnnngggtttttttttttacggtttcgttttatatgttttttttttatcggcggttttntttttttcgcgacgaataggattcggtttcgttttttttcgaagagatttagtagttttttttgggaggggaagagtcgattttggtttaaagtagttgggaggtgttgttcgtacgtgcgggtggttcgggaagtgagggtttatttagtttttttgagttgttttttagttgaggtttgtattttttttcgcggttattagtagtttttgtatagtgatttttgagatttgttgattgatgattttttttatgattttaagtttttttgtagaaattattgacggagttttgtgtttgtgagtcgttttttttatggggaaggttattagtgtttttcgagtgagtatggaatatttcgagtttttagggttatagatagtcgtttttagtgtggttgaggttatttagaggtagtagagtatttagattttaaatagatttttgtttatgtcgacgtttgtacgatcgttttagtttttgtggttttttcggaatgttaaggggatcggatatgaaaggattttgtgagtcgattgttttatttttagcggttttgttatttagtttatttattaatggggttagttaggtttaggtattgggtttcggaggatttattattgttttttgttgttatgtggattggtgtaagttgaggattttttgttggtttagttacgtatgtagtgttggggatgttttggtttttattgttttgagaattgttgagatattttattaataaattgtgtagttggaaaatttatatttgtattgtttggttagttttaatgtagaggagttggtgggtttgttttggattatagggttttgtggttttagtttataatttgagtaatgtagggattaagtgaaaaattttttttgtaggaatttggggtttggatttcgtagggatagaagacgatttaggatattttggttttgagtttcggggtatgcggtttttatttcggtttttttgtttttgttttttttgtggtgtagtgacgtgagtggattgtttttttgttgttgtaatattgaaacgttggcggagtagtaaggaggtagttataggtgtagttatatattcgagggtggtatttttgagagatgttttgatttttgttttagttttttaaatttaaagattagtatatcgatgggagggttttagttggtgtagttaagggtagtgttttcggtaattgttttttttttgttgttgtgttggtttttggtagagttttgttttgtcgtttaggttagagtgtagtggcgttatttcggtttattgtagtttcgattttttgggtttaagtaatttttttgatttagttttttaagtagttgggatcgtaggtacgtattattatgttcgattaatttttgtattttttgtagagatagggttagattcgaatttttgagtttaagttgagttttttgttttggttttttaatgtgttgggattataggtgtgagttattgtgttaagttttttgtgaaattaatttattattttttaattattatttgtttttggagatggaattttgttttgtagttttaggttggagtgtagtggtacgattttgggttagtgtaattttcgttttcggggtttacgttatttttttgttttagttttttaagtaggtgggattataggcgtttgttattacgttcggttaattttttgtatttttagtagagtcggggttttattatgttagtt

SEQ ID NO: 418 - DNA, 1904 bp, Artificial Sequence
  chemically treated genomic DNA (Homo sapiens)
  unsure 1746, 1801..1802, 1804, 1829, 1831, 1841, 1843: n is a or g or c or t
ggttaatatggtgaaatttcgattttattaaaaatataaaaaattagtcgggcgtggtggtaggcgtttgtggttttatttatttgggaggttgaggtaggagaatggcgtgaatttcggaggcggaagttgtattgatttaagatcgtgttattgtattttagtttgggattatagagtaagattttatttttaaaaataaataataattaaaaaataataaattaattttataaaaggtttggtatagtggtttatatttgtaattttaatatattgggaggttaaggtaggaggtttagtttgaatttagaaattcgagtttagttttgtttttataaaaagtataaaaattagtcgggtataatggtgcgtgtttgcggttttagttatttgggaggttgagttaggaggattgtttgagtttagaagatcgaggttgtagtgagtcgagatggcgttattgtattttagtttgggcgatagagtaagattttgttaaaaattaatataatagtaaaaaaaaaataattatcgaggatattatttttggttatattagttaaaatttttttatcgatgtgttggtttttggatttggagaattggggtaaaggttaaggtattttttagagatgttattttcgggtgtgtgattgtatttgtggttgtttttttattgtttcgttagcgttttagtgttgtagtaataagaggataatttatttacgttattgtattatagggagggtagaagtaagggggtcggagtgggagtcgtatgtttcggaatttagggttagggtgttttgggtcgttttttatttttacggggtttaggttttagatttttatagaaggagttttttatttagtttttgtattatttaaattataaattgaaattataagattttgtgatttagggtaagtttattagtttttttgtattagagttggttagataatgtaaatgtagattttttaattatatagtttattagtaaagtattttaataatttttagagtagtaaaaattaaggtatttttaatattgtatgcgtgattagattagtaagaagtttttaatttgtattagtttatatggtagtagggggtagtggtgagtttttcggagtttagtgtttgggtttgattggttttattgatgagtgagttggatgatagggtcgttggagataggataatcggtttatagggtttttttatgttcgatttttttagtatttcgagggagttataggaattggggcggtcgtgtaagcgtcggtatgaataggggtttgtttggagtttgaatgttttgttgtttttgggtggttttagttatattgggaacgattgtttataattttgggaattcgaagtgttttatgtttattcgggaagtattgataattttttttataggggaaacgatttataaatataggatttcgttagtagtttttgtagagaaatttaaaattatgaaaagggttattaattaatagattttagaagttattgtgtagggattattgatggtcgcgagaggaagtgtaaattttagttgaaaagtaatttaggggggttgagtgagtttttatttttcggattattcgtacgtgcgggtaatattttttaattattttgggttaaagtcggtttttttttttttaggggaggttgttgggttttttcgggggggggcggggtcgggttttgttcgtcgcggggggggnggggtcgtcggtggggggggagtatgtggggcggggtcgtgggggggggggtttnnnncggggttggagggcgcggggggggnantagagggttntnttaggaggggggggcgcgcgggtggaacggaacgggtagagtaaacgagggagagcgtggg

SEQ ID NO: 419 - DNA, 6568 bp, Artificial Sequence
  chemically treated genomic DNA (Homo sapiens)
atgtatgaaaatatgtaataattataaagattgttaaaatgtaagttatttattgtgtgagtattattttgttaaatgtatgtatgtatgtatgtgtgtgtgtgtgtgtgtgtatatatatatatatatatatatatatatatatatgtaattttttttttgagatagggttttttttttgtttaggttggagtgtagtagtgtaattatagtttattgtagttttgattttttaagtttaggtgatttttttattttagttttttgggtagttgggattagaggtatgtgttattatttttagttaattttttttttaagagatggggttttattatgttggttaggttggttttgaatttttgggtttaagtaatttgtaatttgtttgtttcggattttttaagtattgggattatgggtgtgagttattatgtttagtttttgttttatatttttatttttatagtttttatcgtgttttaataaattataattttgtttttggtttattgattgtttttttttattagaatgttagttttataagggtagggatttttgtttgttttatttatttttgtatttttggtgtttagaatagtttttggtatatagtagatgtttaataaatatttgttgaatgaatgaattttttgtgtataaggtagttttgtaaagtttttaaattttttttttttaagaagtttttttttaaatgtatgtaattttatttagttattgtatatttttattttatagatgatgaaattaacgttggaaaaatttgtttagagttattgatttgaaaagtggtagggttagatgtatttgtttatttaagaaattttgagagggttgggtatggtggttggtattcgtgattttagtattttgggaggttgaggtgggaggattatttgattttaggagtttaagattaatttggtaatatagtgagatttttattttttaaaaaaataaagaggttgggtgcggtggtttatgtttgtaattttagtattttgagaggttaaggtaggtagattatttgaggttaggagttcgagattagtttggttaatatggggaaattttgtgtttattaaaaatataaaaattagtcgggtgtggtggtgggtgtttataattttagtaatttttgaggttgaggtaggtaaatcgtttgaatatggaaggtagaggttgtagtgagtcgagattgtgttattgtattttagtttgggtaatagagcgagattttaatttaaaaaaaattagaaatatcgagtgtttgttgtgtgttaggtgttagggagatagatgattaagatttggttttttttgttttttatagtatttttaggaatgggggttatagaggaaatattaggatgttataagaatatagaggagtttttttatttaattaaggttattggtttttaagataaagtgtttaggtttggtgtagtggtttatgtttgtaattttatattttgggaggttaaggtgagggggtatttgaggttaggagttcgagattagtttggttaatatggtgaaattttatttttatttaaaatataaaaattagtcgggcgtggtggtatacgtttgtaattttagttatttaggaggttaaggtaggagaagcgtttgaatttgggaggtagaggttgtagtgagttgagattgtattgttgtattttagtttgggtgataagagtaaaattttgttttaaaaaaaaaaaaaaaaaatttttaaatcgttcgttggatttaattattgtatgttgattttatttatgtatgttttagtttttagatttttgggatttttttggaatttatttaatttagagttttttattgttttttaattatttgtgtttgttggttttgtttttttttttgttttttttattggtgggaggtttttttgggagtaagtatagtattgttattattttgtggtatagtgtgtagaatttttgtatatttaggagtttagttttcgtttttgatagttattttatttatattataggtaagaaaattgaggtttagagaatttagtagtagatttagtattatttagtagttaagaggtaggattagaatgtggttattttttagttattatttttattattttttatttttagtaggtttagtttttttggatttggttgttgtttttgggttggtgatttttgttttggtaaagggagagtagatttatgatatttggagtttagagttaggattgaatatttaggataaagttttattttgaagtttagatttaggattgaggttattttgatggtggtcgtagggaatttttagaaagagtttggagtgaaatttggggtgaaagtttttttttttttttttgtattttttttataagatggggaggtttggttagatatagtggtttatatttataattttagcgttttggaaggttgaagtgaggattatttggggttaggagttttagattaaattgggtaatatagtaaggtttcgtttttattatgatagtttatagttttagttatttaggaggttgagataaaagaattatttgaatttaggaatttaaggttgtagtgagttatgattttgttatcgtattttagtttgggcgatagattaagatttttaaaaaaagagcggggaggtttaggataggaagggttaagtgtggtttagtttttttagtttggaaaggaagttaggttaagtagttgggtaggggaaaagggggtattgagtgttagggaggggttgaggtagtgggaatagtatgaattttttttttacgttttattggtttattttttttgtttttgtttttggtgtggagaagaataagattttttattgtttgggaagttgagggtgggtgttacgttttgggggagagaagttatattttgggtttttttattcgggtgtatttttagtgtttattatgttgtttaggtatttttattgagatgagaattttttttgttttttttttttaataattaaagtttttgttttaattttattttagttttttatttatttcgaggttaggttttagaatttagaattgagggtttgtttagttttgttttttttgtgtttgagggaagttttgatattttggagttgtataaggtagtaatataatttgatttttttggttgtttatcggaggataagttgtgggaggtagttgggtagggtatgtaggtagatgggatttaggttttaatgttgttattttttagagaggataaggtgggacgggtatggtggtttatatttgtaattttagaattttgggaagttgaggtaggtagattatttgaggtcgggagtttgagattagtttggttaatatggtgaaattttatttttattaaaaataaaaataaaaaaaaaattagttgggtttggtggtaggtgtttataattttagttatttaggaggttgaggtaggagaattttttgaattcgggaggtggagattgtaatgagttgagattatgttattgtattttagtttgggtgagagagtaagatttaattttaaaaaaataaataaataaataaaaaaaataaataaatagaggatgaggtggatggtgggattaggataggggttaggatgaggggaggggagtggaaggtttattaaaagggtttttggtgaggtttgaggatggaggttttagagtttgaggtagcgaattttggggatttgagtgatttcgttttgtgagagagtttggtttttttttagagttagttgtagaatggatttggttagagaggaaagtagagatgagtatggtgttggtttttgtagttagtaaggttgtggggtttttgttgtttttgttttttattatttttttgttttttattattttttttttggttgaaattaggatagagatttaatattggttgtttagtttttagttttgtttttttttttaggtttttttgggaattatagaaatttgggatttagtgttttggtaacgtaatgaatgtatgtatagttttggtatttgttttaaattatttattaaaataagtatagttttgggggaaaaaaataagttgattgggtgcggtaagtagtagaaagggattgaagggggaaggaatttaggtagtgtttgggtttaaaggaaggggataggagatggaaggggtagtgtttggtttttatttttggttttttttaggggatttttttaggggattgtggtttgttgtttgggtttaaaaacgaatgtttggttttgaagagagatagattggggtaaaagaaagaaaaaaagggattttttaaattttttgatttttggttttaaattgggggtataaaggaatttaggttttagaattttgttttttttagggaatttaggtattttttttttattttatttttggtatattgagatgtagttttgaatgggttgtttacgtgtggaggggggttggggtgatttattattattattgggaggatagggggagttagtggtggaagaagggtgagttatattgatgggtattagttttagttttttttttatttttttggtttttagttttgtttatttgatttttttttttgttttgcgtttattttttttttttttttttcgatttttttgtttatttattttttttttttggttttgttttttagtttagaaggtttgaggtaatgggggtaagtttggagtcgatagtgttgagtaggtaggagttaagagaggggaagtttgagttttacgtagttaggggtgcgttggagagggtggggttcgatttcgttatattttaacggtttttttttttttttattattttcgtttttatttttaatggatttgggattgtttttttaagagtagtggttttttttttttttagaggaggatttattagagtttttgtttcggcgtcggtgatttagtgttcgcgggagcgtcgtatttatattagttaatttagatttcgaggttcgatagcgttcggtttagatttttacgtttgttaggagtaagtcgagagttagtcggtcggcgtatttcgatttcgagtagtttttgtttttcgattcgagtttcgcgtttttttcgggatttttgtttcgcgggtagcgttgttaatttgtcggttatggagatttcgttttagcggcgcgttattcgtagcggggcgtaggttagttttatttcgttgtcgtttattcgtattattcggttgtaggagaaggaggatttgtaggagtttaatgatcgtttggcggtttatatcgatcgtgtgcgttcgttggaaacggagaacgtagggttgcgttttcgtattatcgagtttgaagaggtggttagtcgcgaggtgttcggtattaaggtcgtttacgaggtcgagttcggggatgttcgtaagatttttgatttagtagttaaggagcgcgttcgtttgtagttggagttgagtaaagtgcgtgaggagtttaaggagttgaaagcgcggtgagttcgtttaggtggttgcgtgtttggcggggagtggagagggcggcgggtcggcgtttttggtcggtcgtaggaagggagtgagagggtttggaggtcgataattttgttatagtttttttttttttcggaattgtttttagcgggtgattggtagtgttaaggggaattgttaagataggatagagagggaagtggtggtttttgggagagggtcggggaggatataaggaatggtgggggtattagggataagttggggttggggtcggtttgaattcggttagattgggatttgttaattatttggagtcggggggaggggtttgagtaaaatagaattagttttgttagttcgaagaattttgggtatttaggatatatcggagtggtagaaagggttttgttagaattttgttagcgggtttggtattgtgttagttttgtttaagttggttttgaatatatgatgtttattaagatataatttttaagttggtatttgtttagcgtgttggagcgaggttaggaaggtagggtaatttttttttttttttttaagggtttggcggtggtttttttttagtatgattttgttttgggttttaagggttgggaagtttttttttattttgttattttgcgtgtttgggattttttttgggttttgataggtttattaaaagagtttcgggagatgagagatcggttttttcgtagtttttatagtttttggtttgtttggtttaggaatgtaagggagggagggaggtagagggtagaggtttttagtttaggaagttgtgttatgtttaggtttggtcgtattttttttttggttttttgtttagtgttttcgagggttgggggtattgtttttttttttttggggtgagttatttttatttttttagcggggttaggtagtttttgttcgggtttatttttttagttgttgacgttttgatttttgttttattgaagtgttggaatatag

SEQ ID NO: 420 - DNA, 6568 bp, Artificial Sequence
  chemically treated genomic DNA (Homo sapiens)
ttgtattttagtattttaataagataaagattaaaacgttagtagttaagaggatgggttcgagtaaagattgtttggtttcgttgggaaaatgaaagtggtttattttaaggagggaaggatagtgtttttaattttcgaagatattaggtagagggttaagggaggagtgcggttagatttgggtataatataattttttgagttgggagtttttgttttttgttttttttttttttttgtatttttgggttaagtaggttaagggttgtgggagttgcgggggagtcgattttttatttttcggagtttttttggtgggtttgttagagtttaaggaaggttttagatacgtagagtggtagagtgagggagaattttttaatttttagaatttaggataaggttatgttgagggggggttatcgttaagtttttgggagggaaaagggggattgttttgtttttttgatttcgttttaatacgttggatagatgttaatttgagagttatgttttagtgggtattatgtgtttagagttagtttgggtaaagttagtatagtgttaagttcgttaataaagttttaataggattttttttgttatttcgatgtgttttgggtgtttagagtttttcgagttggtagggttagttttgttttgtttaagttttttttttcggttttaaatagttggtaaattttaatttgatcgaatttaggtcggttttagttttaatttgtttttgatatttttattattttttatatttttttcgatttttttttagagattattatttttttttttgttttgttttgataattttttttgatattgttagttattcgttgggggtagtttcggggagggaggagattatggtaaagttatcggtttttaggtttttttattttttttttgcggtcggttaggggcgtcggttcgtcgttttttttatttttcgttaggtacgtagttatttgggcgaatttatcgcgtttttagttttttaaattttttacgtattttgtttagttttagttgtaggcgggcgcgttttttggttattgagttaagggttttgcgggtattttcgagttcggtttcgtaggcggttttgatgtcggatatttcgcggttgattatttttttagattcggtgatgcgaaggcgtagttttgcgtttttcgtttttagcgagcgtatacggtcgatgtagatcgttaagcgattattgagtttttgtaggtttttttttttttgtagtcgggtgatgcgggtgggcgatagcggagtggagttggtttgcgtttcgttgcgggtggcgcgtcgttgggacggggtttttatggtcggtaggttggtagcgttgttcgcggggtaggggtttcggaaagggcgcggggttcgggtcgaaggatagagattgttcggagtcggagtgcgtcggtcggttggttttcggtttgtttttggtaggcgtggggatttgggtcgggcgttgtcggatttcgggatttgggttggttggtgtaggtgcggcgttttcgcgaatattgagttatcgacgtcggggtaaaggttttaataggtttttttttgaagggaggaggggttattatttttaaaggggtagttttagatttattgggggtgggggcgggagtggtgaggagggggaaggatcgttggggtgtggcggagtcgggttttattttttttagcgtatttttaattgcgtgaggtttaagtttttttttttttggtttttgtttgtttagtattgtcggttttaagtttgtttttattgttttagattttttgggttagagggtagagttaaggagggagagtgggtgggtaaaagggtcggggagaaagagagggaagtgggcgtaaagtaagggagagggttaggtaggtagggttgggagttaggaaagtggggggagggttgaggttggtgtttattagtgtgatttattttttttttattattggttttttttgtttttttagtagtaatagtgagttattttaatttttttttatacgtgggtagtttatttagagttgtattttagtgtgttaggagtggggtggagaaggaatgtttgggttttttggggggagtaaagttttggaatttgagtttttttatgtttttagtttggggttagggattaaggagtttggggggttttttttttttttttttttgttttaatttatttttttttaaagttaagtattcgtttttagatttaagtaataagttatagttttttaaagaagttttttaaagaaagttaagaataggagttaggtattgttttttttattttttgttttttttttttggatttaagtattgtttgggttttttttttttttagtttttttttattgtttatcgtatttagttaatttattttttttttttagaattgtatttattttaatggataatttaaaatagatattagagttgtgtatgtatttattacgttgttaagatattaggttttagatttttgtggtttttagaggggtttgaaagggggagtagggttgggggttggatagttaatgttgggtttttattttggttttagttagaaagaaggtagtggggggtaagaaggtagtgggggataggaatagtaaagattttatagttttgttggttgtaaaggttagtattatatttatttttatttttttttttggttaggtttattttgtagttggttttggggaggggttaggtttttttataaaacgagattatttaggtttttagggttcgttattttaggttttggagtttttatttttaggttttattaaggatttttttgataagttttttatttttttttttttattttggtttttattttggttttattatttattttattttttgtttgtttgttttttttgtttgtttgtttgtttttttgagattaagttttgtttttttatttaggttggagtgtagtggtatgattttagtttattgtaatttttatttttcgggtttaagagatttttttgttttagttttttgagtagttgggattataggtatttgttattaagtttagttaattttttttttatttttatttttagtagagatggggttttattatgttggttaaattggttttaaattttcgattttaggtaatttgtttgttttagttttttaaagttttgggattatagatgtgagttattatgttcgttttattttattttttttaagaggtgatagtattgaggtttgggttttatttgtttgtatgttttgtttaattgttttttatagtttatttttcgatgagtaattagggaaattaaattatgttgttattttgtatagttttaagatattagggttttttttaaatataaggaaagtagggttggataggtttttagttttgggttttgaagtttggtttcggggtggatgagggattggagtgggattaaggtaggaattttggttattaggggaggggaataaggaaagtttttattttagtgagggtgtttgggtagtatggtgagtattagggatgtattcggatgagggggtttagaatatggttttttttttttagggcgtggtatttatttttagttttttagataataaaaagttttgtttttttttatattagaagtagaggtaggaggggtaagttagtgaaacgtgagggaagggtttatgttgtttttattgttttagtttttttttggtatttagtgttttttttttttttatttagttgtttggtttggttttttttttaggttgggaaagttaaattatatttaattttttttgttttagattttttcgttttttttttgagaattttggtttgtcgtttaggttggagtgcggtggtaggattatagtttattgtaattttgaatttttgggtttaagtgatttttttattttagttttttgagtagttgagattataggttattatgatagagacggagttttgttatgttgtttaatttggtttaaaatttttggttttaaatgatttttattttagttttttaaagcgttgggattataggtgtgagttattgtgtttggttagatttttttattttgtggaaaaggtgtaggagaaagaaggagggtttttattttaaattttattttaagttttttttaaaggttttttgcgattattattaaaatggttttaattttaaatttgaattttaaagtgaaattttattttgaatatttaattttaattttggattttagatgttataagtttgttttttttttgttagggtaaaaattattaatttagaagtagtagttaggtttagaggagttgagtttgttggaggtgagaggtgatgggagtggtggttagagggtgattatattttaattttattttttaattgttgagtgatgttagatttgttattgaattttttggattttagtttttttatttgtagtatgggtagagtggttattaaagacggggattgagtttttgggtgtgtaagagttttgtatattatgttatagggtgatagtaatattatgtttgtttttaagggagttttttattagtgggaaagatagagggagaagtaaaattaataagtataaatgattaaagagtagtagaggattttgaattggatgaattttaaagggattttagaagtttgggagttggagtatgtatgagtgaaattagtatgtagtggttgggtttaacggacggtttgagaattttttttttttttttttgagatagagttttgtttttgttatttaggttgaagtgtaatagtataattttagtttattgtaatttttgttttttaggtttaagcgttttttttgttttagttttttgagtagttgggattataggcgtgtgttattacgttcggttaatttttgtattttgagtagagatgaggttttattatgttggttaggttggtttcgaatttttgattttaagtgtttttttattttagttttttaaagtgtgagattataggtatgagttattgtattaggtttaggtattttattttgaagattaatgattttgattgggtgggggggtttttttgtgtttttatagtattttagtgttttttttgtgatttttatttttgaaagtgttgtgagggatagaaaggattaagttttggttatttgtttttttaatatttggtatatagtaggtattcggtgtttttaattttttttgagttggagtttcgttttgttgtttaggttggagtgtagtggtataatttcggtttattgtaatttttgttttttatgtttaagcgatttgtttgttttagttttaagggttgttgggattataggtatttattattatattcggttaatttttatatttttagtagatatagggtttttttatgttggttaggttggtttcgaatttttgattttagatgatttgtttgttttggttttttaaagtgttgggattataggtatgagttatcgtatttagtttttttatttttttaagagatgggggttttattatgttgttaagttggttttgaatttttggagttaagtgatttttttattttagttttttaaagtgttgggattacgggtgttagttattatgtttagtttttttagggttttttggataaataaatgtatttggttttgttattttttaggttagtgattttggataagtttttttagcgttagttttattatttgtaaaatggggatgtgtaataattaaataaggttatatatatttgaaggagggttttttggagaaggaagatttaggggttttatagaattgttttatatatagagaatttatttatttaataaatatttattgaatatttattatatattaggaattattttagatattagggatgtagaagtgaataaaatagataaaaatttttatttttatggagttgatattttagtggagggagatagttaataaattaaagataaagttatagtttgttagaatacggtaggagttatggaaataaaaatataaagtagaggttgagtatggtggtttatatttataattttaatatttggggagttcgagataggtagattgtagattgtttgagtttaggagtttaagattaatttggttaatatagtgaaattttattttttaaaaaaaaaattagttgggggtggtggtatatgtttttagttttagttatttaggaggttaagatgggaggattatttgagtttgggaggttaaggttgtagtgagttgtgattgtattattgtattttagtttgagtaagagagaaattttgttttaaaaaaaaaattatatatatatgtgtgtgtgtatatatatatatatatgtatatatatatatatatatatatatatatgtatatatttagtagaataatgtttatatagtgaataatttatattttaataatttttatagttgttgtatgtttttatatat

SEQ ID NO: 421 - DNA, 7238 bp, Artificial Sequence
  chemically treated genomic DNA (Homo sapiens)
tttgttttagttttttgagtggttgggattagaggcgttcgttattatgtttagttaatttttttttgtatttttagtagagatggggttttatcgtgttagttaggatggtttcgattttttgattttgtgatttgtttatttcggttttttaaagtgttgggattatagacgtgagtcgtcgcgtttggtttttaatatttttaaagagaagaatttttaatttagaattttatatttagttaaattaagttttatgagtgaaggagaaataaaattttttatagataagtaaatgttgagagattttgttataattaggtttgttttataagagtttttaaaggaagtattaaatatggaaagaataaattggtattagttattataaaaatatattaaattgtaaagattattgatattatgaagaaattgtattaattaatgggaaaaataattagttagtattataatgatagaattaaatttacgtataataatattaattttaaatgtaaataggttaaatgttttaattaaaagatattgattggtaaattggatagagagttaagatttatcggtgtgttgtatttaggagatttattttacgtttaaagatatatataggtttaaaataaagggatggaggaatatttattaagtaaatggaaagttaaaaaaaaaaaaaaaaaaaaaaaagtaggggatgtaattttagtttttgataaaatagattttaagttaataaagattaaaaagataaaaaagggtattatataatggtaaagggattaatgtaatacgaagagttaattattttaaatatatatgtatttaaaataggagtatttagatttataaagtaagtttttagagatttataaagagatttagatttttatataataatgggagattttaatattttattgttaatagtagatagattagtaagatagaaaattaataaggatatttaggatttgaatttatttttggattaagtggatttagtagatatttatagaattttttattttaaattaatagaatatatattttttttagtattttgatattataatattatatttattttaaaattgattatataattggaagtaaaatagtttttagtaaatgtaaaagaatggaaattataataaatagttttttagattatagtgtaattaagttagagtttaagattaagaaatttgtttaaaattatataattatatggaaattgaataatttgttttagaatgattattgggtaaataatgaagtgaaggtagaaataaataagttttttgaaattaatgagaataaagatataatgtattagaatttttggaatatagttaaagtagtgtttatagggaaatttatagtattaaatgattataggagaaagtaggaaagatttaaaatcgatagtttaatattataattaaaagaattagagaagtaaaagtaaataaatttaaaagttagtagaagataagaaataattaagattagagtagaattgaaggagagagagagatgaaaaattttttaaaaaattaatgaatttaggagttggttttttgaaaagattaataaaatagatagattattagttagattgataaataagaaaggagatacgaattaaatagatataataaaaaatgataaagaggatattattattgattttatagaaatataaattacgattagagaatattataaatatttttatataaataagttagaaaatttagaagaaatggataaatttttggatatatacgtttttttaagattaaattaggaagaagtcgaatttttgaatagattatttataagttttgaaattgaggtagtaattaatggttttttaattataaaaagtttaggattaggtagatttatagttgaattttattataggtataaagaggagttggtattattttttgtgaaattattttaaataatagaaaaaagagggaattttttttaatttattttatgaggttagtattattttgatattaaaatttggtaaagatataataaaaaaagaaaattttaggttaatatttttgatgaatatcgatgtaaaaatttttaataaaatgttggtaaattaaattaagtagtatattaaaaagtttatttattattattaagtcggttttatttttgggatgtaaggttggtttaatatatataaattaataaatgtaatttagtatataaatagaattaatgataaaaattatattatttttttaatagatgtagaaaaggttttcgataaaatttaatatttttttatgttaaaaatttaataaattaggtattgatggaatatattttaaaataataagagttattggtgataaatttatagttaatattatattgaatgggtagaatttggaagtattttttttgaaaatcggtataagataaggatgtttttttttattatttttgtttaatatagtattggaagttttggttagggtaattaggtaaagagaaagaaataaagcgtattcgaataggaagagaggaagttaaattgtttttgtttgtagatgatatgattgtatatttagaaaattttatcgttttagtttaaaatttttttaagttgataagtaattttagtaaagttttagaatataaaattaatgtgtaaaaattaaaagtatttttatataatagtaatagatagagagttaaataatgagtgaatttttatttataaatgttataaagagaataaaatatttaagaatataatttataagggatgtgaagaatttttttaaggagaattataaattattgtttaaggaaataagagaagatataaataaatagaaaaatattttacgtttatggataggaaaaatgaatatcgtgaaaatggttatattgtttaaagtgatttatagatttaatgttatttttattaagttattattgattttatttatagatttagaaaaaattattttaaattttatatggaattaaaaagagtttatatagttaagataattttaagtaaaaagaaaaaagttggaggtattacgttatttgattttaaattatattataagtttatagtaacgaaaatagtatggtattgttattaaaatagatatataaataaatggaatagaatagaggttttagaaataatattataggtttataattatttgatttttgataaatttgataaaaataagtaatggggaaaggattttttatttaataaatggtgttgggaaaattggttagttatatgtaaagaattgaaattggatttattttttatattttatataaaaataaatttaaggtggattaaagatttaaatataagatttaaaatcgtaaaattttagaagaaagttaggtaatattatttaggatataggtattggtaaagattttatgattaaaatattaaaagtaatggtaataaaagttaaaattgataaatgggatttaattaaattaaagagtttttgtatagtaaaataaattattattagagtgaatagataatttatagaatgggagaaatttttgtaatttatttatttgataaagggttaatatttagaatttataaagaatttaaataaatttataagaagaaaataattttattaaaaagtgggtgaaggatatgaatagatattttttaaaagaagatatttatgtagttaataaatatatgaaaaaaaagtttattattattgggtattagagaaatgtaaataaaaattataatgagatgagatattatttaattttagttagaatgatgattattaaaaagttaggataaaatagatgtttgagaggatgtggagaaataggaatgtttttatattgttggtgggagtgtaaattagtttaattattgtggaagatagtgtggtgattttttaaggatttagaattagaaatattatttgatttagaaattttattattgggtatatatttaaaggattattaattattttattataaagatatatgtatatatatgtttattgtagtattgtttataatagtaaagatttggagttaatttaaatgtttattaatgatagattggataaagaaaatgtagtatatatatagtatggaatattatgtagttataaaatggatgagtttatgttttttgtagggatatggatgaagttggaagttattatttttagtaaattaatataagaatagaaaataaaatattgtatgtttttatttataagtgggagttgaataatgataatatatggatatagggaggggaatattatatatttgggtttgttgggggattgggggttaggggagggataatattagaagaaatatttaatgtaaatgatagattgatgggtgtagtaaattattatggtatgtatatatttatgtaataaatttgtacgttttgtatatgtattttagaatttaaagtataataaataaaattttttaaaaaagttttattgaagttaagttgttattaaagaaattataaattatatatgaggaagggttaggagatatattaaatagatgaattgatatttttaaagaataaagaagaatttgaaagatattataggtttttttaaatgaagaaataaaattataatgaaataattaaatattttgagaatatttgaaggttagttatttatttaagagtaagtgttttagagtaagtgggatttagttataagataaaggtgaggggatattttggtgatataattattaagtggtgtagatggttttttaagtttttgtttttatttgttggattgtaggtattgatgtagatttgaagagtttattggatattttagggtagtagtaaaagtgggtttagagaaaggtagagaatgttaggttttattatatttttttttcgtagtattataggacgtcgggattgggtatttttttttaatatggtcgttattgttttttcgtagttattcgttattgaggatgtcgattttgagaatagtagtttttattattatgattatttggatgaagtggtttttatgttttgtaggaaggatgtagtggtgttttttggtaaagttttttttttagttttttatagtttgatttttgtgttgggttttagcgggaatttttttttttttatggttttgtttcgttacgtgtttcgtaggcggatggttgagatttatttgttgaatttggttatttttaattttttgtttttggtgatattgtttttttggggtattttcgtggtttggtattgggttttcgggagttttttgtgtaagatggtgagtattttttatattattaatttttatagtggtattttttttattagttgtatgagtttggataagtatttggagatcgtttatgtttagttttattataggttgaggattcgggttaagagtttgttttttgttattatagtatgggttgtgtttttggtcgtttttatttttgatatggtttttgtatagatatatgaaaattttaagggtgtgtggaattgttacgtagatttcggcgggtatgggattatttggaagtttttttttcgtttttagtagaattttttagggtttttttttttattttttgttatgatttttttttattttcgtattggttgtgttttggtgaggttgaggttcgtaggttagggtcgggttttaaaaatagttgtagttttggtggtggtttttttcgtgttatggtttttatataattttattttgtttttgtatacgttgttggatttgtaagtattcgggaattgtgaggttagttagtatttagattacgtattttaggtaatagagagtatcgtttttttttattgttgttttttttttattttgtatgttttttttagttatcgttttcgttagtatttgaaggtttttttggttgtcgtgtttggatggtatttggtatttggtattgtttaggttttattatttagttgttttgagagtagtatatttattgtttaagaggaaatgattggtatgaatgattttggagagaggtagtttgagaattattttaataaggaggatgtggggaataaattagtttgagtgattaaattttggtttggtgggaatagatgggaattagtttaattgggtgtttatttaaagtgttttttttaggggttttagtgattgtgttgttaaatttagtggttagtttttagtttttagttattagtagtatttgttcgtttcgttttttttttttattttttttatttgtttttaggatattacgtttttttttttgaattgttataattttttttttttttttttttgtttttttttttttttttttttttttttttttttttttttttttcgttttttttttttttttttttttttttttttattttttttttttttttttgatagggttttgttttattgttttgttatttaggttggaatgtagtggcgagattttcgtttattgtagttttttttttttgggttgaagtaatttttatgttttagttttttaagtagttaggattataggtatttgttattatgtttggttaatttttgtattttttttttttttttttttttttttttttttttttttttttgagacggagttttatttttgttgtttaggttggataataatggcgcgatttcggtttattgtaatttttatttttcggatttaagcgatttttttgttttagttttttgagtagttggaattatatgcgcgtgttattacgtatagttaatttttataattttagtagagatggggttttattgcgttggttaggatgatttcgattttttgattttgggatttattcgttttggttttttaaagtgttgggattataggtgtgagttattatgtttggttttaatttttgtgtttttattagagatagagttttattatgttggttaggttggagaattgttgtaatagttttttaattggtttttgtttttttttttttttgttttttttttattttatttgtatttagtagttagagtgattttgatattttcggtttttattttcgttttttttagagtagtagtttgttaaaatattagattataataaatttagtttaaaggttttaattagcgttattggtaatt

SEQ ID NO: 422 - DNA, 7238 bp, Artificial Sequence
  chemically treated genomic DNA (Homo sapiens)
aattgttaataacgttaattgagatttttaaattaaatttgttgtaatttggtgttttgataggttgttgttttgagggaggcggaagtaaaggtcgagagtattaggattattttggttgttaggtgtagatgagatgggaggagagtaagagagaggaaggataggggttagttggaaaattattatagtaattttttagtttggttaatatggtgaaattttgtttttaataaaaatataaaaattagggttaggtatggtggtttatatttgtaattttagtattttgggaggttaaggcgggtggattttaaggttaagagatcgagattattttggttaacgtagtgaaattttatttttattaaaattataaaaattagttgtgcgtggtggtacgcgtatgtagttttagttatttaggaggttgaggtaggagaatcgtttgaattcgggaggtggaggttgtagtgagtcgagatcgcgttattgttgtttagtttgggtaataagagtgagatttcgttttaaaaaaaaaaaaaaaagaaaagaaagaaagaaagaaaaaaaatataaaaattagttaggtatggtggtaggtgtttatagttttggttatttgggaggttgaggtatgagaattgttttaatttagggggaggaggttatagtgagcggagatttcgttattgtattttagtttgggtgatagagtaatagagtaagattttgttagaaggaaggaaggaaagtaggaagggaggaaaggaggaagggaagaagcgagggagggagggagggagagagggaaggaaggaaggaaggaagtaaggaaggaaggaagaaagattgtagtaatttagaaaagaaagcgtggtattttggaagtaagtgaagaaagtggaggaagaaggcggggcgagtaaatgttgttgatggttgagaattgagaattgattattgggtttagtaatatagttattgaggtttttggagagagtattttgagtggatatttaattgagttggtttttatttgtttttattagattaaaatttggttatttaggttgatttattttttatattttttttgttagggtagtttttagattgtttttttttaaggttatttatgttagttatttttttttgggtagtaagtatgttgtttttagaatagttggataatgaggtttgggtagtgttaggtgttaggtgttatttaagtacggtagttaggaaagtttttaggtattggcggaagcggtgattggagaaggtatataggatgggggaaaagtagtagtgaaggaaggcgatgttttttgttatttggagtgcgtagtttagatgttggttgattttatagttttcgaatatttgtaggtttaatagcgtatgtagaaataaggtgagattgtatgggaattatagtacgaagaaggttattattaaggttgtagttatttttaaagttcggttttggtttgcgggttttagttttattaagatataattaatacgggagtagaagaagattatggtaaggagtggaaggagaaattttaggaggttttgttggaagcggaggaagagtttttaaatggttttatgttcgtcgaaatttgcgtggtagttttatatatttttgggatttttatgtgtttgtataaagattatattagggatggagacggttagggatatagtttatattatggtagtaaggagtaggtttttggttcgggtttttagtttgtggtagggttgagtatgaacgatttttaggtatttgtttaggtttatgtagttaatgaaaaagatgttattgtaaaagttaatagtataaagagtgtttattattttgtataagaaattttcgaagatttaatgttaggttacggagatgttttagaagggtagtgttattagaaatagaaggttggagatggttagatttagtagatagattttaattattcgtttgcgaggtacgtaacggagtaagattatgagaagaaggaggttttcgttgaggtttaatataaaaattaggttatagaagattgggaggaagattttgttaaaggatattattgtattttttttgtagagtatgaaggttattttatttaggtagttatagtaatagaagttgttatttttagaatcggtatttttagtggcgagtggttgcggagaggtagtggcggttatgttggaaggaaatgtttagtttcgacgttttgtagtgttgcggggggaaaatatggtgagatttagtattttttatttttttttaaatttatttttgttgttgttttgggatgtttaatagattttttaaatttatattagtatttgtagtttagtaagtaagagtaaaagtttagggagttatttgtattatttaatagttatgttattaagatatttttttatttttgttttataattgaattttatttattttgggatatttatttttggataagtgattaatttttaggtgtttttagagtatttaattattttattatggttttgtttttttatttaaaaagatttatagtgttttttaaatttttttttattttttagggatattaatttatttatttaatgtgttttttgatttttttttatgtatggtttataatttttttaatgatagtttagttttagtggggtttttttaaaaaattttgtttattatattttaagttttgggatatatgtataaaacgtgtaggtttgttatataggtatatatatattatggtggtttgttgtatttattaatttgttatttatattaggtattttttttaatgttattttttttttagtttttaattttttaataggtttagatgtgtgatgtttttttttttgtgtttatgtgttattattgtttaatttttatttatgagtgagaatatgtagtgttttgttttttgtttttatgttagtttgttgagaatgatggtttttagttttatttatgtttttgtaaaggatatgaatttatttattttatggttgtatagtattttatgttgtgtatgtgttatattttttttatttagtttattattgatgggtatttgggttggttttaagtttttgttattgtgaatagtgttgtaataagtatatgtgtgtatgtgtttttatagtagaatgattaataattttttgggtatatatttagtaatgggatttttgggttaaatggtatttttggttttagatttttgaggaattattatattgttttttataatggttgaattaatttatatttttattaatagtgtaaaagtatttttatttttttatatttttttaagtatttgttttattttgattttttaatgattattattttaattggggttagatggtattttattttattgtggtttttatttgtatttttttaatgtttagtgatgatgagttttttttttatatgtttgttgattgtataaatgtttttttttgagaagtatttgtttatattttttatttattttttgatggggttgttttttttttgtaaatttgtttaagttttttgtagattttggatattagttttttgttagatggatagattgtaaaaattttttttattttataggttgtttgtttattttgatgatagtttattttgttgtgtagaagttttttagtttaattagattttatttgttaattttggtttttgttgttattgtttttggtgttttagttatgaagtttttgttaatgtttatgttttgaatggtattgtttagtttttttttagggttttacgattttaggttttatgtttaggtttttaatttattttgagtttatttttgtataaggtgtaaggaatgggtttagttttagttttttgtatatggttagttagtttttttaatattatttattagatagagaattttttttttattgtttgtttttgttaggtttgttaaagattagatggttgtagatttgtgatgttatttttgaggtttttgttttgttttatttgtttatatatttgttttggtagtagtattatgttgttttcgttattgtagatttgtagtatagtttgaagttaggtagcgtgatgtttttagtttttttttttttgtttaggattgttttggttatatgggttttttttggttttatataaaatttaaagtagttttttttaagtttgtgaataaagttagtggtagtttgatggggatagtattgaatttataaattattttgggtagtatggttatttttacgatatttattttttttatttatgagcgtggaatgtttttttatttgtttgtgtttttttttatttttttgagtagtggtttgtagttttttttgaagaggttttttatattttttgtaagttgtatttttaggtattttattttttttgtagtatttgtgaatgggagtttatttattatttagttttttgtttgttattgttgtataggaatgtttttgatttttgtatattgattttgtattttgagattttgttgaagttgtttattagtttaaggagattttgggttgaggcgatggggttttttaaatatataattatgttatttgtaaatagagataatttgattttttttttttttattcgaatacgttttatttttttttttttgtttgattgttttggttagaatttttaatattatgttgaataggagtggtgagagagggtatttttgttttgtgtcggtttttaaagggaatgtttttagattttgtttatttagtatgatattggttgtgggtttgttattaatagtttttattattttgagatatgttttattagtatttagtttattgagtttttagtatgaaggggtgttgaattttatcgaaggttttttttgtatttattgagaaaataatgtggtttttgttattggttttgtttatgtgttggattatatttattgatttgtgtatgttgaattaattttgtattttagggatgaggtcgatttgatggtggtagataagttttttgatgtgttgtttgatttggtttgttagtattttattgaggatttttgtatcgatgtttattagggatattggtttgaaattttttttttttgttgtgtttttgttaggttttggtattaggatgatgttggttttataaaatgagttaaagaggatttttttttttttttattgtttagaatagttttataaggaatggtattagtttttttttgtatttgtgatagaatttagttgtgaatttgtttggttttgggttttttatggttgggaggttattaattattgttttaattttagaatttgtgaatgatttatttagggattcgatttttttttggtttagttttgggagggcgtatgtgtttaggaatttatttattttttttagattttttagtttatttgtgtagaggtgtttatagtattttttgatcgtagtttgtatttttgtgggattaatggtgatattttttttattattttttattgtgtttatttgattcgtgtttttttttttgtttattagtttggttagtggtttatttattttgttgatttttttaaaaaattagtttttggatttattgattttttgaagggttttttattttttttttttttttagttttgttttgattttagttattttttgttttttgttagtttttgaatttgtttgtttttgtttttttagtttttttaattgtgatgttaggttgtcgattttaaattttttttgtttttttttgtggttatttagtgttataaatttttttgtaaatattgttttagttgtgttttagagattttagtatattgtgtttttgtttttattggttttaaagagtttatttatttttgtttttattttattatttatttagtagttattttggagtaggttatttagtttttatgtagttgtatagttttgagtaagttttttaattttgaattttaatttgattgtattgtggtttgagagattgtttgttatgatttttatttttttgtatttgttgaggattgttttatttttaattatgtggttagttttagaataagtgtgatgttgtggtattaggatgttgagaagaatgtatattttgttgatttagggtggagagttttgtagatgtttattaggtttatttggtttagaggtgagtttaagttttgaatatttttgttaattttttgttttgttgatttgtttattattgatagtggggtgttaaagttttttattattgtgtgggagtttaagtttttttgtaggtttttgagaatttgttttatgaatttgggtgtttttgttttgggtgtatatatatttaggatagttagtttttcgtgttgtattgatttttttattattatgtaatgtttttttttgtttttttgatttttgttggtttaaagtttgttttattagagattaggattgtattttttgtttttttttttttttttttttttttggttttttatttgtttgataaatatttttttatttttttattttgagtttatgtgtgtttttggacgtgagatgagttttttgaatatagtatatcgatgggttttgattttttatttaatttgttagttagtgttttttaattggggtatttaatttgtttatatttaaggttaatattgttatgcgtgaatttgattttgttattatgatgttagttggttattttttttattagttgatgtagtttttttatagtgttaatggtttttataatttggtatgtttttgtggtggttggtattagtttgttttttttatgtttagtgttttttttaggagtttttgtaaggtaggtttggttgtgataaaattttttagtatttgtttgtttgtaaaggattttattttttttttatttatgaagtttagtttggttggatatgaaattttgggttgaaaatttttttttttaagaatgttgaaggttaggcgcggcggtttacgtttgtgattttagtattttgggaggtcgaggtgagtagattataaggttaggagatcgagattattttggttaatacggtgaaattttatttttattaaaaatataaaaaaaaattagttgggtatggtggcgggcgtttttagttttagttatttaggaggttgaggtagg

SEQ ID NO: 423 - DNA, 5922 bp, Artificial Sequence
  chemically treated genomic DNA (Homo sapiens)
ttataatttttgttttttgggtttaagtgatttttttattttagttttttgggtagtcgggattataggcgagtgttattatatttggttaatttttgaagttttagtagagacgggattttattattttggttaggttggttttaaatttttgattttaggtgatttatttgtttcggttttttaaagtgttgtgattataggtgtgagttattgtttttagatatatgttatgatttttgttatttttgggtatgtagttattgattgattttttttttgattatgggttatatttttttgtttttttatgtgtttagtaatttttgattgaatgttagatattattagtttatattgtgaagtgtttggattttattgtttttttaaaagaggggaaggaatttgaattatttgtaaattagtttgattttttatgagttttttttaagatttatatggtagattgaaagtattatagtttttttttttttgtagggaatatgttttaagatttttagggggtgtttgaaattatggatagtattaaattttatatatattatgtatttttgtttatgataaaatttaatttataaattaggtatggaaagagattaatatttgataataaaattgaataattataataatatattttaagaaaagttatgtgaatgtggttttttttttttttttttaaaatattttatattatatttattttttttgtgatgatatgagatgatataatgtttatgtgatgagacgaaggaggtgaatgatttggtattgtgaaatagtattaggttattattgattttttgataatatgttaaatttatgaattgtttatttttggaattttgtattaaatattttaagattatgtttaattataagtaaataaagttgttgaaagtaaaattataaataagggggtattgtattttttaatttagagttaggttagttttgttattgaagtgtggttttttatgtaagtatttaaattttttatttatttatttatttttgagatagagtttcgttttgttgtttaattggagtgtagtagtgtgatttttgtttattgtaatttttatttttgaggtttaagcgatttttttgttttagttttttgagtagttgggattgtaggtatgtgttattttgtttagttaatttttttgtatttttagtagagacgggtttttattatgttggttaggttggtttcgaatttttgattttaaatgatttgtttattttagtttattaaagtgttgggattaaaggtatgagttattgtgttaagtttatgtaagtattattaatgtttgaggtttttattgaatttttttagtttataggtagtaatttgaatatttttaaggtttgtgtgagttttgggattatttaattgttaatattttggaagttattttttgtttagtttgtggaatttttatttatgtatgtttagattagtattttataaagattggaaaagatttttttgtagatttttggttttttttttatattgtttttttttttttagtattttgttttgaaaattttggttattttaatttttaaggttatatttttgattttttagttaaataagattgttgggttgtgtttggtttattttttttatgttatagattaaaaatggtttttggatagggtttaatttattttttttttatttttttaatgttatatttttgttgttgttttgtgtattttgtttagtttgaagttaagttatttttttatgagtaaaaatttagattatagtatatagatgtttttttatttatgatggtttattttatgatttttttattttatggtgggtgtattggggtattaaatgtttttttaatttatgattattttaatttatgataggtttattgggatataattatattttaagttaagaagtatttattgttgatttgtgggagtttattgtaatgtttgaatataatatttaaaatttatgatttatttgtgaagttgttttattttataaattgtgttgagataatgtaaagtttgtataagtaggaattgataaaaattattgtaatttataatgatttaaagcgttgtgaaatagtattattattaaataatgtaaaattttgattattataatatatttagtatttttttgagaaggtagaaaagtaaattatatataatatataataatttatatttatgtatatttttattttattattaatatgagtatttttgatttattaatagatttaattagatatgtataataataattaaatttagttgtttttgatattttgttaggttttaattatattaaaattattgttttatagatttttaatattttggttatgaaggtttgttttttaaggtgaggataaaaatttattttaatagtttattagtttgattttaaatatttagtaatgtagtatatagatatttatttgtttttttgttttagttttgttaatgttaggggtaggtttgtggaagaagtggtagtagtaataaaagttaggaggtttatattatatagataatttgttatgtttgagaaagttaaattgaaagttagttttggggaagggtaataagtaataatatttttattatggattttgtaaaagtttttaggtatatttaaggtataatattatataggttagcgtgattttatatttatttaagtttttgtttttttttagatagaattttattttgttgtttaggttggagttaagtggtataattttggtttattgtaatttttattttttgggtttaagtgatttttttgttttagttttttgagtagttgggggattatagatgtgtgttaagtttagttaattttttaaattttcgtagggatgtaggttttattatgttggttaggttgattttaaatttttgattttaggtgatttatttatttcggttttttaaagtgttaggattataggtatgagtttttgtgtttagtttttaaaagattgaagtatgatataaaaggatggatataataatattttagtataaagttaaattgtggtataagaggttatatgtgttaatatatttttttagatttagtgatttaatttttaagtaaatattaattatagaggtatataatgaagagtaagaatatttattttgaggttgggtttagtggtttacgtttgtaattttagtattttgggaggtttaggtgggcggattatttgaggttaggagtttgagattagtttggttaatatggcgaaattttatttttattaaaaatataaaaatttttgggtttggtagtatatatttgtaattttagttatttgggaggttgaggtaggagaattgtttgaatttgggagatggaggttgtagtgagtcgcgatggtattacggtattttagtttgggcgaaagagcgagattttattttaaaaaaaagaatgtttattttgaaatgttttagattagaggaaaaaatatttaataataggaaaatgaattaatgaattatggtataatgaaatataatagaagattatgtaattttaaaaagaatatattagatagatatttagcgatataaatattattataatataatattatataaaattagaataattttaatttaagaatataatggtaggtataaggaaaatgttaatattggttatgttaaaatagtaagattatgtttttatttttttttttttttttttgtaatatttttttatgaagtatgttttatattagaaatatgaatttaatttttataattttggaatttagaagttaatttttttaaggtatatagtatttttttaattttttttgttaggcgttttgaggtgtttttttttttgagagttttttacgttattggagttgaaattatttaattgaggtaataagtgttattcggttgtttattgtttagtaagaaaaatattgtaaatattggagaatgtatgatgtatttttggagttaatagatggaaataaaggtagttttgttaaatggaaatagtatttattttatgttattttgatttttagttataagtaaaagttttgtgagtatgtagtttgttatatattgtataaaagagtttttagggaaatttatttttaggttattagagtaatattgagatattaattgaaatattgtgatgatttttatatatttaaagtatgaattttttttttaggtaagtttagttttattttattttattttttgattaggtatttgttaaatatgtaatttttttataaaatagataattaaaagattaatgattaatgaagtgtattttattaatattttaaataatttttaatattatggtattgtatttgaaaatgtaattatattttgtaaaaaatttagacgttatttttaagatgataattttgggtgaagttggaggtataattttaataaaatttattaggtaatagtatatgtggtttatttttaaatttgttgagagatgtagttttgagaattttttttttatttttaatttttatttatattaataggtttagatttaagtaaaggataatgatgttgttgttatttttatttatgtgtaaattcgtaaatttaatgtcgagttatgaaaattttattttgataatgcgacgaattgtttatttttttgggaataattttgaaaattagttatttgtgtatttttgaggaaagggaaaaaattagtatgtttattatttttaaaaaattagggtttggattttgataatgttaagatttatcgtatatttttgtttgtttggatatattagtgacgtttatttttagaagataaagttatattatttaaataattaaaggtaagaatttagtgataacgataattagagttatattttttataaatgtttatatttttgttttgattttttaaagttttagtttttgttttgttttttatgtgatgtgttttttagatatagttatgattgtatttttattaatttttttgtttttttgatagataagtgaatattttatttggtaatatgattttgttaatttgaatattataaaatagtaaatgttatttgttttttataaattttagttttatttttagaagttaaaaataatatttttgataggtatgtttttttttaaaggaagtgttatatattgatttttttttttaaaatttggagataggatattattaaatttatgtaaattttaaagaatttatttttaaaaataagagttttaatttattggaaatttaagtattagatattttattaatattattataataatttgtatatttttttttagagatgaataagtggtttgaagagattaagtgtttcgttcgaggatataatattattttatgaaggagttagaatttaaattattttgtttttttttaaataattgtgataagcgtgtatattttaattagaaaaaatagttattggttgggtttggtagtttatatttgtaattttagtattttgggaggttggagtaggtagatttttgagtttaatagttggagattagtttgggtaatatggtaaaattttgtttttaaaaaaatgtaaaaattagtttaggtgtggtggtatgtgtttgtagttttagttatttaggaggttgaggtgggaggattatttgagtttaggaggttgaggttgtagtgagtcgagattatattattgtattttagtttgagtgaaagagagagacgttgtattaaaaaaaaaaaaaaaaaaaagaaagaaagaaaaataaaaaattgttattaattattgttatgtttttttttaattaaaaaatgcgtattgtatttattat

SEQ ID NO: 424 - DNA, 5922 bp, Artificial Sequence
  chemically treated genomic DNA (Homo sapiens)
atgatgaatgtagtacgtattttttaattaaagaaaaatatgatagtaattgataatagttttttattttttttttttttttttttttttttttttttttgatatagcgttttttttttttatttaggttggagtgtagtggtgtgatttcggtttattgtaattttaattttttgggtttaagtgatttttttattttagttttttgagtagttgggattataaatatatgttattatatttgggttaatttttgtatttttttagagataaggttttgttatattgtttaggttggtttttaattgttgggtttaaggatttatttattttagttttttagagtgttgggattataggtgtgagttattaggtttagttaataattgttttttttgattaaaatatatacgtttattatagttatttaaaagaaggtaaggtgatttaaattttagtttttttatagagtagtattgtattttcgggcgaggtatttaatttttttagattatttatttatttttgaaaggggatatgtaggttgttataataatgttgataaagtatttgatatttaagtttttagtgagttggagtttttatttttaggagtgaattttttaagatttatatgagtttgatagtgttttatttttaaattttagaaagaaaaattagtatatgatattttttttggggaaaaatatatttgttaaaggtattgtttttgatttttaaaaataaaattaaaatttgtgaaaagtaggtagtatttattattttgtgatatttagattagtagaattatattgttaggtagagtatttatttatttgttaaaaagatagagaagttaataaaaatataattatagttgtatttagagagtatattatatgaaaagtaaagtaaaagttgaaattttaaagaattaaaatagaagtataagtatttgtgaaaaatataattttaattatcgttattattgggtttttatttttggttgtttaagtaatataattttgttttttagaagtggacgttattggtgtatttaaataaatagggatatacggtaaattttgatattgttaaaatttaggttttaattttttaaaaataataaatatgttgattttttttttttttttaaagatatataaatggttagtttttaaaattatttttagggaaataaatagttcgtcgtattgttaaagtaggatttttatgattcggtattggatttgcggatttatatatggatgaaaataatagtaatattattattttttgtttgagtttgagtttattaatatgaatgagagttagaaataaaagaggggtttttaaagttatattttttaataaatttgaaagtaaattatatgtattattgtttgatgaattttattaaaattatatttttaattttatttagggttattattttgaaaatagcgtttaggttttttataaagtataattatatttttaaatatagtgttatgatattaaaagttatttaaaatattagtaggatgtattttattagttattgattttttaattgtttattttatggaggaattgtatatttgatagatatttagttaagaaataaaataggataaagttgagtttgtttgaaagaaaaatttatgttttagatgtataaaaattattataatattttagttagtgttttagtgttattttaataatttaaaagtaaatttttttaagaatttttttatgtaatatatgataggttatatatttataaaatttttgtttatggttgaaaattagaatgatatgaaataaatattgtttttatttagtaaaattgtttttatttttatttattagttttaaaaatatattatgtattttttagtatttgtaatattttttttgttgaataatgaataatcgagtaatatttattgttttagttgaatggttttagttttagtagcgtaggaggtttttaagagaggaggtattttaagacgtttagtagagaaaattagaggagtattgtgtattttaggaagattgatttttgagttttagaattgtaaaaattaaatttatatttttaatataaaatatgttttataaaaagatattatagaaagaaagaaaagaaaatggaaatatagttttattattttggtataattaatattaatattttttttatatttattattatatttttaaattaaaattattttgattttatgtaatattatattatgataatatttatatcgttaaatatttatttaatgtgttttttttaagattatataattttttattgtattttattatattataatttattgatttatttttttattattggatatttttttttttggtttaaaatattttaaaatgaatatttttttttttaagatggagtttcgttttttcgtttaggttggagtgtcgtggtgttatcgcggtttattgtagtttttattttttaggtttaaataatttttttgttttagttttttaagtagttgggattatagatgtgtgttattaagtttagaaatttttgtatttttagtagagatggggtttcgttatgttggttaggttggttttaaatttttggttttaaatgattcgtttatttgggttttttaaagtgttaggattataggcgtgagttattgagtttagttttaaaatgaatatttttattttttattatgtatttttgtgattagtgtttatttagaaattagattattggatttaaaaaagtgtattaatatatgtggttttttgtgttataatttagttttatgttaaaatgttattgtgtttatttttttatattatgttttagttttttaggggttgggtatagagatttatgtttgtaattttagtattttgggaggtcgaggtgagtggattatttgaggttaggagtttgagattagtttggttaatatggtgaaatttgtatttttacgaaaatttaaaaaattagttgggtttggtatatatttgtagttttttagttatttaggaggttgaggtaggagaattatttgaatttaggaggtggaggttgtagtgagttaagattgtgttatttgattttagtttgggtaatagagtgagattttgtttgaaaaaaaataaaaatttaggtaaatatgaaattacgttaatttatataatgttgtgttttaaatatatttgaagatttttgtagagtttatagtggaaatattgttgtttattatttttttttaaaattggtttttaatttagtttttttagatatgataaattatttatgtgatataagttttttaatttttgttgttgttgttattttttttataggtttatttttaatattaatagaattggggtaagaaaataaatggatatttatgtattatattattaaatatttaaaattaaattaatgagttgttaaaatgagtttttgtttttattttgaaaaataaatttttataattaaaatattaaaaatttataaagtaatgattttaatatgattaaaatttagtaaaatgttaaagataattggatttaattattattgtatatgtttggttaggtttgttgatgggttaggggtatttatattagtaataaaatagagatatatataaatgtaagttattatgtattatatataatttatttttttgtttttttagaaaaatattaaatatattgtgataattaagattttatattatttggtggtagtgttgttttataacgttttgagttattatagattgtagtaatttttattaatttttatttgtataaattttgtattgttttaatataatttataaaatgagatagttttataaataaattatgaattttaaatattatatttaaatattgtagtgggtttttataaattaataatagatgttttttgatttaaaatgtgattatgttttaataaatttattataaattgaaataattataagttgaaaaggtatttaatattttaatatatttattataaagtagaaaaattataagatgaattattataagtaaaggaatatttgtatattgtagtttaagtttttgtttatgaaaaagtagtttgattttaaattggataaaatgtataaaataataatagaagtatggtattagagaaatgggggaaaaatgagttgaattttgtttaaagattatttttaatttgtgatatgagaaaaataaattaagtatagtttagtagttttgtttagttaaggagttagaaatatgattttggagattgaagtagttagaatttttagagtaaagtattagagaagaggaagtaatgtagagaaagaattagaaatttgtagagaggttttttttagtttttgtggaatgttaatttggatatgtataaatgaaaattttatagattggataaagaataatttttaaggtattaatagttaaataattttaaaatttatatagattttggagatatttaagttattatttgtagattggagagatttagtgaagattttaggtattaataatgtttatatggatttggtatagtggtttatgtttttaattttagtattttggtaggttgagatgggtagattatttgaggttaagagttcgagattagtttgattaatatggtgaaaattcgtttttattaaaaatataaaaaaattagttgggtaaggtggtatatgtttgtagttttagttatttaggaggttgaggtaagagaatcgtttgaattttagaggtggaagttgtagtgagtagagattatattgttgtattttagttgggtaatagagcgagattttattttaaaaataaataaataaataaaaaatttaaatgtttatatgaaaagttatattttaatagtagggttaatttaattttaggttaaaggatatagtatttttttatttgtggttttatttttaataattttatttatttgtggttgagtatggttttaaaatatttaatgtaaaattttaaaaataaataatttataagtttgatatattattagaaggttaatagtagtttgatgttattttataatgttaagttatttatttttttcgttttattatataggtattgtattattttatattattataaaaaaggtgaatatagtataagatattttgagagaaagagagagagattatatttatataattttttttaaagtatattgttataattgtttaattttattattaggtgttaatttttttttatgtttaatttataaattgaattttattataggtaaaaatatatagtgtatataaaatttggtattgtttatggttttaggtattttttgggggttttggaatatattttttgtagaaaaaagagagttatgatatttttaatttgttatataagttttaaaagaagtttataaaggattaaattaatttgtaaataatttaaattttttttttttttttaaggaggtaataaaatttaaatattttataatatggattaataatgtttggtatttaattagaaattattagatatataaagaagtaggaaaatgtgatttataattaggaaaaaaattagttaatagttgtatatttagaagtgatagaaattatggtatatgtttgggaatagtagtttatatttgtaattatagtattttgggaggtcgaggtaggtggattatttgaggttaggagtttgaaattagtttggttaaaatggtgaaatttcgtttttattaaaattttaaaaattagttaggtgtggtggtattcgtttgtagtttcggttatttaggaggttgaggtaggagaattatttgaatttaggaggtagaggttgtag

SEQ ID NO: 425 - DNA, 6980 bp, Artificial Sequence
  chemically treated genomic DNA (Homo sapiens)
attgttgttttgaaaatttgaaacggaaagaggaaaatttttaaaagtattagaatatatgtttttatagttaaagaatttaggtattgttatttgagttaaaataaaaaatgatttatatatttttgaaatatttattttatgttgaaagtgaaatacgatataaatatatgtgtaattttgtttttgtaaatttaggaaaaagggtttttttagtgatttggtgtaaatgaatgttaagaaaaatattttaaaattataatatgaaaagttttttttattatattttattttaagagttttttattaaaatttattgattaataaagttaaaaattaaaggaaatatagttaaagtttgatttattaaaatagttttgagaaatattaatatatttgaaaaattttgaggatttgttgtaggttaagtatttgttataggtatgaagattgagttaagattgaataagagagaatttttgtttgaagaatatattgtagagttagttatgtaaataagtaaatatgataatagaatataaatttttatgtaataaataataataaattttagttttattagtagggttatattatttttgtagttttattatattttatatttaagttataggatatttgagttatttaaatgtattatagttgaatttttttagatttttgtattgtttgttttttttgtttagattattttttttatttattttatttaggtaatttatatttattttttaatattaagtttagaaattattttttttgagttttttagagtattattttttatttgttatttttattgtagtttgggtttttgagattttagagtatattgaggattattatttttgtattatagtttttgttataacgggttgtaatagtttttttattgttttgtttttattagattaaggaattatatttttattattatatttttgttatttagtatagtgtttagtatatcgggtatataataaatattgaatgaatgaatgtatttattaatggagatagattaaatgttggtagaggggggatggtacgtaggagaagtaaaagaagttagggaatataatatagagttgaaagagagaggtcgggggaaagaggagagagattagaagatagttatttggatagatgttggggagagaaagaaggaagattgtaagagagagaaatggaattagaagaatgagaaattgagaataagttgaaataattatatagtgggggtattttagaagaaaatgatttttttttgttttaatagttttaatatattgtttttaatagtttttaattatatatttatttttttgtgttatttaatagtttatgtgtagatattttattttttagataaagttgtagttttgagaaaattttgaaggatttgttatagttttaaaaaatgttttaaatagtatttagtataaatttcggtatatagtgggtattaaatagttatttgttgaaaagaattaaaagaatgagttaaaatgaggtttagattttgagatgagtattagttggaaggaatataggtattgttaatatatttgggtaatagagtcgttattgtatatagaaaataatgattttttttatgttagagaaaagtttgtttatttttgtttttaaatataaggtcgtaaatgttaattatttaattttttgaaaaattttataaggttttgtatgtatttttagggatgattttagttttataaatttggaattttaatgatattggttaatttattgtttatttttgagtttttttgatatttaaaatgtgttagattattttattttgagaaattagaaaaaaagaaatatttaggggtttgtattgttttaaaatgatttgggagtagggtggtaatagttaggattttatgttatggtaaattaggagagtggagagatttattaaggagtggagagatgatgggttaaaacgtgagggaaggtatttaatgtagatgacgttttgatgggtgtagtaaattattacggtacgtgtatatttatgtaataaatttgtacgttttgtatatgtattttagaatttaaagtataataataattaaaaaaaaaaaagacgtgagggaaggtaaagttaggtaaaataaggatggggtaaagtgttgggaaaagttaaaggtatattgtgattttagttttttttatgatagataatggttataaatttttgaatttaaagaattaagtaattttattggttgtttaagtttggtaagggaataattaaataatttgatttttaagaaatgtggtttagtaataatttttgataaagattgtaaatagagaagggagttattataaatatagttagtttattttttttgtgtatatttttagttaagtaaatttttgatggtttttggttacgtttttatattttattttagaatttttttaggtgttaggttggtttttagagggatgtatttcgattatgggttattgaaagagttgggtttgtagttttataaaaatttgaatgatagttaaaaggcggttagagaattttgaagacgattttgtgaagagggttttggattttattttttagaaaatagttatttgatataatttttttatttttatttgttaatattgagattttggtttagtttggtagtataaataatataaaaggttgtttttggtttttgtttttattatattattggtaatttgaaaggtgagttttaaggatgtttatgtatttttggtatatagaaattagagttttttaagattagaaaggattttaaaggttatttaaattaattgttttattttatatttgagaagaataaggttagtaaaagttataggattgtttaatggtagagtatgaatggttaggtttagataaaaatttataaaattggatttttattttttatcgtttttatgattacgtgttaattttattttagatgataattttagattaaatgtttatatatatatacgtatatgtatatatatatatttgttaatttgaatttgttttaatttttaaattaatttattattttttatggaatttataacgggaattttaataatgttggtgttagttttgttacgtttttttgtataaatttaaaatgtatttattttttattttaatttttaattggtggtaatgagttttatgtatattatataaaaaatatatttgttgagttttgttgaaatgagtatttttttttttgttatggggataaaatgattttttgaatttttattttttaggataagtatttgggtaatatattagaaaaggaaaagtaaaggaaagggaattttggaatttttttattttggttaaatttttgtgttaattttttagtgttttttgttatgtatgtgaattatgattatatacgaaaatggtttgttttaggttatgattgtgggtagagattaattggtgaaaaatgggtttgtttgtgggatttattatatagtaaggttttttatttgtttggaaaaatgtggaattagttttttgagaaatgtagttcggttatgaggttgaagcgagagtttagggagggaaatatagtttattttttaaggtagttatgattggttagattttagagtagtttttttggtgtagtaaagttttttttttttcgtttttaggtttgtgttttttaatgttgttagttttattagtattttatagatagtattttattcggttttttttaaggtttgttgatttaaattggggagtggttttggagaggatttttagtttttttcgtttttttatttagaaagtgttgttatagtgaaaaagtttttaatttgtaaagattaattgcgatagtaaatttgtgttgtgtggaaggggatataagttgtgaatcggcggatatgtatgataagggtataaaatggaaggcgagacgttagtttttcgtttgtgaagatggtttttgagtaatatttaagaacgtgtacgtggagtgttattagagtgtattttacgtgtacgtttttttttaagagttattgtaaggattttgggtttgttgcgtggtttaagaatttacgttgtttttgaggttagatttagttatagcgattagggttttttcgttatggttttggtggtggttggttttaaattggttatagtttgaagatttattttgaaagggattaaggttagagatagcgtttttttttttttatttttagtttagtatttttattaagtatattttttggggattataaacgttttttttttcgaagattttagtagtgatttgtgggattttggttgggtgttcgtgatttatttttaaagagaatttgtacgtttggggttttaggatggttggtttgtttttttcgttcgaagatgatttcgttttttttttttagtttcggtgggttttcggattgtcgtcgtcgcgtttttttcggtttgggtacgttgggtcggcgtggtttcggttcgcgtttttgttgggcggtcggcgcgggtggcggcgggataagtcgtgagcgttggcgcgcgtcggtcggggtagtcgcgggggaggagcgttcgttcgcgtcgcgcgtttaacggattaggttggggtcgtgaggtaattgttgtagttagcggaggtgggaggcgatattgagtttttagtttcgagaggtgttcgagggaaaaggaggcggtagttaaattggttttggagagaagtttttttcgtttttttttttagttagtatgtttcggatttcgtcgttttttagttcgcgcggtggggatttcgggtcgtggcggtcggcgcgatgttgacgggttgcgaattagggggcgtttcgaacgcgggggttggggtttgggagcgcgagttcgttacggtacgagcggggtgtgttgagtttcgtggttattttcggttttagttatgaggagggacgagtcgagacgttaaagttatgcggtttttgtagtcgtcggatggggtcggttcgtttttcgagagtttgaggaacggttacgtgaagagttgcgtgattttttgcggtaggatttttcgcgcggtttttttttttatttttgtcgtttttgtaacgtggagttgcggtcgtcgtcggtttttttttagtagtcgcggcgttgtttttttttttgtcgggcgcgtttttcgttgggcgttttggttgtttttgttttcgttttgttgttgggcgcggaattcgagagttgggttgtcggggtcgtttggttgcggacgttgttgagcgtgtgttcgtatagtttgagttttttttttagtatcgtttgtgttttttttttttttatttgtttttttattcggattaagcggggattcggttcgagcgaagttgcggtttttggtggttgttggcgttgttcgtttgttgttatttgggggattttttggtgtggtagtggtggttttggttttggggggatggcgacgtagggttcgcggtttcgtatacgttttcggaggcggtagcgggtaggttgttgttggtgttgagttgcgtagggttgttgtgacgtgcgtattcgttgcggtttcggtattgcgttttggtgttgtttttggttagtttcgtttggtgggttttttttattagtttcgggtcgttgtttttcgttttaggtcgttgtttttcggtttggtggggggcgttggttgtttgttggttttggggttggattattttttttaaattagggaagcgtttttttattttcgattgtttagtgtcgtcgaagaaaaagtgtttgtgattcgatttcggaggaggtttagttgcgtgtcgttaggagaaattgtagttagttattatggtagttgtaaaatatttaggagatcgtcgttgttttgtatttttagagaataggtatgttagttggaaggcgaggtttgggacgcgagcgggttcgggtttatcgttgtagttttcgagttgaattcgtttattttaaagtatgttaatttttagaatggaaaaagggtgtgttgcggggggggggggggaggaaataatgttttattttggaaaggatttttaaaatataggaagttttttaaaaatgtagaagtaagtagtttttgttattgaatagaaattaaatagttcgttaattatatggtattttttaaggattgtatatgtaatagatgagttcgtagaagaatgaggtgaattatttgtggttgaatagattgattattttcgtttttggtattttttgatatgtgtttttttggtgttatttatttgtttgttgttataatgatgtttatttaaaaataatatatagtttttagaatgagaggatatatttatgagttttaattagtgtggtttcgttattgaaaatcgagaggaaaaatttgagattttatcgttataagatatgagttttgtaaatgagagtaatttagatgaaaagatagtagtataggtgaatataatattttatagattaatttaatgttttttgtatttgttgtataattaggagattgttttaatagtttaaattttaaatttggtaatttttggaaagatgttaaaagtatttttatttttttattataggtttatatatttttgttttttttttaaaagggattgaaattattagtaaatgagtttatatttttatatagtattggaaaagttatttgttgtatattattaagaaatttaataagtatagttattattattgagtatttatgaagtgtaaaatattttatatatattgttttagatttttataagaacggtgtttggttggtgttattaatttttagagatgagaaatttaggtatatagaggtaatatagttttatatgtttagttaagtggtagttttgggatttgattagatttttga

SEQ ID NO: 426 - DNA, 6980 bp, Artificial Sequence
  chemically treated genomic DNA (Homo sapiens)
ttaaaaatttaattaaattttagaattattatttaattagatatgtgaagttgtgttatttttatatgtttagattttttatttttagaggttaatggtattagttaaatatcgtttttgtgaggatttgagatagtatgtgtaaaatgttttgtattttataaatgtttaataatagtaattatatttattaagttttttggtgatgtataataggtagtttttttaatattatataaagatgtaaatttatttgttaatgattttaattttttttaaaaaaaaaataaaaatatgtaaatttatggtgaaaaaatggaaatgtttttggtatttttttaggaattattaagtttaaagtttaaattgttaaaatagttttttaattatgtaataaatataaagaatattgaattaatttgtaaaatattatatttatttatattgttgtttttttatttaaattatttttatttgtaaagtttatgttttgtaacgataaaattttagattttttttttcgatttttaataacgaaattatattgattaaaatttatagatgtatttttttattttaaaggttgtatgttatttttgggtaggtattattataatagtaaatagataaatggtattaaaaagatatatattagaggatgttaaaagcgggagtagttaatttatttaattataaatgatttattttatttttttgcgaatttatttattgtatatatagtttttaaaaagtgttatgtgattagcgggttatttgatttttatttaatgataaaagttatttgtttttgtatttttaaaaggttttttgtattttaagaattttttttagaataaaatattatttttttttttttttttttcgtaatatattttttttttattttgaaagttaatatgttttgaaataagcgaatttaattcggaaattgtagcggtaaattcgaattcgttcgcgttttagatttcgttttttagttaatatatttgttttttggaaatataaggtaacgacggttttttgaatattttgtaattgttatagtaattggttgtagttttttttaacgatacgtagttggatttttttcggggtcggattataggtatttttttttcggcggtattggatagtcgaggatgaagaggcgtttttttgatttgaaagaagtgatttaattttagggttagtaggtagttagcgttttttattaggtcggagagtagcggtttgaggcggagggtagcgattcgaggttggtgaaggagatttattagacgaagttggttaggagtagtattagaacgtagtgtcggagtcgtagcgggtgcgtacgttatagtagttttacgtagtttagtattagtagtaatttgttcgttgtcgttttcgggggcgtgtgcggggtcgcggattttgcgtcgttatttttttaaggttaagattattattgttatattaagaagttttttaggtaatagtaggcgggtagcgttagtagttattaggagtcgtagtttcgttcgggtcgggttttcgtttggttcgggtgaggaagtaggtgaggaagaagaaggtataggcgatgttgaagagggggtttaagttgtgcgaatatacgtttagtagcgttcgtagttaggcggtttcggtagtttagttttcgggtttcgcgtttagtagtagggcgaggataaaggtagttagggcgtttagcgagaggcgcgttcggtagaagggggagtagcgtcgcggttgttggggagaggtcggcggcggtcgtagttttacgttgtagaagcggtagaggtggaagaagaagtcgcgcggagggttttgtcgtaaggggttacgtagttttttacgtagtcgttttttagattttcggggggcgagtcggttttattcggcggttgtagggatcgtatggttttggcgtttcggttcgtttttttttatggttggggtcgggggtggttacgggatttagtatatttcgttcgtatcgtagcgagttcgcgtttttagattttaattttcgcgttcggggcgttttttggttcgtaattcgttagtatcgcgtcggtcgttacggttcggggtttttatcgcgcggattgaggagcggcggagttcgggatatgttggttgaggagaggggcggaaggggtttttttttaggattagtttagttgtcgtttttttttttttcgggtatttttcgggattggagatttagtgtcgttttttattttcgttggttgtaatagttattttacggttttagtttggttcgttgggcgcgcgacgcgggcgggcgtttttttttcgcgattgtttcggtcggcgcgcgttagcgtttacgatttgtttcgtcgttattcgcgtcggtcgtttaatagggacgcgagtcgggattacgtcgatttagcgtgtttaggtcgaggaaagcgcggcggcggtagttcgaagatttatcgggattgaaagagaaggacgaggttattttcggacgggaggggtaagttagttattttgggattttaggcgtgtaggttttttttgagggtaagttacggatatttagttagaattttataggttattattggggttttcgggaaagagggcgtttgtggtttttaaggggtgtgtttagtggggatgttgagttaagggtgggaggggaggggcgttgtttttaattttagttttttttagggtgggtttttagattgtgattagtttagggttagttattattaaggttatggcgaagaaattttaatcgttgtggttagatttagttttagaagtaacgtggatttttgggttacgtagtaggtttaggatttttgtagtggtttttagggaggaacgtgtacgtggagtgtattttagtagtattttacgtgtacgtttttgagtgttgtttaagaattatttttataggcgaagaattaacgtttcgttttttattttgtatttttgttatatatattcgtcggtttataatttgtatttttttttatatagtatagatttgttgtcgtaattggtttttgtaaattgaaggtttttttattgtaatagtattttttagatgggggagcggagagaattaggaattttttttaagattattttttagtttggattagtaggttttgaaggaagtcgaataagatgttatttgtgaagtattggtgaaattagtaatattaggaaatatagatttgaaagcgagaagaaaagaattttattatattaaagggattgttttggaatttaattaattataattgttttagagagtgaattgtgtttttttttttaagttttcgttttaattttatgatcggattgtattttttaaagagttaattttatatttttttaggtagatgagaaattttattgtgtggtaaattttataaataggtttattttttattaattaatttttgtttatagttatgatttaaaatagattattttcgtatatggttatagtttatatgtatagtaaaaggtattaagaaattagtataagaatttaattaaaatgaaaaagttttagaatttttttttttttgtttttttttttttaatgtattatttaaatgtttgttttaaaagataaaaatttaaaaggttattttatttttatgataagaaaaaaaatgtttattttagtaaaatttagtaaatgtattttttatatgatgtgtatagaatttattattattagttgaagattaaagtaaaaaatggatatattttgagtttgtatagaagggcgtgataaaattagtattagtattattgaaattttcgttataaattttataggaaataataaattgatttgaaaattagaataaatttagattaataggtgtgtgtgtgtgtatgtgcgtgtatgtgtgtgggtatttaatttgaagttattatttaaagtaggattggtacgtgattatggaaacggtagggagtagaaatttagttttgtgagtttttgtttgggtttagttatttatattttgttattaagtaattttataatttttattggttttgttttttttaaatgtgaaatgaagtaattaatttagataatttttgaaattttttttagttttaaaaagttttgatttttgtatgttaaaaatatataggtatttttaagatttattttttaggttgttaataatataataagagtaagagttaagagtaattttttatattatttatattattaaattaaattaaagttttagtgttgataagtaaaaataaagggattgtgttaaatgattgttttttgaaaaataaaatttaaagttttttttataaaatcgtttttaagattttttagtcgttttttagttgttatttaggtttttataaggttataagtttaatttttttaataatttatagtcggagtgtatttttttgaaggttaatttagtatttgagagaattttaaaataaagtgtaaggacgtgattaaagattattagaagtttatttaattaaaaatatgtataaaaagaatgagttagttatgtttatagtaatttttttttttgtttatagtttttgttaaagattattattaggttatattttttagaggttagattatttaattatttttttgttaaatttaaataattaataaaattatttagttttttaggtttaagaatttatgattattatttgttatgaaaaaaattgaagttatagtatatttttgattttttttagtattttattttatttttattttatttgattttgtttttttttacgttttttttttttttaattattattatattttaagttttgggatatatgtgtagaacgtataggtttgttatataggtatatacgtgtcgtggtggtttgttgtatttattaaggcgttatttatattaggtgtttttttttacgttttgatttattatttttttattttttagtggatttttttatttttttggtttattatgatatgggattttggttgttattattttgtttttaagttattttaggataatgtaagtttttgggtatttttttttttttaattttttaggataaagtggtttgatatattttaaatattaaagaaatttagaaataggtagtaaattaattagtattattgagattttaaatttataaaattagagttatttttgaagatatatgtaaaattttataaggttttttaaagaattaaataattaatatttacgattttatatttaaaaataaaaatggataagtttttttttagtatagaaaggattattgttttttgtgtgtagtagcgattttgttgtttaagtatgttaataatatttatgttttttttagttaatatttattttagaatttgagttttattttgatttatttttttagttttttttaataagtagttatttagtgtttattatatgtcgagatttgtattaaatgttatttagaatattttttaaaattataataggttttttagagtttttttagagttgtagttttatttgggagatagaatgtttgtatatagattattaaatagtataaaagaataaatatgtgattaagaattgttgagaataatgtgttaggattattaaaatagaagaaaattatttttttttagggtgtttttattgtgtaattgttttagtttgtttttagttttttatttttttagttttattttttttttttatagttttttttttttttttttttagtatttgtttagatggttgttttttgattttttttttttttttttcgattttttttttttaattttgtattatattttttaattttttttattttttttacgtattattttttttttattagtatttaatttatttttattaatgaatgtatttatttatttagtatttattatgtgttcggtgtgttggatattgtgttagatgataaagatataatggtgaagatgtggttttttagtttaatgaaagtaagatagtaagaagattattatagttcgttgtaataggagttgtgatatagaggtaataatttttagtgtattttgggattttaggagtttagattatagtaggagtagtaggtaaggagtaatgttttggaggatttagagaaagtgatttttaggtttgatattaaaaggtgaatataagttatttaagtaaagtaagtagaaaagataatttgggtaaaggaagtaagtagtgtaaaaatttggaggaatttagttatagtgtatttggataatttaagtattttatggtttaagtgtaaggtatgatgggattatagagatggtgtggttttattaatggaattggagtttgttattatttgttatataaaggtttatgttttgttattatatttgtttatttatatggttagttttgtaatatattttttaaataagaatttttttttatttaattttagtttaatttttatgtttatagtaagtatttagtttatagtaagtttttagaattttttaagtgtgttgatattttttaaaattattttaataaattagattttaattgtattttttttgatttttggttttattagttaatgaattttaatagaaaatttttaaaatagaatataatagaaaaaattttttatattgtgattttaaaatattttttttaatatttatttgtattaaattattaaaagaatttttttttttagatttataaaaataaaattatatatatgtttatgtcgtattttatttttaatataaaataaatgttttagagatgtgtgggttattttttattttaatttaagtgatagtatttgaattttttggttgtgaaagtatatattttagtatttttaagaattttttttttttcgttttaagtttttagagtaataat

SEQ ID NO: 427 - DNA, 6282 bp, Artificial Sequence
  chemically treated genomic DNA (Homo sapiens)
aaagttaaaaaggataaaaaaaaaatttaaagtatttaaaatttagtgaaataattgaagggtttgttttttttattgtggattatagtatatatatatatatattttttatttttttattttttgttttttttttgttgttttttttataaaattgatgttgtttttattagaaaggtagataaaaaagaagtagtagtagtttttaaagtgagggttatttttatattcggttttagttattagtagattttttgtttatcggtagatttttttttttaatttgtaattttgatgtgttttggattagtttttaatttttaattatatattattgttttttaaattttttttttttttttattgttgttttatggttttggtttttattttttgcggtatatttatttttaaatattatagaattttaatttttggaggttggtagtttgatttggtattttagggttttttagtagggtgagttgttaaaatagtatatattttttattttttttttttttatttttttttgggttttagaaaggaaggatatatggggattattttttttttttttgattttagtattttagttttttttttaattttttatatggtttttaatggtgtttatttgtttggaagtaggtttttaatagggagggggttgttttttatagtttttttgattgtaagatagggttttgtattagtgagacgatgagaaaagttttaggttaatggtagaaatttgtattttgaatatgtgtgtttttgtgttgtggaatttgagattttttatttattaataggaagtttgattttttttttttggagtttttgttgttatattttgtggggttgggagagagagattagattattttgatatgggattttttttataataggtattttgaaggtaagatatagggttgaagaagtatagttagtttttgaaattatagttttttagtggtttttaaagaaagttggtttttagtattaataaaattattataatagtttagtgtttttttggaagtttttttagggaagaatgttaggtttatggtaattagtatgttttttgagatttttatagtgttgaaatttaagaattttgagagggtgaggagggttgtttagaatttaaattatagatagatgattgttttttgtgaatttgtttttttttttttttttttgtttttattatttttttatattttttttggggtttatttttggttttttgttttttgttttttgttttgttttattagtttattttagttttttgttagtgaaggatattgttgttagtgaaggaataaagtttatgagttttaaaattttaagttaaagaaaattgttttgttttttttttagtaatatttttgaagaggaaaaattttaatagttaaagttaataattttatataataattgttttggtttttatttaaaattttgggtattataatttttttgggatagaggttgtgttggggaatagattgtttattgttgtttattggagagaaaaggtagtgtttttgtataaggttatatcgttagaagttttaaattttattttggtttatttttaggtaaagagtaatttttattttgtgtgttttagaagttagaatcgaaggtttattttatttattgtttattgttagaaatgtatgatggtttttggaaagaatgacgttttgttggaaaaaaaaaaaagaatagtttgtgttttataaatatggtttattaatttttttaaagaattttttttttttaaaaagaggagtaataaaatgttatttttgaaagaggtttattttatattaattagtgttagtatttgggatgttagggaatagagagtgagatatttataattattagttttaaatgcgttattgtttttttttagagtgttgtagatttgttatttttttataatatggggatagaaaatggaataaagatagaagggatgtagaatatgtttttttgttaatatggtttggagtcgattttggtatattgattagatttgaaaatataagattgattagatgaatttataaaaaagttgttttttttttaggttttttttatattttttgattaattagtatttatattttatatttagtttttttgttatatttattttttgttttcgtaaattttatttgtagtggttagttattagatattttagttatttatataaaagtaaattgtatttttaaaaatttttttgagatgggagaaaatgtattttttttttttatatcgtttttttaataaaaaaataattagttagttttattaattagaaatttgttgtattttttttttttttttaggggttaaggattttttttatagttattatttgtttataataaattattgtagtagtttgtaatattaaaatattttttatagattttatatttttttttttgataaagggatgttgtatagtagagttggtgtaattaaattattttagtcgtttttttgtttttttttttgttttatatgttttattgtttttttagggagtttttttaattttaaagttttatattttatgtttttagttaaattttgttatttttttaataattttttttattgtatatttttattttgaattggtggttttaaattttgaaattgtagttgagatatagttatttaatatttttgggagatgtgtattttttttttttgtggttgtttaaggttgttttgcgtaattgagattttttgatatgttttagagaatttaggtaaatattggttatggtcgtgggagtattgggagtaaaataaaaatatcgaggtatagattagtatttatatagagtatttgaattttttttgtatttgtttggggaaaaagtataatgagtgtattattaatttaattaagattattatagtttggttgtttgaaatattatttttttttttttttgtgttttttttattttttaatgtatttaagaaaattgaataaatgtaatggattaatttaaaatattttattttttaaaagttttttttgtttgttgtaatgtgtaggatttttttttttttatgggagagataggtagttatttgaatataggttgaaaaggttatgtaaaaagaaattataataaaagggatattttgttttttaaatttttgtttttttttattttaggtaaggtatattaaaaataaatatgtaaagaagaaaaataaaagttgtttttatggaagtaatttgttttttttggttgtattgagttatagttattttaggggtgaaatatgtgatgttgttaagtaaattaaatgtttttagaataggtgttatgtggggtatattattgtttgtttttgttgagaattaggtggttaatttttgattgtttttgatttttaatgttgaaatgatatgattttgttatttagtaaatttggaaattttgatgttttgataattgttttttaggaaaattggttatatgttaattaatttagtagatggaaaattaaggattatgtgaggttaattttattttgataatgataaaattttgatagtatttaatattaatatttttttttaaaattgaatgtttatattaagtattgatttttattttaaaaaagaaaaaattataatttttttgttttttaaaagttatgttgtgatagttgtttaggttgttttgttatattttttatttattgtttatttttataaatttgtttttaagatggtatgtgttttagtttattggtaatatttatgatataaataatgaaagttaattattttatttagtttttatttaataagtattattttttaagttaaatgtaatagaatgataattttttaagtattttttaatttttatattgttattttaaagtttagtttatttttttattttaagaagtatgtggtatgattgggtaggggagaaaaaaggaaagtatgttgttatttgagtgagattgttttagaaatgttattaagttagcgttgggtgttttttgttttttggaagagaataggtttaaatagtatttttttttttttatgtagttattaggaaggtatcgtgattgaaattagagatgtttttttgtttgatttttaagtataaattaaattatttttaaaaagtacgtaaggttaggagtgaaaaaaattttgtttttaaaggattttatatattttttgttttttgaataagatgtgaattatttaaatagaaaatgaaattggaaagttagtgggagagataattatagaattagatttttatttaaatttaagtttcgttatttgattttgtgtatgttattttttgaagttttagttttttatatggagaaataatatttattttagaaatattttgaagattaaatggaattgttttaaagtatttagtttattgattgatttatggtagatatttaataaatggtagttgtgttaataataattttattgaatgaatatttcgttagtttatgagaaaaaagatatgggaagtataagggagaatgataataaaatgaattaattttaagtgtgtgagatagattatattaggtaggggtgttatgaggattggtatgatagtgattttgttgttaagtgtaaaagtaaaataatgatatagaaataagtgtgttaagtattgagtggaggagagagatggaggtagacgttgtaggggaaaaaaaatttgattaaaaagggttttttgattttataggtataaaaatttatagttaggaatttgttattttttttgagttaggtagggcgtgggggtggggtgtataattttattagtagagaatgtttagtgggtttagtttttgagagttatattttttatttggattagtatagatagaagtaaatttagttgatttgttttttgggatagttgagttaagggatggtttttatagagtatttatcgttgattttttatcgtcgggatttttgtagtcgttttatttggttagtaaggaagattcgtttagatttgattgtttttacggaattttatgtaagttgtttattttgttgttatttgttttttttttattttttttgatttagtaatttattattacgtattagttttattattaattgtgaaagttttaattatatagttatttatataggttatttgatatgggttttttttttgaggaaatttatgtgattttattttttttttttgggttgtttaggagatgaagttatttgaatgagaaaatatatatggagttttagaaaggattggtttatatgttttggaggttattttaaatttattggtatatattttgaatattattagaatagattagttatgggttttttgggttttttatagttattgttttgaattttttagttatgtaaatgaaaggtttatgggataggaagagtattatgaacgtgggaggaatttgtaaattttattaattttttttatatagtattagttatttattttttagtattttgtattaaaagtagattgtgtttaaagagaaaggtaagttattaaaaggattttttagaagatttattggaaatttgtggaagtgttaaatttttgagttaattttggagttttagatttgttttttaatagtaaggggatttttattaatttttatttgagatatgttgtggaaatattttaatttttgtggagagttttgaatttaggttgagaattgatttatttttgtatagttttattagatagaaattagattttttgggagtgtttaatggggagagggaagttagagaaattttataatggttatattttaagtttttttagttgtggttagtgttttttataagtatgtttaaaaatattttaatatgattaaaatattttagttaatgagagagtttgaagtgagaaggaaaaatttttttaaattagtttttaatttttagaatttaataaaatttgaatatttttttaagaaaaatttataggtagttaattttaggtagtattgggtttttttaaagtttagttatagagtttaaattaagagtttttattgtagatatattatttattttataatttggatttttggttagagagatgagtgagattttgtatgaaatttaggggtgatttaaggatattggggtgatgatagaagatgtggtgtttttttgtattttcggttagg

SEQ ID NO: 428 - DNA, 6282 bp, Artificial Sequence
  chemically treated genomic DNA (Homo sapiens)
tttggtcgaggatataggaaaatattatattttttgttattattttagtgtttttaaattatttttaaattttatataaaattttatttatttttttggttaaggatttaagttgtaaagtaaataatatgtttatagtaggaatttttaatttgggttttatgattggattttagaaagatttaatattgtttgaaattgattatttatggattttttttagaagaatgtttagattttattgagttttaaaggttgaaaattgatttagaagaattttttttttttattttaaatttttttattaattggaatattttaattatattaaagtatttttaaatatatttgtaaaagatattggttataattaggaaaatttggaatatagttattgtagaatttttttaatttttttttttttattgagtatttttaaagagtttgatttttgtttggtgaggttgtataaagataaattagtttttagtttaaatttaaaattttttataggggttggagtatttttatagtatattttaggtggaaattgatggggatttttttattgttagaagataaatttggaattttagaattagtttaagaatttgatatttttataagtttttaatgaattttttaggagatttttttgatagtttatttttttttttagatataatttatttttgatgtagaatattaaaaggtgggtggttaatgttatataggagaaattggtaggatttataaattttttttacgtttatagtattttttttattttataaattttttatttatatagttaaaaaatttagaataatggttatgaagaatttagagggtttatggttaatttgttttagtagtatttagaatatatgttaataaatttggaatagtttttaagatatataaattaattttttttagaattttatatatatttttttatttaagtaattttattttttaaatagtttagaggaagaaaataaagttatatgggtttttttaagggaagggtttatgttaaataatttatatgaatgattatatgattagagtttttataattggtaatggagttgatgcgtgatggtaagttgttggattaaaaaagatgaagggaaaatagataatagtaaaataggtaatttatataggatttcgtaagagtagttaggtttgaacgaattttttttgttagttagatagagcggttatagaggtttcgacggtgaggggttagcggtgaatgttttgtgaaagttattttttaatttaattgttttaggaaataagttagttgggtttatttttgtttatattggtttaaataagagatgtgatttttaaagattaaatttattgggtattttttattaatgggattgtgtattttatttttacgttttgtttgatttagaggaggtagtaaatttttggttgtggatttttgtgtttgtggaattaaagggttttttttaattagatttttttttttttgtagcgtttgtttttattttttttttttatttagtatttagtatatttgtttttatgttattgttttgtttttgtatttagtaataaggttattattatattaatttttatggtatttttgtttaatgtaatttattttatatatttagaattagtttattttattattatttttttttatgttttttatgtttttttttttataggttggcgaaatgtttatttaataaaattgttattgatatagttgttatttattaagtatttattatgggttagttagtaagttaaatattttaaagtaattttatttgatttttagaatatttttgaggtaaatgttatttttttatataagaaattgaaattttaagaaataatatgtataaaattaagtaacgaggtttgaatttaaatagaagtttgattttatagttgttttttttattgattttttaattttattttttgtttaggtagtttatattttgtttaagaaataaagggtgtgtgaagttttttaaaaataggattttttttatttttaattttacgtattttttaaaggtaatttaatttatatttaaaaattaagtaaggaagtatttttaattttaattacggtgtttttttggtagttatataggaggaggaaggtattgtttaggtttgtttttttttaaagaataggaaatatttaacgttaatttggtaatatttttaaagtagttttatttaagtgataatatgtttttttttttttttttttatttagttatattatatgttttttaaaataagagaatgagttgggttttgaaatgatagtataaaagttaaaaggtatttggagggttgttattttattgtatttaatttagaaaatgatgtttattgggtaagggttaaatgaaataattagtttttattatttatattatagatattgttaataagttgaaatatatattattttagaagtaaatttataaaagtaaataataaatgggagatgtaatagagtagtttgggtagttattatagtatggtttttggaaggtagaaggattatagtttttttttttttaaaataaaaattagtatttgatataaatatttaattttgagaagaagtattaatattaaatgttattaaggttttgttattattagggtaaaattaattttatataatttttaattttttatttattaggttaattaatatatggttagtttttttaggaggtagttgttaaaatattaagatttttaagtttgttgaataatagaattatgttattttagtattagaaattaagaatagttaaaaattaattatttgatttttaataaaagtaaataatagtatgttttatataatatttgttttgagggtatttggtttgtttagtagtattatatgttttatttttaggataattgtaatttagtataattaaggaagataagttgtttttatgaagataatttttattttttttttttatatatttatttttaatatgttttatttagaataagagaaaataaagatttgaaaagtaaagtattttttttattataatttttttttatataatttttttaatttatatttaggtaattatttgttttttttatgaaaggagaagggttttgtatattataataggtaaaaaaggtttttaagaaataaaatattttaaattgatttattatatttgtttaatttttttgagtatattggaaagtgggaaaaatataaaaggagaaaaaaatggtattttaaataattagattataataattttagttagattggtagtatatttattatattttttttttaaataggtataaaggaggtttaagtgttttatgtggatgttagtttatatttcgatatttttattttatttttagtatttttacggttatggttagtgtttgtttaaattttttgaagtatattaaggagttttagttacgtaaaataattttgggtaattataaagaagagggatgtatattttttagaaatattaaatagttgtattttaattatagttttagaatttagaattattaatttaagatggaaatatgtagtgggaagagttattaaaaaggtaatagaatttgattaagagtatgaaatgtagaattttaagattaaaagagttttttggaaggataatgaggtatatggagtagaagggaaagtagggaaacggttgagatagtttaattatattaattttattatgtagtatttttttattaaaaggaaaaatataaagtttataaaaaatattttagtattgtaaattgttgtaataatttattgtaggtaaatggtagttataaagagggtttttgatttttaaaagaaaagaaaaagtatagtaagtttttaattagtagaattaattagttgtttttttgttgggagagcggtataggaaaggagaatatatttttttttattttagaaagatttttaaaaatgtagtttgtttttgtgtaggtggttaaaatatttgatgattaattattgtaaatgaaatttacggagataaaggataagtgtgataaaaaagttaagtgtggaatatagatgttagttagttaaaaagtgtaaaagggatttgagaggaggataatttttttgtagatttatttaattaattttgtatttttaaatttagttaatatattaaagtcgattttaaattatgttggtaggaaagtatattttatattttttttatttttattttattttttatttttatattatggagaaatggtaaatttgtaatattttgaaaagaaataatagcgtatttgagattggtgattgtaggtgttttattttttgttttttggtattttaaatgttgatattagttggtataaagtaagttttttttagaaatgatattttgttatttttttttttgggaaaaaagaattttttgaaaaaattgataagttatgtttgtgaaatataaattgtttttttttttttttttagtaaaacgttattttttttaagagttattatgtatttttgataataaataatgaatagggtaagttttcgattttagtttttgaggtatataggataggaattattttttatttgaagatgagttaaaataggatttggggtttttggcggtatgattttgtataaaaatattattttttttttttagtgaatagtaataagtaatttattttttaatataatttttattttaaggaaattgtgatgtttagaattttaggtgaaagttaaagtaattattatataggattattaattttggttattgaagttttttttttttagaagtgttattaaaggggaaatagagtagttttttttgatttaaaattttaggatttatagattttgtttttttattaatagtagtgttttttattaatagggagttggaatgaattgataaagtaaagtaagaaataaaaagtaaggagttagagatgggttttaagggaaatgtaaggaaatggtagggataaaaaaaaaggaaaagaaataaatttataagaaataattatttatttgtaatttagattttgaataattttttttatttttttaaaatttttaagttttaatattgtaaaaattttaaagagtatattagttattatgaatttaatatttttttttaaaaaggtttttaaaaaagtattaggttattgtagtgattttgttagtgttgaggattagttttttttaaaagttattggagagttatgattttagaggttggttgtgtttttttaattttatgttttgtttttaaagtatttgttatggaagggattttatgttaaaataatttaattttttttttttagttttataaaatatagtaataaagattttaaaaaaaaaaaattagattttttgttaataaataaggaattttaggttttataatataaaaatatatatgtttaaagtgtaaatttttgttattagtttgggattttttttatcgttttattgatatagagttttgttttatagttaaagagattgtagagggtagttttttttttattgggagtttgtttttaagtaagtgagtattattgagagttatatggagggttgggagggggattgagatgttgggattaaagaagggggaggtggtttttatatattttttttttttgaaatttaggggggaataaaggaagaggggatgagagatgtgtgttgttttaatagtttattttgttaaggggttttaaagtgttaagttaagttgttagtttttagagattagaattttatggtatttgaagataagtgtgtcgtagggggtaggagttagaattatagggtagtagtagaggaggagaagggatttagaagatagtaatatatgattaaaagttaaaagttgatttagagtatattagagttataggttggaaagggggatttgtcgatgagtaggaagtttgttgatggttggaatcgagtatgagaataatttttattttaagagttgttgttgttttttttttgtttatttttttggtaaagataatattaattttataaggggagtaatagagggagaataggggatggggaggtggagggtgtatgtatgtgtgtgttgtgatttataatggaaagagtaggttttttagttattttattagattttaaatgttttagattttttttttgttttttttaatttt

SEQ ID NO: 429 - DNA, 10856 bp, Artificial Sequence
  chemically treated genomic DNA (Homo sapiens)
  unsure 2959: n is a or g or c or t
taataaatttaattttgtttttaagcggtggggagggtttagtattgaggtttataagtttaaaggttattgtgtaggtagggtattagaggcggtaggagcggaaattattattagtttgttgatttagttttggggggtaggaaaattggttgtgagtcgggtggcggttgtgtggagaggtggtagttttcggtgtttagtaggtggtcgaggttttagcgcggagtaggagtagtagttagaagggaacgtacgtttcgtatcgttcgttaggtgtcgtttcggtttcggggaagcgttcgaggtcgttgggtttcgcgtcgggaggagttgttgatcgattgacgtttggatagaggttcgacgtgcgttttttttttttttttatcgtttgatatttatacgtttatttttaggatttcggatttttagtgcggattttgttttcgtagtcgtggattgttgttttgtcgatagtagtttttgcgttttcgggggtcgagggggacgttggatcgggatagaattttcgattgtttttaatttggtagaaagaggttgagttagggatattagggtatttggaggttaagttcgttttttaaattattcgttaatttttatttcgttcgttttttttcggtcggattagagcgtcgaggtcggttagttttttggggaggagcggttttcggtgtatcgaattttgttagggtttagagtttcgtcgtaggggtaggggtaagttttgttttttttaagatttcgtcgtaacgttttttttttttttcgcgtttatagtttaatttcggtttgcggtacgggaagtaggaggtcggcggtttagagagttcggggagaggatattttgtgtgggcggttgtgcgttgatttttagcggggcgtagttagtttgttgtgtgttttgaagttttagttggtcgtttttgagttttagtttatgtcgatttttgttagttgtaggaaggggattttgtggttacggaagtgaaagtgaaaagtttaggtcgtggcgggaagaaggatttttttttgtagtgggagtttttgaggtatttgttgggaaagggttcgggcgttttaggtagtttattggggaaggatgtgaggaaatatggagatatttttttttttttttttcgtttttagttttagagtagtttttcggaggggtagggtttaggattatgggttaagggttaggtgataaatttaaggggtggagacgggggtggttttttcggtttttgtttttgttattgttattttattgcgtttttacgtggttttagaagttggttaggttgtttaattttatttttttatgttgtagttagatcggaggtttagggacgagtgtagtgaatatttcggttttttagaggtttaggttgcgaagggagtgagttttttatcgaggggtgcgtttgtgttcggtattgagagtgtattttttttatttttttattttagtggaggtttttttttcggttgtgtgttttcggggcgcgaggaatatgcgagtagtggtgttggtgttatcggagatattggaggtatgggtttgggttttcggtagggtttattttcggttaaggaagtttttttttttcgcgcgagggggtgatcgggaggggagtcgttgcggggggtagtagtaataggggagaggcggagtcggttggttttttttgtttaaagtgggggttgggggttttggttcgcgttttttttacggcgacgtcggagggaggatttcgagagttggttcggggtgtgttagggagtcggtgcgaggtcgttagggtttgaacgtgcgggagtgtgcgtaggagagatttggttaaggtcgagagggagagtgagtgtgaaggagcgatttcgggggtgagtgcgcgtttagtcgttttaggggagcgggtcgagtgggtgtgtgtgtgtgtgtgtgtgcgcgcgcgcgtttgcgagattcgcggtcggggttgcgcgtgaagtacggggattatagtcgttttgagggcgcgttcgagaaagggtgaacgcgagggggttacgcgtgttagtgcggacgagtgtgttagcgggggggtagagcgcgtgttagtgttgggcgagtgggagtgggggtttataggttcgcgtagggcgagcggatcgcgtgtgttaggagcgagagcgtgttaaggcgggggcgcgcggggttcgtggcggggaggggtcgtggcgcgcggtcgcggaggcgcggggagataaggtaagagggggaggggagcgagggcgcgcgcggtcgagcgggcgttcgcggttatatgggcgagagaaggagggagggagcgcgcgagggagggaggaggatgggggggttaaagtcgtcgagcgttgaagagtcggtgtagagcgggcggcggcggcggcggtagcggaggcggcggttttagtcggcgcggcgcgaggttcggcggtgggattcggcgggcggtgttagtttcgcgttttttgtttcgttcgttgtcgggggcggtcggaaggcgcggcgcgaagttcgggtggttcgagggcgcggtgagtattttgcggcggagtgcgcgcggtcggatttttagagttcgggttgattagtagatcggcggtttttatgcgtgcgggaacgggggcgttgtagaagcggttttttacgttcgggcgtttcgggggttgggcgtggtggtggtggtggggtcgattgtggattagagggaggtggtttcggcggtttgttttagtgtttttgttttttttattttttagttgtacgcgcggggtttggaaaaatttttgggtttggggaggttcgtagtggtttttgcgcgtttaaggtggtttttttttcgggtagaaatttggattttaaagcgttcggggatgcgaatcgacggttgcgcgtttgttttgttgngtgttcgtgtgaatttttgcgttcgcgcgcgcgtgtgtgtgtgtatgtgtgtgtcggtcggcgtttttatggttttttttttagttcgtttggatgtatttttatgtagtgggttttttttagtgtgtttttttgtaagtttttttggtttgtgcgagtttgtttatggtgtatttttaagtgtttttttgtgagtttgttcgtgtgtgttttttttagtgcggtttagtgtgagttagtttgggtgtttttgtgttgtttcgagtagtgtattttcgcgtgcgtgggggttgggtcgtggggaggttattagacggatagttttttttttcggttttttttttttttcgagttttttttttagcgttagttcgttcgtttgttcgtttttttgttttttttttttttttagtagttttaggcgggtaggattattttacgttttgttgaaaatttaggatttttttttttttcgtttagtttttttttttgagaagcgtttgtgtgtgtttgtgtgtttggtagtttgtttgtaatattgggtgtgtgtttgtatgtcgttgtaggagtgtgtttttaatattagttgttttgtttgtaatatttggtgaatttgtgtttgtgttattgggagtgtttgtgtggttgtggttattgaggtggtgcgagtgtgaaatgttgggtgtgtttgtgtatttgtaattgttgtgtgttcgaggggtttgaaatattaggtgtatttttgtgtatttaattttgggtgtgatggtgtgttattatacgtgtgggaatggggtttgaattattgtagatttttagggatgtagggttagtaatgatttgggggttagaagggtttaggtgttttaaattatgtttttttgtttttattgttataatttatataaatttttttagttggtgttaggggtttttggttagtattggtgagatagagttaaggtttatattgttagggttgatattttaattgagattttgagtttatataaagattaggagtttaaagtttatgtataggatttttgggggttttggaatttatatttagatgtatattgggatattttagttttttttagggtttaggggtttatatttatatggattgatatttacgttgtggggtttatatttagggatatattttagttttggagtttttatatagatttatattggaattttgtttatattgggatttatattgggattgtaggtttatgtttagatttacggttttattttttagtttagatttatattgagatttagagtttatatttagaattttattggggttttagggtttatattggggtttatataaagatttttatgtttatttcgatttatatttatattttgggatttcgagttagttagattcgtatggggaatatggggtttatatttgaatttaaggattcgttgaggatattggggtttatagttagatttatatttttaagttggggattatattgatttatacggggattttggagtttatttagatttatattaggatttttgggtttatatttagatttatatgggaattttgggggttagatttttatgggtaatttggagtttatatatagatttatattaggattttggtaggatttatttgaagttttgtgatttatttagatttatattgggattttagagtttatatttagatttatagtaggattttgatgtttatatttagatttataagggtattttgggatttatatttagatttaaaaagggatattagtgtttatattaggattttatataagttattttagtttatatttagaagtttttatgattagggttttatatttagatttatattagaattttaatgtttatgttgatttgtataggaatgttgggatttataggtttttttattttagttttggagtttatatttagatttattggggtttatagttagatgcgtgttgagatttgggtttatatttaaattcgtatttgtattttggagtttatatttagatggatattagatcgtgatatttagattaaatttatattgttattttgggtttatatttagatttatattaagattgtggtatttataattttagtggaatttaggatttatggttagatatgtttatgtttttttttggtttgtggtgagtatcggggtatttgaagtgaagaatagagattgttataggatttgttttttttaaaggtgaggaggagagaggatatatatttggttacgttttttataatgggttgtgggttaatggaggggagtggtggtaaaggttaatttagttagatttcgttgttttttttttataaggagattagatttttggtaggaagatttgagtggattgttggtataggagtaatgtgaatttttagattttttcgtgtgttatgttaatgtatatttattttttttgaatagttttggatattttttttgtggtagagaagggttaggtgggggaaataagatttttgtttttttaagatatttttttcgttttatatatatatatattttaattatttttaggatgggaggggtgtgaagattggagggagtagattttggtttttgcgattgttttagggtgttgaatttgtgattgtaggagagataatagttttagatttgtggggagaaagtagttggaggaggagacgggattttattttttttttttttttttgttttggttggggaggggtagggattatgttttgttgtgcgtgttttatagtgtttttgggattgtttgttgagtttttattttggttttagggtatgtttaggtttttttattttgttttttaaaagagtagtagttttggggggtttaggatgtagttagttttgggattttaattttcgtggagattttgttttggattttgcgtgttttgttgttatgaatattagtgggtggggttgtttgagatatgttgtttttttttatgggagtttatatagtagggatatggttttgcggttttttttaatgttgagatggttgggttgtaattgtttttcgttttgaaggggatatacgttttttagtcggggtgggaggtttggaggtaagatatttttgttttttgtttttttatggcgagttgaagtgtaaatgaatcggaaatatatggagtggattttttttgaaatgtagatgggttaggggggattatgtgtgtttggtttggggcgttttggagagtaaggagtttgagaagtgagaattgattttttttttagatttattattgggtgggggtagtgggggagattttagttttgtaaatttttgtggttttgggtgattaaatttataagggtttttagttttttgtggggaggggttgggaaggtaagtggtttttggggatggagagtattgaggttattagttttttttatttttgtagagggtaaagagagttttaaagtatagagttgtgttcggttgggggttattagagttaggtattttgggggttaaggggtggaaggaggagttggagtaggcgttgaggaagagttagattttgtggttgtgggtagttagtttttaaaagttaagattagagttatagtagtaggaattgaaattaaattatggtagtgatttgtgtttagttcgagggttcgttttgggtttaggagtaaattgaagagtttttagtttgtaggaggataggtttttttagattttagggtagttagtgtgttttattatatattttatttgtattttttttacgtgatatttaggaaggttgtatagtagttgtttttgagttttacgtgatttaaggattgggttttttttgtttattttgtatttgtttgtttttggtatagatttcgtatattagaggaaggtatttttgtgtgaatagtaatatatttttttttgttttattggatcgaatgttttttgtgggtacgattatgtgtttggttttttgtatagtgtttggtagggaataggtgtttaataaatgttgaggtatgaattattgagtgggatagattatgaggagagggaagttgttgggatttgtggtttgagatttagtattttttgttttatatttttgtttggtttaaaggaagattggtttgtaggttagagtagaggaaggatttttttttatttagggaaggagtgtagaggataggttttttttttggaaaggtttggattagaggaggttggggtagagtaattatatcgattttgtggtagaggttagaggttattttgtttttttttagttttaggattttgtagaaagtaaggtttttttttttttatgtggtggtgaatacgttttttattttttaggtgtgagttttttggataagaagaaattttttcgggggaatggattttatttttgattttttagttgaaggaatggattttatttttgattttttaaggttgggttttgaggttgtgtagttgttgtgggtattatagattgtttgtattggttattaatgtttgtttgagaatacggggttcggattttaaaaatattttgtttagttagagtttaggagttgttggcgtgggttagtgtggtagtggttgtattttggttagatagagatagagaggaagaaatatatatttaacgttaggaaagattgggagagtgtgtgaatatggggaaattgaggtagtataggtgagagatgtataagaaagagagtttttgttttatatggagtaaagatttataaaattattggtgttagttagttaaattatggtaatatttagggtaatttgttattttaaataattgtagagaatttttttttaagagagtttggagatataattgatgttagatataaaaattaagtagttagtaggatttattttaagattagttttaggatgttttaaaataagagtgtggtaaaaaatataaagtgtttttaattatttttttttgagttattgtttttttttttatttttttagagtttttgtttttagttagagttttaatgaggggtttaagatttttttttatagttttttttaatttttaaattttaggtttttgcgtagtttttttttttagaagggagttgtatagtggttttaaaaaggtagaggagtttagagttagagggaagatgttatgtgatttcggtttatgagttgatttttgtgggttttttcgtgaaattgcgggatggggggttgggttttggtttaggttcggagagaaggcggttttggtatttatttaggtttttgacgttaatgattttttaaataatggaattaatattgggggttgggggtaagcgtgaattaggttttaacgattagaaatagattagtataatttcgtagttgattttgatagagttgttttggcgagtttgggtgggaggtttggaaggaggtggatttgtgggggtggggttggggggtgtttaggaattggtaggcggagttatttggtgtttagagtttgagggtatataagtgggtagagattcgggttgtttgggattggaatgatggggtgaggatttttgttttggtgttttttttttgtgagtttatagggttttgaggttaggtaaagtttgtggatggagatttagttagttagcgataaagagtgggtaaggggattttatttttttgtattttagatgtgggtttttaggttatattaggggttataggttatatttatgtagtggaaaagttttgagtgagatttaagtaagacgattttttgtttggaagtaaagggtattaatttaagatagggagatgggtatttttttttaaattgggagtatggttttttttattagtttatatttttttagttttttagaggatagtaggtgaggatggaggggattatagggtttatggggggttggtttggtagtagttgataaaaaataggaagaagggttgggggagcggttgtaattatggggtatttattattaattagatgaaattgttggaagtagttggtgtaatgtgcgtagttatatagattttgtatgttttttttataatacgtatatatatatacgtatattatatatagtttgagttttgtttgtttttatagtttgttttttgtgaaggttagatgggtttatatgtgtttgtttgtatattggagtgtatttgtcggtgtttttttatgttagtttgtatttttttttatttttattgtttttttttttagttattttttttattttttggtttaatgtgtttttttttgtttttggtttttttttagtttttttttttttgagtttgttttggtgtggttgtatttgttattattaattatttgtttttaatattttattttagtttttggttatttttttttgggtggtggtgtttttgtatttttgggtaggattggaagatatggaattttttttttatggtatgtgtttaggtatttaattatatttttggtagatatatttgggatttgtttttaagggagtagttggattttgaggatttatttggggttttatagaaggtgaggggttttttgaatggttagagtttatagaagtaatagtggtttttaagatatttttgagtttaaggttagtttttttattaattattagttgtatgattttggttaagttgtttttgttttttgagttttagttttaggatttgtaaaatagaaataggattatttttaaagtttgtgtttttttttttttttttttttgttatagggttttatttggttatttaggttggagagtgtagtggtttaattttggtttagtgtaattttcgttttttacgtttaagtgatttttttattttagttttaggagtagttggaattataggtatatgttattacgtttggttaattttttgtatttttggtagagatggggttttattatgttgtttaggttagtttggaatttttaagtttaggtgatttatttgttttagttttttaaagtgttgggattataggtgtgagttattatgtttggttttgaagtttgttttgatgatttagtattaaaatgtaaattaagtatttattatagtgtttgggtaattaaggattttgaataagtgatatttgttgttattatttttgggaaagatattgtgtaggtgggtgagagatttgtataggtaaattggtatagtagtaaggttttggaattagatacggatttaaatttagattttggaattgattagttttgtggtattgggtaaggtttttttgaagtttaatttttttggttattaaatgtgaagaataataaaatttattttatggagaaattatgaagattaagtaagataatgtatataaagtgttaaatatagtttttggtatataatagatgtttaataaattatagtggtgataaggaagggggtgttacgatggtggttatttatatcgtgtttgtgattttgtgtttttaggattgtgtatgtgaggatgtatgtgatatggaggtgtttgtgtgtttgtaaattgattgtataagaattgtggattgtttgtgggtgtgtatttgtgtattgtattaggttattgttttttggtaatttttgtttttgtggtttagaatttgaagttagtaaggggtgttgggaggggtttgtattatttttaatttttttttttttagacgtttagttgttgtttgttttagttttttttttttatagtggggttgtgagtatggaatggtttttgagttggattaaggtttgtggtttttttgtgatttttgatttgtgttttttgtttttttaga

SEQ ID NO: 430 - DNA, 10856 bp, Artificial Sequence
  chemically treated genomic DNA (Homo sapiens)
  unsure 7898: n is a or g or c or t
tttagaagggtaaagggtataaattagaggttatagaggagttataggttttagtttaatttagaggttattttatatttatagttttattgtgagaaggggagattgaggtaggtagtagttaaacgtttggaagaagaaaagttgagagtaatatagattttttttagtattttttgttgattttaggttttgaattatagggataaaggttgttagaaggtagtggtttgatataatatatagatatatatttatagataatttataatttttatataattagtttgtagatatataggtatttttatattatatgtatttttatatgtataattttagaggtatagggttataggtacggtgtaaataattattatcgtaatatttttttttttattattattatgatttattgagtatttattatatgttaggaattgtgtttggtattttatatgtattattttatttaatttttatgatttttttatgaggtaggttttattgttttttatatttgataattaaggagattgagttttaaggaggttttgtttaatattatagagttgattagttttagagtttagatttgagttcgtatttagttttaaaattttgttgttatattaatttgtttgtgtaggttttttatttatttgtataatgttttttttaagaataataatagtaggtattatttgtttagggtttttggttatttagatattgtgataagtatttaatttatattttggtattgaattattaaaataagttttaaggttaggtatggtggtttatatttgtaattttagtattttgggaggttgaagtaggtggattatttgagtttaggagttttagattagtttgggtaatatagtgaaattttatttttattaaaaatataaaaaattagttaggcgtggtggtatgtgtttgtggttttagttatttttgaggttgaggtgggagggttatttgagcgtgggaggcgaaggttgtattgagttaagattgagttattgtattttttagtttgggtgattaagtgaaattttatggtaaaaaaaaaaaaaaaaaaaaatataagttttggaggtaattttgtttttgttttatagattttgaaattgaggtttagagagtagaagtagtttggttaaagttatataattggtagttggtaaagaagttggttttgaatttagggatattttgaaagttattgttgtttttatggattttagttatttaaaagattttttattttttataagattttaggtagatttttagggtttaattgtttttttgaaaataggttttagatatatttgttaaaggtatgattaggtgtttaaatatatattatgagaaagggattttatgttttttaattttgtttagagatgtagagatattattatttagggagagatagttagaaattaaaataagatgttagagataggtggttgatagtgatagatatagttatattaagataggtttaaagggaggaagattgaggggaagttagagatagagagggatatattaggttaaagaatgagagagatagttggaaaaggagataataggagtagaggagggtataggttgatatgaaaaaatatcgatagatatattttagtatgtagatagatatatatagatttatttgatttttataagaaatagattgtgaaagtaagtaaggtttaggttgtgtgtggtgtgcgtatgtgtgtgtgcgtattgtggggggagtatgtagagtttgtatagttacgtatattatattagttgtttttagtaattttatttgattaataataaatgttttataattatagtcgtttttttagtttttttttttgttttttgttagttgttgttagattagttttttataaattttatggttttttttatttttatttgttgttttttaggaggttgagagaatgtgagttggtggaggaggttatatttttaatttgaggagggatatttatttttttattttggattaatgttttttgtttttaagtaaaaagtcgttttatttaggttttatttagaatttttttattgtatgggtataatttgtgatttttaatatggtttaggggtttatatttgggatgtagagagatgaaatttttttgtttattttttatcgttagttggttaagtttttatttataaattttatttagttttagaattttgtaggtttataggaggaaggtattaggataggggtttttattttattattttaattttagatagttcgaatttttgtttatttgtatatttttaagttttggatattaggtggtttcgtttgttaatttttgagtattttttaattttatttttataagtttatttttttttaggttttttatttaagttcgttaaggtagttttattagaattagttgcggggttgtgttgatttgtttttaatcgttggggtttggtttacgtttgtttttagtttttaatattgattttattatttggaaagttattgacgttaggggtttggatgggtgttaaaatcgtttttttttcgggtttgggttagggtttagttttttatttcgtaattttacggaggggtttataagggttagtttatgggtcgaggttatatggtattttttttttgattttgggtttttttgtttttttggaattattgtgtagtttttttttggagagaggggttacgtaaagatttgggatttagaagttgggggaggttataaaagggagttttaagttttttattgggattttggttgagagtaggggttttgaagaggtaaggaggagggtagtggtttagaaaagggtagttgggaatattttgtgttttttgttatatttttattttggaatattttgaagttggttttgaaatggattttattgattatttggtttttatgtttgatattagttgtatttttagatttttttagaaggaaattttttgtagttatttaggataatagattattttaaatgttgttataatttgattaattggtattagtaattttataaatttttgttttatataaaataaaggtttttttttttgtgtattttttatttatgttgttttagtttttttatatttatatatttttttagttttttttggcgttggatgtgtgtttttttttttttgtttttatttgattaagatgtagttattgttatattggtttacgttagtaatttttgggttttggttggatagagtatttttaggattcgaatttcgtgtttttagataggtattaataattaatatagatagtttgtggtgtttataatagttatatagttttagagtttagttttggaaggttagagatggggtttatttttttagttagagggttagagatggggtttattttttcgagggaatttttttttgtttaagaaatttatatttagagggtaagggacgtgtttattattatatagggaaaaaaggattttattttttataaaattttgaggttgggaaggggtaggatgatttttgatttttgttatagaatcggtgtgattgttttgttttagttttttttggtttagatttttttaaggaaggagtttattttttgtattttttttttgagtgaaggaaagttttttttttattttagtttgtaaattagtttttttttgagttaaataggggtgtaggataggggatgttgggttttaaattataaattttagtagtttttttttttttatgatttgttttatttagtgatttatgttttaatatttattgagtatttattttttgttaggtattgtatagggagttaggtatatggtcgtgtttatagggagtattcggtttaatgagatagaaaaagatgtattattgtttatataagaatgtttttttttggtgtacgaggtttgtgttaagggtaggtaggtatagggtgagtaagggagatttagtttttgagttacgtagagtttagaggtaattattgtgtaatttttttgggtgttacgtggggaaagtataggtaggatatatggtggggtatattgattattttggggtttggagaaatttgtttttttataggttaaggattttttagtttgtttttaagtttaagacgggttttcgagttgaatataagttattattatagtttaattttagtttttgttattgtagttttagttttagtttttgggagttggttgtttatagttatagggtttaatttttttttaacgtttgttttagtttttttttttattttttggtttttagagtgtttagttttggtgatttttaatcgggtatagttttgtgttttgggattttttttgttttttgtagaggtaaaagggattgatgattttagtgttttttatttttagggattatttgtttttttagtttttttttataggaagttgagagtttttgtgggtttggttatttagggttataggagtttataaagttgaggttttttttattatttttatttaatggtgggtttggaggaggggttagtttttattttttaggttttttgttttttaggacgttttaaattaagtatatatggttttttttaatttatttgtattttaaagaaaatttattttatatgttttcgatttatttatattttaattcgttatgggggggtagagagtaggggtgttttgtttttaagttttttatttcggttggagagcgtgtgttttttttaggacggggagtagttatagtttagttattttagtattgggagggatcgtagggttatgtttttattgtgtgggtttttatgggggaagatagtatattttaggtagttttatttattgatgtttatagtagtagagtacgtaaagtttagggtagggtttttacgggagttagaattttagggttggttgtattttaggttttttagggttattgtttttttggggaatagagtggggaagtttaggtatgttttggagttaggataagggtttaataggtaattttagagatattgtgagatacgtataataaaatatggtttttatttttttttagttagggtagagaagagaagagagggtgggatttcgtttttttttttagttattttttttttatagatttgaggttgttattttttttataattatagatttaatattttggagtagtcgtaggagttaaggtttgttttttttaatttttatattttttttattttaagaatgattgagatgtgtgtgtgtatggggcgggggagatgttttgggaggataggagttttattttttttatttggtttttttttattatagaagggatgtttaaaattatttaagggggatgggtatgtattgatatggtatacggagaaatttaaaggtttatattatttttgtattaataatttatttagatttttttgttaagagtttagtttttttatggaaggaaagtagcgaaatttgattgggttagtttttattattatttttttttattagtttatagtttattgtgagggacgtgattaaatgtgtgtttttttttttttttatttttggaggggatagattttgtagtagtttttgttttttattttaagtgtttcgatatttattataaattaaaggaaagtatgggtatatttgattatgagttttaagttttattgggattgtgaatgttataattttagtgtggatttgaatgtgagtttaggatgatagtgtgagtttaatttaagtgttacggtttaatgtttatttaagtgtgaattttaagatgtaagtacgggtttgagtatgagtttaggttttagtacgtatttgattgtaaattttagtgggtttgaatgtgagttttaggattgaagtgagagagtttgtgagttttagtatttttgtataagttagtataagtattagagttttagtgtaagtttgagtgtgagattttggttataagggtttttgagtatgagttaaggtggtttatatggagttttagtgtgagtattggtatttttttttaagtttgagtgtgagttttaaagtatttttgtaagtttaagtgtgaatattagaattttattgtgagtttgagtgtgagttttgagattttaatatgaatttgagtgagttataggattttaagtgagttttattaagattttggtatgagtttatgtgtgagttttaggttatttatggaggtttaatttttaaagtttttatatgaatttaagtgtgaatttaaaggttttagtgtgaatttgagtgagttttagggttttcgtgtgagttaatgtgatttttagtttggaaatgtgaatttgattatgaattttagtgtttttagcgagtttttgagtttaaatgtgagttttatgttttttatgcgagtttgattaattcggagttttagaatataagtgtgaatcggagtgagtatgagggtttttgtgtgagttttagtgtgagttttaggattttagtgagattttgggtgtgagttttaggttttaatgtagatttaagttaaagggtaagatcgtgaatttaagtatgagtttatagttttagtgtgggttttagtgtgagtagagttttaatgtgagtttatgtggaaattttaggattgaagtgtatttttggatatgagttttataacgtaagtgttagtttatatgaatgtaagtttttagattttagaaggagttgaagtgttttagtgtgtatttgagtatggattttagagtttttagaagttttgtgtatgaattttaaatttttagtttttgtgtaggtttagggttttagttggagtattagttttgatagtgtgaattttagttttattttattaatgttgattaggagtttttggtattagttgagaggatttgtgtgggttgtgatagtggagatagagaggtatagtttgagatatttaggtttttttagtttttaagttattgttagttttatatttttgggaatttgtaatggtttaagttttatttttatacgtgtaatgatatattattatatttagagttagatatataaaaatatatttggtgttttaggtttttcggatatatagtaattatagatgtatagatatatttagtattttatattcgtattattttagtgattatagttatataaatatttttagtgatatagatataaatttattaagtattataggtagaataattagtgttagagatatatttttatagcggtatgtagatatatatttaatgttgtagataagttgttaggtatatagatatatatagacgttttttaaaaagagagattagacggaaagaaagaaaattttgaatttttaataaggcgtgaaatagttttgttcgtttgaagttattggaggggggagggggataagggagcgagtaagcgagcgagttaacgttggaggagaggttcgggagaggagaggagtcgagaaagagagttgttcgtttggtgatttttttacggtttagtttttacgtacgcggagatatattattcggagtaatatagggatatttagattggtttatattgagtcgtattggaggagatatatacgagtagatttataaagagatatttggggatatattataggtagattcgtataagttaggaagatttataaagagatatattggaggagatttattatatggagatatatttaggcggattgaagagaaaattatggggacgtcgatcgatatatatatgtatatatatacgcgcgcgcgggcgtaaggatttatacggatatntagtaaggtagacgcgtaatcgtcggttcgtattttcgggcgttttgaagtttagatttttgttcgagaaagaagttattttgggcgcgtaaaggttattacgaatttttttaaatttaggaatttttttagatttcgcgcgtgtagttgaggggtggggagaatagggatattaggataaatcgtcggagttatttttttttagtttatagtcggttttattattattattacgtttaattttcggagcgttcggacgtggggggtcgtttttatagcgttttcgttttcgtacgtatgagggtcgtcggtttgttggttagttcgggttttgagggttcggtcgcgcgtatttcgtcgtagggtatttatcgcgttttcgggttattcgggtttcgcgtcgcgtttttcgatcgttttcggtagcgagcgaggtagggagcgcggagttagtatcgttcgtcggattttatcgtcgagtttcgcgtcgcgtcggttggagtcgtcgttttcgttgtcgtcgtcgtcgtcgttcgttttgtatcggttttttagcgttcggcggttttaatttttttatttttttttttttttcgcgcgttttttttttttttttttcgtttatgtgatcgcgggcgttcgttcggtcgcgcgcgttttcgttttttttttttttttgttttgttttttcgcgttttcgcggtcgcgcgttacgattttttttcgttacgggtttcgcgcgttttcgttttggtacgttttcgtttttggtatacgcggttcgttcgttttgcgcgggtttgtgagtttttatttttattcgtttagtattggtacgcgttttgttttttcgttggtatattcgttcgtattggtacgcgtggttttttcgcgtttattttttttcgggcgcgtttttaagacggttgtggttttcgtgttttacgcgtagtttcggtcgcgggtttcgtaaacgcgcgcgcgtatatatatatatatatatatttattcggttcgtttttttagggcggttgggcgcgtatttattttcgggatcgtttttttatatttattttttttttcggttttagttaggttttttttgcgtatattttcgtacgtttaggttttgacggtttcgtatcgattttttggtatatttcgggttaattttcggggtttttttttcggcgtcgtcgtgagaggaacgcgagttagaatttttaatttttattttgggtagaagaagttagtcggtttcgttttttttttattgttattgtttttcgtaacgatttttttttcggttattttttcgcgcgggggaaaggggtttttttgatcggggatggattttgtcgggagtttaggtttatgtttttagtgttttcgatgatattaatattattattcgtatgtttttcgcgtttcgaggatatatagtcgggggagaagtttttattggaatgaaggggtagggagggtgtatttttaatgtcgggtataggcgtatttttcgataggaggtttatttttttcgtagtttgggtttttgaggggtcggggtgtttattgtattcgtttttgggttttcggtttggttgtaatataggagagtaaggttggataatttgattaatttttgaggttacgtgaaagcgtaatggagtggtaatggtagaggtagagatcgagaaagttattttcgtttttattttttggatttgttatttgatttttgatttataattttgggttttgttttttcggggagttgttttagggttgagggcgaggagaagggagggaaatgtttttatgtttttttatatttttttttagtaggttgtttagagcgttcgggtttttttttaataaatgttttagggatttttattgtagaggaaaattttttttttcgttacggtttgggttttttatttttattttcgtggttatagaattttttttttataattggtaggggtcggtatgggttggagtttagagacggttagttaggattttaggatatatagtaaattagttgcgtttcgttgagggttagcgtatagtcgtttatataaggtgtttttttttcgggttttttgggtcgtcggttttttgtttttcgtgtcgtagatcgggattagattgtggacgcggggaaggaagggggcgttgcgacgggattttgaggggagtaggatttgtttttgtttttgcggcgaagttttaggttttggtaaggttcggtatatcgggggtcgtttttttttagggggttgatcggtttcggcgttttaattcggtcggggaggggcggacggggtgaaaattggcgagtggtttggggaacggatttgatttttagatgttttggtgtttttggtttagtttttttttgttaggttgggagtagtcgggaattttgtttcggtttaacgtttttttcggttttcggggacgtagaggttgttgtcggtagagtagtagtttacggttgcggggataagattcgtattgggagttcggggttttggaagtggacgtgtggatgttagacgataaaggaagggaagaggcgtacgtcggatttttgtttaggcgttagtcggttagtagtttttttcggcgcgggatttagcggtttcgagcgttttttcggggtcgaagcgatatttggcggacggtgcgggacgtgcgtttttttttggttgttgtttttgtttcgcgttgaggtttcggttatttattgaatatcgggggttgttatttttttatatagtcgttattcggtttataattaatttttttgttttttagagttgggttaatagattagtagtggttttcgtttttgtcgtttttgatgttttatttatatagtagtttttgagtttgtaagttttagtgttgagttttttttatcgtttgggggtaaagttgagtttgtta

SEQ ID NO: 431 - DNA, 10133 bp, Artificial Sequence
  chemically treated genomic DNA (Homo sapiens)
aaatatgtatgagttttgaatggaaaaatgagtgaatagatttgaagttgggaatggaagaaaaggaaattagggtgttttgttattataattaaggtagtaaggaatataattggcgataatttaagaagtttatatgggaagggtaggagttcgtattatttagttatgtttttttaaaagttaaataattttatatattatgatatatgatgttgttataattgtgtatagagaagttttatttagtagtatatgttaagtaaagaagttaagtcggaagatggttttttagttttagaatagtagtaggtaattaataaataattgttgtattatttttatttaatatgtgagaattggtttttttaaaaaaaaattagtggatttattgtttaataaaagagttgaattaataattgtagatattggaattattttagtaaatttaaaattatttttttttattttttttttagagaattttattttttattgttttttgagaatggagggtaaaatgtgttttaaagttataagatatttcgtgaaagtattataagtatattatggtattattatgtgatattgtttttatgagaaaagagttatagaataggtagaaatttatttattgggtatatttttttaaattaaatatataaagaaaatatgtatttataaagatttataaggtagtgaatagttatttggtaaaagtatttattttggttattaaaaataaatttttttttagaaatatattagttatataaagtagagttcgtttgtatttacgttgtttagagagtgatgcgtttggttatttggtgttaatttgggttatacgtgaaaagatattttttttttttagtttatttaaaagttagtagataattttggaagtataattatttttttaggttgttttttaagggattttttagtttattaaaaatggattaatgtgatttattaatatagttttaaatgtagttagagagtaaaaaatatttttttagtgttttagttatttttattttttaaagttgattttttgtttttttattttggtaagaattttgttgttttttggttaatttaaaaatatttaaaagatagtttttttattattaggtatatggtaggaatttgatatataaatgttaaatgaagttttttttattgtatgtattatgttttatttatagatttgttaagtataataatttaagaatattgaataattagaatgtgagtatttgaatttttttttttttttttttaaaatatttaatataggattttgtaaatattatttatatatgtatatttgaatatgtgagaatttgtatatgtatatatagatatgtagttttattagttgttgagttagtttagagtatttttgattaattaattttgggggttatttgttatagatttgattgttttattgtatttggagaatattaatatttttataggaatttaagggtaggaaaatattatttatgttgattttgatggttgtttagtatgttagttttattttattttttaatttatttttatttgtagagatgggggttttattatgttgtttaggttatttttagatttttggttttaagagatttttttgttttggcgttttagagtgttgggattataggtataagttataatatttggtttgtgtgtttggttttatatagttgttatagttgaaaaattgattggtttgtggttgttgagttttataaatagatttttatttaaaattattaataagttattttaatattatattgttgttaattgaaaatatttttattgtttagatggtttggggttttttttagttgtaatttgtttttagtttgatttgttttaatattgtttatttttttttagttgaaagttatgggtagatttaaattttaataatatataaggtagtgggaaatgaaggtttaagagttaagtggaatttattagattttgttatttatgagatggaagatttttggtttgttatttagttttttaaattttattttttttaggtataaaatgaaggtaataatggtatatatttttcggagtcgttgtcgggattgtgttagagaatggatgtaaaaaatttggtttatagtagttttagaaagtattagttgtagtcgttttttttttttgggattaataattcgaatatttatatagtgtttgtagggagttgttttttaatgttaatttaatatttgttatataatttaaaatatgattttttatagtttgtgaggttttgtgtgatttagttttgttttttttgttagtttttcgttcgttgtttgtttttttttatttgatgtttttgagtaaattggttttattattttttttttaatttatcgtgtagtttttatttgagagtttttttagagatttttgttttatttagatagtagaatattttttattttgttttttatttgtgtgatttttttttaatttttatgtattatttatatagtaggattttttttaatatttttttttaagattatgtttttttttacgtttttatagtagttagtattttttttttttgattttgttttgttatttaggttagagtgtattggcgttattatagtttattgtaattttgaattgttaggtttatgtaattttttttttttaattattcgagtaattgggattgtaggtatatgttattatatttagttatttttttttttttagtagagataaggttttgttatgttgtttaggtttgttttgaatttttggttttaagttagtatgttttttttataatagttattatatttttgtagttgtttttataatatatatatatatataatttgtaattatatattgtacgtaattgttataggttgaataatgtttttttaaaatttatatgtgaagttttagttattagtattttagtgaatttatttgaagatagggtttttaaagaagtagttaaatttaagtaaaaaaggagtttattagggtggattttaatttaatttgattgtgttttttaagaagaggagatgaggatatatagagagagatattagggatgtgtatgtatagagaaaggttatgtgaggatattgtaagaaggcggttatttgtaagttaaggagaggggggttttaggagaaattaaattttttgatatattgattttgaatttttggtttatagaattgtgaaaaaataaatttgtgttgtttaagttatttagttcgtcgtattttgttatgggaatttttatcgattaatatattatgtaaggtttgtttttttttattagattgtgaattttataagtagagggattatgtttatattttattattaaatttttagtatatagtttaatgtttggttttaagtaggagttaatatatttttgtttaatttttgaatttatgaataaagaaataaatgatgtaggggtatgtttattttatgttgaaagttttgtgtgttttgggttttttagtgtttttttattatgaaattgacggaagatatattgagtatttatttggggaaggtaagaatattttataaagtaagtgttaaattttgtataattgaaagggttttgaaatgtacgattttagtgtggaatatgggtagtttaggagtaagagttttatagttgttgttgtggtttgttatttttttatgggatgtagtgtttataatagtaaggtgtagttgtatatcggtgttatgttgtaagggttttattgtttttttttagtattttaggataatgttttagaattgggaattttagtgtgatgttgggttttaggaatgtgttatggttttaaaggattgtttgagtgagttttaggtttagattttttattttattaatattaagtgttttaagttagtttttaggttttttgggaagttagatgttatttaggtatttataagaattattttgattgatgtaagttgattttttagggaaatttaaaggtttttaggatgtatttggagttgtaggatatttgggagtttatatatgtttttaggtgtatggagattatgcggttatttgatttgaaggataagaaggtttttatttttttttaatagtatttttttttattattaggtggttaaatgtttaaaattttattattaatatgttatttttttaggttagtattattatatttggttgttttttttgtaaaacgaatttttattttattaattgtttagtatatttagttattagtatattatgaattagtttattaattattttttttagatgggtttgatttggtttgagttataagaggggaaagaggataaagatatttataggggaaataagataaaggatataggatataggaatagaggacgaagatatttataggggaaatagattttgaatataaattttgttaattttagtttttttagggtttaggtagtatgattataggttatttatgtgtttagattatgtttatttatgagtttatttacgtgtttagatttatgaattatgtagtgggattttagtatttatggtattgaggaagggtattgttataaagttgtggtagttttttagttgtagaaggtaggtaataaaaaagtattttttttatgttggttttttgtttttttttttttatgggttttataaatagttaatttatttaagttggaaggagaagttttttgtttttagtaaagtttgatttttggaggtagattttttttttaaatttagtaagtgttagataattggaagggtggagtaacgttgtaaattatgatatatttttgttaggatatgtttggaagtaaagagttgaaagaaataaggtggagagaaagaaaagtgaatatttttgaaagattatttagttttaatatattttggttgggtttggataaaaaaaaagtgagtattgtaaatttttagaagaaaatattaggagaagaaagagagagggggatttatttaaagttgtttttaatttttttaaaattttaaattaggtaagtaaataggaagattgatttttttttttttttttgagattttgatttaaggtttgttatttagaaattaaatgtttattggagaaaagaagatgaagttttgtagtttttagtattttggttaaagtgattaattggttataaaagatgattttggtgtatgtattttgtttagggtaggttttttaaaggaaataagtggggaaaaggagaaggttgaaggttggttaaaatatagcgggttttagaggtaagatttttttgtattgtttttagtattgtaaaatgatttgtgttgttttatttagaatatgatacgggtttataatttttttttttttaattttagttttttttttcgttattttgttttttttttttttttgtttttttttttattggacgaagagaataatttaggggtgaagttaaagtataggtaagggggttttttagaaatagtttttgtgttgattgggtttttttgattaagttatatatggtaaatattgttgtttattatgttgtaaaattatttttaatttaaagaaaagtaggatttttgaaatgatttgattaatttagaaattttgtaggattaaatttagaggaataaaaaaaggaagaaaattgtttttcgtatatatatttttacgagttaatttgggtttttttttgttaaaaaaatttattttgagatgagaattattagtttagatatttaagtggatgacgttaattggtaattgataaattattattttattttttgaagtggaggtaaaatttttggtatatttttttttttgagaagtagttaattagtagtttaatagtggatttgtaaaacgtagtaagatttttaaaaggtatttatttgaaaagtagaatagtttttttttatttttatatgtttttttttagagttaaggtatagatttgttagaattaatttaagatagatgtttatttttatatagatttattttagagatttagaggtgttttgttttatttttaggttttgtaaaatatttatatgagtttgattagagtttatataggaataattaaagtgaatagttttgttttaagtttgtatagaaatttattagtttgggtaatatggtaaaattttgattttataaaaaatataaaattagttaagtatagtggtgtgcgtagtggtgtatatttatattatattaattttatttttattaaaaatataaaaatataaaaattagttgggtgtggcggtgtatgtttgtaattttagttatttgtgaggttgaggtaggagaattgtttgaatttaggaggtagaggttgtagtgggttaaggttgtgttattgtatttttatttgggtaatatagtaagatttcgttttaaaaaaaaaaaaaaataggaaaaaaattttttagattggtgaaattgatttgatttaagaattaattatttttttagattatgaaaaataaaaagaagtttgtgtttatattgtttgttttatttgttattattaatagtggtaggatataattgtaaataaattagtataattataaagttggtgttttattttatttgtttttagttatgaaaatttaggatattaaatgtagtaagtagtaaatttatttttggggtgttatagagataaagtttttaagatatttaattttagggtattggtttttttggtattaaattgttgggtttttttgtgttattaggttaatagttagtggatggttttttaatattttggtaattttgttgttgttttgttttaaaatttaaagtgtatagagaatggagtaatagaagttataaaaatatttgtaatttattagtagagtataggaatatttgtttttaaaataaaaaataaagagaaaaatatttagtttttttattttttttgttgtattaagaataaagtgttttatgtgttattagaataagataatgtgatggtttaaatttaaatgtgatggtaaatagttaacgtgatggtttattgttattaatagtggtttgtttttgtgtgtgtgtgtatgttagatagtatcggttgaatagttttaggtagacgtgatattatttaaataaaggggaaaggaaaaaatttataaaagtagaaaaatgatttaaaattgtgtttttttgtttagaaaagtgatatgggattatttttatatttttataaaaatattagttataaaatagttataaagtaattttttagaattatggatggaaattagtataattttggaattgagagtttgaatgatttgtttatttttagttttagtgaagtggtttaaatatttgagaagttaaaaattatgttatttgatagtgtttttattaagtaggatttttggaagacgaatatattggtgaattttgttaggataggtaggtttaggtatgtatttgggtaggaaacgtttttttttttaacgttatatttttaaaaattattagtatttaaaatgtgtaaaaaagaagttttgggaatatattgtaggttttatgggaagattttagtttaggtttgtgttttacgttattattttttatttaatataatttatttatagaaagtttttttttatatttcgtttaaaggaattagttttttaatacgtatttggtattttagattggttgtggaatatatagatattggggtggttttagattgagagagaggtatttatttgtatttgtttagagtaggttatatttataaagtattttttaatgaggagtttttaggttttgaaggagggtatttgatttttaagtaggttattatttcgtgttttttggaagttggggaatttttagtattttattgtagaagttaaggttttgttattgggatttagggaaaagatggagggtttagaaatgtttgttatgttttggataaagaaagaataagtaaaattttttaggtttgttgtttggagattgtatttttagtaaatagagttatgatttatttgtttaaatggttgtaagtcgaattttttcggttaattttaaatgtatagttgttagtagtaatttttattgaaagattaaagtaagtaataatttgtaggaagtaaaagttttcgtggattgttataaatagtttattttaggataatattttatattagtttaggtattattttagaaagttagttatttttttattgattgttaggcgtatttaaaggtttaatttttttaaatgttttttgatttatagtttattatttatttttttaaaagaaagttagagaaggtttttagaggtattaaattgatgtttaaataaaggattgtaaaggtgtttagttgtacgtaggtttgtatgatataagttatataggttatagttggaatgtagatagatttattggttagatttgtttttgtaatgaggttagatttttttgttaaattgtgtatgaagttttttttttgggttttaggaaatatatttataaagatattttttggttttttagatttagttaggattttttttattgtgttttattttttgtttcgagttgtgtttgaaaaatattaacgagtaagaagttggtatatttattagggtttgaagttaagtgtacgaattttggttattttattagatcgttgattagttggttttatttggttttggtttttattagggaagttatttagagttatagtatgatttttacggtttttagatatttttgtttttgtaggtttttttttttattaaaaaattttttaaaattttattttataattgtattggtataaagaaggatataattttgattagattttgattatttttttttttgatgttaaaagtaaatattttgtgagttttaaaatgtgttgtgggtttaggtattgtgtttattttgtttattgggtaagtcgagtttgaaggtattaggtagagattggaaggagagttttttaagtaaggggtatttggtaaaagtagtgtgttttagtattttagaatttagttttaattataattaaaaaataaattagaaggaagagaaagttagaggaagggagagaattatagggtaagttagattttaggtttttttagaatttggggttaggtagtatagtaagaagagaagagtttagttgggacgggatttttgttgtgtatttttgtgtgtttaagatttgagtttttatttttattatcgtttggtaatagttttgttttatattatttatgttgagggatatagtggataagattgtattggtttttttttttagaagtagagtaagaatgaagggagaatataaaaaatataaatatgtatttttttatatgtttttatagattttataggtttttttgaattgttttttatatttatgtttgtagataagtatatgagagtcgattatagtgaatgttttatattttgagaagagtaaagttttatataagtacgataaatataattatttttattttgatttaaatttattaagtgttatttttatttttagatttttaaataatgaagtatgaatgttttatatgtatagagttttataaagaatattgaatattatgggagatattaaaatgaattagttgatagtattaagtattttgatagattttttttagttatttattattatggaaaagaatggaggttttatagttaaataaaggttaggatatttgatttgttatgtaagttttttgatgtttagtagggggtaggttgattaattagatattgaaaaataagattttagtataaagaaatagaatttaaagtggaataattaaattaatttttattatatttgttataagaaatgggaatgatttataaaaaatatttacgtgaaagaattatggtttaaatttttgaaattatgtttttggttattagttttaatagtggggatttataattattaaaaataatgataagtatgattattatggtttttgattttttttgtagg

SEQ ID NO: 432 - DNA, 10133 bp, Artificial Sequence
  chemically treated genomic DNA (Homo sapiens)
tttgtaggaaaaattagaaattatgatagttatatttattattgtttttagtaattataggtttttattgttgaagttgataattaaaaatatgattttaagaatttaaattataatttttttacgtgaatattttttatgagttatttttattttttgtaataggtataatagaggttaatttaattgttttattttggattttatttttttgtgttgggattttgttttttagtgtttagttgattagtttgttttttgttgagtattaagaggtttatatagtagattaggtgttttgatttttgtttgattataaaatttttatttttttttatggtaataaatagttgaaggggatttgttaaggtatttagtgttattaattaatttattttaatgttttttataatgtttaatgttttttatggaattttatgtatatgagatatttatgttttattatttaagagtttggaggtaagaatggtatttgatggatttaaattaggataaaaataattatatttgtcgtatttgtatggaattttattttttttaaagtatgaaatatttattataatcggtttttatgtgtttatttgtagatataagtatgaaaaatagtttaagaaagtttgtaaaatttatagaagtatgtaggaaaatatatatttgtattttttatattttttttttatttttattttgtttttgaaaaagaaaattagtgtaattttgtttattgtgttttttagtatggatggtatgaggtagggttgttgttaaacggtggtggggatgaaagtttaagttttaaatatataggaatgtatagtaagggtttcgttttaattgggtttttttttttttgttgtgttgtttggttttaggttttgaaaggatttgaaatttgatttattttgtggttttttttttttttttaatttttttttttttttagtttattttttggttgtagttggaattgggttttagaatgttgaggtatattgtttttgttaggtgttttttgtttgaagagttttttttttagtttttgtttagtgtttttaggttcgatttatttagtaggtaaagtgggtatagtgtttaggtttatagtatattttggggtttataaaatgtttatttttaatattagaaggaaaaataattagaatttaattaggattatgtttttttttatattagtgtagttgtaaaatagaattttaaaaagttttttgatggaggaaggggtttataaaggtaaaagtgtttagggatcgtgaaagttatattgtggttttgggtgatttttttgatggaaattaagattaaatgagattagttgattaacgatttggtggagtaattaagattcgtatatttagttttaggttttagtaaatgtgttaattttttgttcgttggtgttttttaaatatagttcgaggtaaggaatgaggtataatggaaaaaattttagttggatttgagaagttaaagaatgtttttataggtatgttttttggagtttagaggaggggttttatatatagtttaataaaggagtttagttttattataaggataaatttgattagtgaatttgtttgtattttagttataatttatatgatttatgttatgtaaatttacgtgtaattggatatttttgtaattttttgtttaagtattagtttgatatttttgaaagttttttttgatttttttttaaaaaaataggtaataagttgtggattaggaggtatttggggagattaaatttttaaatgcgtttggtagttagtggggaggtgattagttttttaggatggtatttgaattgatatgaaatattattttgaaatgaattgtttataataatttacggaaatttttattttttataagttattgtttattttgattttttagtgaaagttgttgttgatagttatatatttgggattggtcggaagggttcgatttgtagttatttaggtagatggattatgattttgtttgttaagaatatagtttttaggtagtaaatttggaaagttttgtttgttttttttttatttaaaatatagtaggtatttttaggttttttattttttttttgaattttaatgataaagttttgatttttgtagtaaaatgttaaggattttttaatttttagagggtacgaagtgatgatttatttagaaattagatgtttttttttagggtttgggagttttttattggaaggtattttgtggatataatttgttttaggtaggtataggtagatgttttttttttaatttgaagttattttaatgtttgtgtgttttatagttaatttgaggtgttaggtacgtgttgggagattgatttttttaaacgaaatataagaggaaattttttataagtgagttatattaaatggagagtgatggcgtggggtataagtttggattaggatttttttatgggatttatagtatatttttaggattttttttttatatattttaagtgttgatagtttttaaaagtgtaacgttaggaaaaggaacgttttttgtttaggtatatgtttgagtttgtttattttagtaggatttattagtgtgttcgttttttaaaagttttatttaatggaagtattgttaaataatataatttttaattttttagatatttgggttattttattagaattaaggatgagtagattatttaagtttttaattttaaaattatattaatttttatttatagttttaaagggttgttttgtggttattttatagttaatgtttttgtgaaggtgtaaaaatgattttatgttatttttttaggtaagaagatataattttaaattatttttttatttttatgagttttttttttttttttttatttaaatgatgttacgtttatttaaaattatttagtcgatgttgtttaatatatatatatatataaggataaattattgttagtgatagtgaattattacgttaattgtttattattatatttgggtttaaattattatattattttattttaatgatatatgaaatattttgtttttgatataataaagagaatgaagaagttaagtatttttttttttattttttgttttaggaataaatgtttttatattttgttaatgaattgtaagtatttttatagtttttattattttattttttatatattttaaattttaaaataaaataataataaaattgttaaagtattagaaaattatttattggttattgatttgataatatagaagggtttagtagtttgatgttaggaaagttaatgttttggaattgaatattttggaggttttgtttttgtaatattttagagatgggtttgttgtttgttatatttggtattttggatttttatgattgggagtaggtgggatagggtattagttttgtgattatgttggtttgtttatagttgtgttttgttattgttaataatggtaaatgaaataaataatgtaaatatagatttttttttgttttttataatttgagaaggtggttagtttttaggttaggttagttttattaatttaaggagttttttttttatttttttttttttttgagacggagttttgttgtgttgtttaggtgggagtgtagtggtataattttggtttattgtaatttttgttttttgggtttaagtaatttttttgttttagttttataagtagttggggttataggtatgtatcgttatatttagttaatttttgtatttttgtatttttagtagagatggggttagtataatatgagtgtgtattattacgtatattattatgtttggttaattttgtattttttgtagagttagggttttgttatgttatttaggttggtaagtttttatgtaagtttgaagtagagttgtttattttaattgtttttgtgtaaattttgattagatttatgtgggtgttttgtagggtttaagagtaaagtaggatatttttgaatttttggagtgagtttgtgtggggatagatatttgttttaggttagttttgatagatttgtgttttagttttaagagagaatatatggaggtaagaagaaattattttgttttttaaataaatattttttaaaaattttgttacgttttataagtttattattagattattgattaattattttttaaaagaaggaatgtgttagaggttttgtttttattttaaaaagtaaagtgataatttgttagttattagttaacgttatttatttaggtatttaaattggtaatttttattttaaagtgaatttttttggtaggaggaaatttaagttgattcgtaagagtatatatacgggaaataattttttttttttttttatttttttaagtttgattttgtaaaatttttgaattaattagattattttaaagattttatttttttttagattagaggtaattttatagtatggtaaatagtaatgtttattatgtatggtttaattagagaggtttagttagtatagggattgtttttagaaggtttttttatttatattttaattttatttttgagttgtttttttcgtttagtggagagagagatagagggaagaggagagtaagatagcgagagaggaaattgagattgggagagaaggaattataagttcgtattatattttaaataaaataatataagttattttataatgttgaaaataatgtagaaaggttttgtttttaaagttcgttatattttaattagtttttagttttttttttttttttatttattttttttgaaagatttattttaagtagaatgtatatattaaagttattttttataattaattgattattttaattagaatgttagaaattatagaattttatttttttttttttaataaatatttaatttttaaatggtaaattttaaattaaagttttagagaaaaggagaaaggttagtttttttgtttatttatttggtttgaggttttgaaggaattggaaataattttgaataaatttttttttttttttttttttttgatgtttttttttagaaatttgtagtgtttattttttttttatttagatttagttaaggtgtgttaaagttgagtgattttttaaaaatgtttatttttttttttttttattttgttttttttaattttttgtttttaaatatgttttgataaaggtgtgttatggtttatagcgttattttatttttttaattatttgatatttgttggatttaaaaaaaaaatttgtttttaggaattaaattttattggaggtagaaagtttttttttttagtttaggtagattaattatttataaggtttatggggaaaaggaaataaaggattagtataaaggaaatgtttttttattgtttattttttatagttggagaattgttataattttgtggtagtatttttttttagtgttatgggtattggaattttattgtatgatttatgagtttaggtacgtggatgggtttatggatgagtatggtttaggtatatggatggtttgtggttatattgtttgagttttagaaaaattgaagttggtaggatttatatttaagatttgttttttttatagatgttttcgttttttgtttttgtgttttgtgttttttgttttgttttttttatagatgtttttgttttttttttttttttgtgatttaagttaggttaagtttatttggagaaaatagttggtgaattaatttataatatgttaatgattgaatgtattgagtaattggtggggtaggggttcgttttataaaagaggtaattagatatagtgatgttgatttaaaagagtgatatgttagtgatggaattttaggtatttagttatttaataatggagagaggtgttgttgggaagggataaggatttttttgttttttaaattaggtgatcgtatagtttttatatatttaaagatatgtgtgggtttttagatgttttgtaattttaagtatattttggggatttttagatttttttagagggttaatttgtattaattaggataatttttatgaatatttggatagtatttggttttttagggggtttaaagattagtttgagatatttggtgttggtaaaatgggaagtttgaatttggaatttatttaggtagttttttgaggttatagtatatttttgggatttagtattatattgggatttttagttttgaggtattattttaagatattggaggggagtagtggggtttttatagtatagtatcgatgtgtaattgtattttgttattgtgggtattgtattttatggaagggtagtagattataataatagttgtggggtttttgtttttaagttgtttatattttatattggagtcgtgtattttagaatttttttaattatgtagaatttgatatttgttttgtaggatgtttttgttttttttaaataaatatttaatatgtttttcgttagttttatagtagaagaatattgaagaatttagaatatatagagtttttagtataaaatagatatgtttttgtattatttatttttttatttatgaatttaagaattaaataaaaatatattggtttttgtttggagttagatattaaattatgtgttaagagtttggtggtgaaatatgaatatagtttttttgtttatggagtttatagtttaatggaggaagataggttttatataatgtattagtcggtgagggtttttataataaaatacgacggattgggtggtttaaataatataaatttatttttttatagttttgtgggttagaagtttaagattaatgtgttaggaggtttgattttttttgagatttttttttttttggtttgtagatggtcgtttttttgtagtatttttatatggtttttttttgtgtatgtatatttttgatgtttttttttgtgtgtttttattttttttttttaaaggatatagttagattgaattagagtttattttgatgggttttttttttatttaaatttaattatttttttaaagattttatttttaaataaatttattgaggtattaatggttagggttttatatatgaattttggagggatattatttagtttataatagttacgtataatatataattgtagattatatatatatatatattataagagtaattgtaagaatatgataattattataaagaaagtatattgatttgaggttaggagtttaagataagtttgggtagtatagtaagattttgtttttattaaaaaaaaaaaaatagttgagtatgatggtatgtatttgtagttttagttattcgggtggttgagaaaggaggattgtatgagtttagtagtttaaggttatagtaagttataatggcgttagtgtattttagtttgggtgatagagtaagattagaaagaaagagtattggttattgtgagagcgtaagaagagatataattttggagaggggtgttaggaaaagttttgttatataagtgatatatgaaggttgaaaagagattatataggtgaagggtagggtggagagtgttttattatttagatggggtaagagtttttgagaaggtttttaggtggaagttgtacggtgagttgggggaagagtgatgaggttaatttgtttaaaagtattaagtgaagggaggtaggtagcgggcgagaggttggtaagggaggtaggattagattatatagggttttataggttgtggagggttatgttttgggttatgtggtaaatgttaagttgatattaaggagtaattttttataggtattgtgtgggtgttcggattattgattttaggaaagaagaacgattgtaattaatgttttttagaattattgtaagttagattttttatatttattttttaatataatttcgataacgatttcgagaggtgtgtattattattatttttattttatatttgagaaaagtaaagtttgagaggttgagtaataggttaagggttttttattttataagtggtagagtttaatagattttatttgatttttggatttttattttttattgttttgtgtattattaaaatttaagtttgtttatagtttttaattgaaagaaaataggtaatattagaatagattaggttgagggtaaattataattaaaaaaaattttaaattatttgaatagtggggatgtttttagttaatagtagtatggtattggaataatttattgatagttttagatagaaatttatttatagaatttagtaattatagattaattaattttttaattataataattatataaaattaaatatataggttaggtattgtggtttatgtttataattttagtattttgggacgttaaggtaggaggattttttgaggttaggagtttaagagtagtttgggtaatatagtgagatttttatttttataaataaaaataaattaaaaaataaaataaagttaatatgttaagtaattattagaattagtatggatggtatttttttatttttgggtttttataaaaatattggtattttttaggtataatagaatagttagatttataatagataatttttaaagttaattagttaaggatgttttaagttaatttaatagttaataagattgtatgtttgtgtgtgtatgtgtaggtttttatatatttagatgtgtatgtgtgagtagtgtttatagagttttatattaggtattttgggggagaagaaaaaagaatttaagtatttatattttagttatttaatgtttttagattattgtatttggtaaatttgtgagtaagatatggtatatatagtgaaagaaattttatttaatatttatgtattaagtttttattatatgtttggtagtaagggagttgttttttaaatgtttttaaattagttagaaaataataaaatttttgttaaaatgaagaagtaaagagttagttttaggaaatagaagtgattaagatattggaaaggtgttttttgttttttgattgtatttggagttgtgttaatgagttatattaatttatttttgatggattagaaagttttttaaaaggtaatttggaaaaatagttatatttttaaaattatttattgatttttaaataggttggggagaaagagtgtttttttacgtgtggtttagattggtattaagtgattagacgtattattttttgagtagcgtgagtataggcggattttgttttatgtgattgatgtgtttttgaaaagggatttgtttttggtgattagagtgagtgtttttgttaagtgattgtttattattttatgaatttttgtagatgtatattttttttatgtgtttggtttaaaggggtgtatttaataggtggatttttatttattttatgattttttttttataaaaatagtattatatgatagtgttatgatgtgtttatgatatttttacgaggtattttatagttttgggatatattttgttttttatttttaagagataataagaaataaagttttttgaaaaggaggtgagggaaaataattttaaatttattgaggtaattttagtatttataattgttgatttagtttttttgttggatagtaaatttattgatttttttttaaaaaaattaatttttatatattaaataaaaataatataataattatttgttagttgtttattattgttttaagattggaagattatttttcggtttggtttttttgtttagtatgtgttattagataagatttttttatatataattatgataatattatatgttatggtgtgtggaattgtttggtttttggaaggatatagttaagtagtacgaatttttgttttttttatgtgggttttttgaattatcgttagttgtgttttttgttgttttgattataataataaagtattttggttttttttttttttatttttaattttagatttatttatttatttttttatttaaaatttatatatattt

SEQ ID NO: 433 - DNA, 6686 bp, Artificial Sequence
  chemically treated genomic DNA (Homo sapiens)
aggttggagtgtaatggtgtgatttcggtttattgtaattttcgttttttgggtttaagtgatttttttgttttagttttttaagtagttggtattataggtttatgtcgttatgtcgggttaatttttgtatttttagtagagatggagttttattatgttggttaggttggggttttaaattttcgattttaggtgattcgattgttttagttttttaaaatgttgggattataggtgtgagttatcgcgttttgttaagttaatttttaagaagaattatattgtttttagatattaggagtagggagggatatgatagaaaagttgttagttatttagttgggagtttattttagtaggaaagatggggttgattttttatttttgattattagagagtagtagtgagaattggggttttttaatttaataatattttttatttagtgtattatttttagttggggtttggttgggatttggtggggtggttggagagggtttgggagttggggttatgatagatttcgtgttatttggggttatatttttagtttttttttttttagtttttaagttttttttttaggattggggtgggggtggtggaggtagcggttagagaatggggtgggattcgtttaggattagaaaataaagtttatttttaagagtttggaatgagggtttgttttaggggagaatgagggggaggttgggtttggttatggatatttgagggttcgggttatttggaaagaaaaggaaagggggaaggagagtaaaagaggtaaatgagatttagaaaaggagttttggagatagagggggatggagaaagtagcgaagaaatttggaagatagaggagggatgtaggggtttgaaaggaacgtaggattcgggttgggaagaaagagaaagagtaggggatagatgtttttttagatttttgttatagttagatttttttttttagtcgttgttttttgattttgttttttggttttttatatattttttagtttattttagttcggtttttttgtttatttttttattatagtagtttacgttgcggggattagttattattattttgttaagtttagggaatattttattttttattatattagttttttttgtagtatataattttttttttttttagtattattttttttttttgtatttatgattttttaattttttttatttagttttttttttttggttatttttgttttattttttttttttttatttagtttttatattttgagggttttcgaggtttagtgttagtttttttatattttttttttttatgttttttttgagataatattatttataattttagttttagttattattattttgggatttatatttgttttttttttgaatttttgatttaagtgtttaagggtttttttcgtatttttaattggatgttttataggttttaaatatttagtatggataaaatttattttattattttttttttaattttggaaaggaaggaaggagggaggaagggagagagggaaattttaggaggttggaggatttgggtttggggttaaggtatagaagagtagagttgtatttggaagttgaggaatttagtaaagggtttcgattgtgtaatgttaaagcgagggaagaagaagggtttgtatatattcggggtttatttttagattttgttttaggtttttttaataggaattgtgtagggttttatgatagagatttatggagagttttattttggggtttttattgtatttttatttttagatttcgtttttttgtttttttagatttttttttaggaattttttttttattattagtttagggttagaggtgggagtagagaagcgttttggagaattggagttgggggaagagtaatagaattttaattgggggttgtagtagttggaaagggtgatttcgatgtgtagggtaggggtgtatgttttttattaggtgtataatatttgggttattttttttaggtgtgttttttttttttgttttatattatggagtttagatggggtatttgaggagttttgagggtgggggttttttttttttttttttggtgttggaggggggtatttggggaaatttggagaaggagagaatttaagtttagtatttttttttttttgtttttttttttaaggaattttttttttttaattgttgatgattttattattttttgggggtgtggggaggagattttggtttttgtttttttttattttaagtgtcggataaagttttatattttataagaagttagagttttagagttttttaaagatgaggtggcgttttttttttttataggtataagtttttttttttttttattttttatttttttagtttgtagtttttaattttggttaggaaggtttagttaggttgggaggagattttaagtatatttttttttttattgttatattgtagaaattaaagatatatttttagtttgggtattcgttaagcgttttaagtcgaagagtggtaggggaggttttgagttttagttttatgttacgtgtaaaggatgtttggaaattgtttgtttcggtttttgggaggaaggtttggaattggatattggggtggtggttgttatacgttaggtatataaaattttaaagttagggatttttaaatattttttagaattttaggtttatgatgtagtaatttttaatttatattttggaggttttaatttttttttaagatgggcgtgggaaagtttggatgggaaatatatggggaggggcggggagttgtaggtaggagttttttttattacgaaaatttaagaagtaaggaagtggataggttattaatttttatattattaagttttgcggtattttgttttagattattattttaaatgtttgttttttttaaaaataggatttttgtcgtttattagggaggggtttttttggaattgatttatagtagggggtaggattttggtgggtttaagaattgttattttagtattttagttttttagttttgttttgtagtcgttggtattaggcgggggtagattttgggttataagttgttgttatatggtcgggataattgatgaaggtttatttttttattgttgtttttagttttgtttttttggaaattttatattttttttttaattatagtttttgtagtttttttttgttgttttattcgtatcgtttattttggttgtttacggttagtcggttagtcgacgtggttttttttttttttgtttttttttttttttttttgttttcgttgtataaaattagttgggggagggcgtggagaggggcggggggaggtaatggaattttggatggtttgggggaggcgggatttttcgtttttacgtttgtagttttggagtattcggggtggggagttgtataggagggagagaaatgaatagggtattgtaaggagatttttaggtttttttttagttttatagagttttttaggacgaggtagattggggttgaggtagagttttgttgggggaatgggatatggaggaagaaaggacgtggagttttagagttattttttttagatatagtttgttgtttttcgggtttttagatttttttagagtgtatagatgattttttttggtttttaaggtatagagtaatgatcgggatttttaagaaagagatgaggtagtgggaagtagtttttaaaataaagttaattattttttgtagtttattttatatttttaaaggaaagttttatttagatatttaaaatattttatatatttttaatattgagtttaggtataattggagaaggggttttatgtagtttttagaaagatatttttttagttaagtgttttttttttatttaggttttttttggtttgattgtgttgggaaggagggtttttaagtagtttttggttatagttatggtaaataaaatttttttttaagttattaatgattataggttttttattaaaaatattttttaattttggggtggaagagtttgggggatgaatttttaggggattgtaagttttaatttttatttttgtgtttttagaattttttatttttattttggttgttttattatttaattattaaagtttttttttgtagaggttatttagttatgttttttattttgtattttagtttttttattttattttttaattatgtttagggtttggaggaaggtatttgattttgttttggagtatagtagaagaattgatatttttaaaattaaaatttttttgtttgtattttttttttagatatttgatttttaatgtttagaaaggaatttgtaaattgttttttaaatatttttaagttttattttttagttatattagaagatatttttaaataggtatatttttttaatttttagttttttttgttttggagaggtttttagtatgtttttttatgttttttttttagtttttgttaggatattagagggtgattggggtatagttaggaggattttttttttaatatttttaatttttttatttttggaagtttttttatttagttttttagttttttagttttattttttttagattggaggttttaggaagagagtagaggggtatttttatttattggttagtttacgttattttgaggatttagttgtatttttattatagtatttttggtttaggttgggttggggggttggggaggtagagttgcgaagaggggagatgtggggtggatttttttttttttttttttttttttttattttaatttttaaattgggggtcgggttaggtagttttgattggttggggtacgggcggtcggtttttttttttcgaggggtagggtttttttttgttttttattaggatagtataaaaggggttcgggttagtcgtcggagtagacgggagttttttttcggggtcggagtaggaggtacgcggagtgtgaggttacgtatgagcggacgttaattttttttttagttataaagagtttatatgtttagggtttagatatgtttagttttgtggattttcggtttttgttttttttagcggttatcgtttttttgacgtacggttaagaggaaggttaagtcgagggttaagacgaagatagtaagttttaaatttttgggagtgtaaggatattttatatcgcgttttgcgtttggtttcgggggtcgcggtttaaaacgagacgtggatgattcggagattcgggaatggaagggagatgatgagggttttttttcggcgttttgagataggagggagtttattttggggcgaggttggggttgaacgcgtttcgggagcgggaggtgagggtggagcgcggcgtgagttggtgtaagagagaatttcgagcgcgtaatcggggaagtggggatttgggtgtagagtgaggaaagtacgtcgaagatgggatgggggcgtcgagcggggtatttgaagtttaagatgtagaagtaattaggaaggtcgtgggatgatttataaggaaagattgttttttttgcgggttagagtgttgttggggtcgtgggggtgttgggtagtcgcggagggggtgcggagcgtgggcgggtggaggatgagaaattttggcgcggattcggcggggcggggtttttgcgttttttgttgatcgatgttgagtattgcgtttttcggtttaacgtttattggggtaggagtcggagcgggaagattcgggttattgttgggtgcggatttttatttttagatttggaaagtaaagttagggatggggtagtttaagttttttaaagaggtagtcgggtcggtgaggtcggtttcgtttcggttttattgtttagcgttgttcgatatttagtggtcgtttggggagtcgttagcgcggtgggagtggttagttaatttttggattatttgcggattttttggttttttggttaaaagtgatttggaggtattggttggttttgggggattggggatggtttcgagagcgggtttttaagatgtttaggtgttggaggttagggtgttttttaattttgaggtatattttaagttttgggggggttttttttttaattagtcgtttttatttttttagtttcgttttcgttattttatttgtttagggaatgggggcgggatgagggttggatttttttttttttttttttcgttttttttttgtttttattacgtaagttattttttacgagtttgttttttcgatggggttttttttatttttttttcgtttttttttttttattttgtggtttttattttatttggttttagcgttaatgggttgaggttggagttggaagttatcgcggattaaagttttgtttaaatttttgagaattggaaagagttatagtttttttggttaggcgtttcggcgttgttattcgcgttgatgaggagtaggcgagtttttaaggatttgaggaaagaagaacggggggaggggcgggaagtgaaaaatttaagtgtgttttttagattcgggggaaaggtggttaagttgggggttgtagttattattgataacgtttttttttcgtttgttttagt

SEQ ID NO: 434 - DNA, 6686 bp, Artificial Sequence
  chemically treated genomic DNA (Homo sapiens)
attgggataggcggaagaggggcgttgttagtagtgattgtaatttttagtttaattatttttttttcgggtttaagaggtatatttggattttttatttttcgttttttttttcgtttttttttttttaaatttttaaaagttcgtttgttttttattagcgcgggtgatagcgtcgaggcgtttggttagggaggttgtaattttttttagtttttaggaatttaaataaagttttagttcgcggtggtttttaattttaattttagtttattggcgttgaagttaagtgaaataaaaattatagggtgagagggggagggcggggggagaataggaggggttttatcgggagggtaggttcgtggggagtggtttgcgtggtagagataggaggagggcgagggaggagagaagggaggtttagtttttatttcgtttttattttttgggtaggtggggtggcgggggcggggttaggagaatgggagcggttgattggaagggaggtttttttaagatttgaaatgtattttaaaattaggagatattttaatttttagtatttagatattttaaaagttcgttttcggggttatttttagttttttaaagttagttaatgtttttaggttatttttagttaaagaattaaaaagttcgtaaatagtttagaagttagttaattatttttatcgcgttagcggttttttagacggttattaggtgtcgggtaacgttaagtaatggggtcggggcggggtcgattttatcggttcgattatttttttaagaggtttgggttgttttatttttggttttattttttagatttagaggtgggggttcgtatttagtaataattcgggttttttcgtttcggtttttgttttagtaagcgttggatcgggagacgtagtgtttagtatcggttagtagggggcgtaaggatttcgtttcgtcgagttcgcgttaaagttttttattttttattcgtttacgtttcgtatttttttcgcggttgtttagtatttttacggttttagtaatattttagttcgtagagagggtaatttttttttatgaattattttacggtttttttgattgtttttatattttgggttttaaatgtttcgttcggcgtttttattttattttcgacgtgttttttttattttgtatttagatttttattttttcggttgcgcgttcgggatttttttttgtattaatttacgtcgcgttttatttttatttttcgttttcggggcgcgtttaattttaatttcgttttagggtgagtttttttttgttttagggcgtcgaggaagagtttttattattttttttttattttcgagttttcggattatttacgtttcgttttaagtcgcggttttcgggattaagcgtaaggcgcgatatagagtatttttgtatttttaaaagtttgggatttattgttttcgttttggttttcgatttggttttttttttggtcgtgcgttaggagggcggtggtcgttaagaggagtaggagtcggaggtttataaagttgaatatgtttagattttagatatgtagattttttgtggttggggagggggttagcgttcgtttatgcgtggttttatatttcgcgtgttttttgtttcgatttcgaggagaaattttcgtttgtttcgacgattggttcgggttttttttatattgttttgatggagagtagggaggaattttgtttttcggagagggggagtcggtcgttcgtgttttagttaattagagttgtttggttcggtttttaatttgggagttggaatggagagggggaggaggagggaagggagtttattttatatttttttttttcgtagttttgtttttttagttttttagtttagtttgggttagaggtgttgtggtaggggtgtagttgggtttttagaatggcgtgggttaattagtgggtaggggtgtttttttgttttttttttgggatttttaatttagaagaagtggaattggggaattggggagttgggtggggagatttttaaaggtggaagggttgggggtgttggggagggggtttttttggttgtgttttagttattttttgatattttggtaagagttaagggaggggtataaagaggtatgttgaggatttttttaaaatagaggaagttgggaattaaaaagatgtgtttgtttgggggtgttttttggtgtggttaggggatggagtttaggaatatttggggaataatttatagatttttttttagatattaagaattagatatttgagggaggggtgtaggtaagggagttttaattttgaggatgttaatttttttgttgtgttttagaatagaattaaatgtttttttttaaattttaggtatgattgagagatggagtggggaggttgaggtgtagggtgagaaatatgattaggtggtttttgtagaagaaagttttggtggttgggtgatggagtagttaaggtaggggtgggggattttagggatatagaggtggggattggggtttgtaattttttaaaaatttattttttaaatttttttattttagagttgggaagtatttttagtgggaggtttgtgattattggtgatttagagaagagttttgtttgttatggttgtggttaggggttgtttagagatttttttttttagtatagttaaattagagagaatttgggtggagggagggtatttagttaaaggggtgtttttttgggagttgtataaagttttttttttagttgtatttggatttagtgttggggatgtatgggatattttgggtgtttgggtgaaatttttttttgggggtgtgggatgggttgtagaggatgattgattttgttttaggggttattttttattgttttattttttttttgaaaatttcggttattgttttatgttttaggaattagagagaattatttgtatattttgaaagggtttggggattcgaaggatagtaggttatatttaaggaagatggttttagaattttacgttttttttttttttatgttttatttttttaataaggttttgttttaattttaatttatttcgttttgagaaattttgtagggttgagagaaggtttgggggtttttttgtagtgttttgtttattttttttttttttgtgtagttttttatttcgggtgttttagagttgtaaacgtggaagcggggagtttcgttttttttaaattatttaagattttattgttttttttcgtttttttttacgtttttttttagttggttttgtgtaacgaaggtaaaggggaaaaaaaaggaatagaaggggagggagttacgtcggttggtcggttggtcgtgggtagttaggatgagcggtgcgggtggggtagtagagggagattgtaggggttataattaaagggaaaatatagagtttttagagaggtagggttggagatagtaatggagggatggatttttattaattatttcgattatgtggtagtaatttgtggtttagggtttgttttcgtttagtgttagcgattgtagggtaggattagggggttgaggtgttgagatggtagtttttgaatttattaaagttttgttttttattgtgggttagttttaagagaatttttttttaataggcgataggggttttgtttttggagggaatagatatttagagtggtggtttagggtagggtgtcgtagggtttggtagtatgagggttagtgatttgtttatttttttgttttttgggttttcgtagtaagaagggtttttgtttgtagtttttcgtttttttttatatgttttttatttaggtttttttacgtttattttaaagaagagttgaaatttttaaggtgtgaattgggggttgttatattatgggtttggggttttgaaggatatttggggatttttggttttggagttttgtgtgtttggcgtgtgatagttattattttaatgtttagttttaggttttttttttaggggtcgaggtagatagtttttaagtattttttatacgtggtatggagttgaggtttaaggttttttttgttatttttcgatttaaaacgtttggcgggtgtttaggttgaagatgtgtttttaatttttgtagtatgatagtgagaggaagaatgtgtttggggtttttttttagtttggttgggtttttttggttaggattgagggttgtagattggggggatggggggtgggaggaggagggagtttgtgtttgtgagaggaggagacgttattttatttttaggaaattttgaagttttggttttttgtggaatgtaagattttgttcggtatttaaagtgggggggagtaaaagttaaaattttttttttatatttttaagaaatggtaaagttattagtagttagggaaaaaaaattttttaagaagaaaaatagaaagaggaaagtgttgagtttgagttttttttttttttaaatttttttaagtgtttttttttaatattaaagaaggagggaaaaggtttttatttttagagttttttaggtgttttatttggattttatggtatgggataaaggaggagaatatatttggaagaggtagtttaggtgttgtgtatttggtggggggtatgtatttttgttttgtatatcggggttattttttttagttgttgtagtttttagttgaggttttgttgttttttttttaattttaattttttagaacgtttttttgtttttatttttagttttagattgatgataaagagggggtttttaggagagggtttgaggagatagaagggcggggtttaagagtgggggtgtagtgaagattttaggatgaagttttttatgagtttttattatggagttttgtatagtttttgttgagggagtttggagtagagtttggggatagatttcgggtgtgtgtaggtttttttttttttttcgttttagtattgtatagtcggagttttttgttaggttttttagtttttaggtatagttttgtttttttatgttttagttttaaatttaagttttttagttttttaggattttttttttttttttttttttttttttttttttttttagggttagggggaagatgatgaagtaggttttgtttatgttgagtgtttgaagtttgtgagatatttaattagaaatacggaggaaatttttgggtatttgggttaggagtttagaggagagataaatgtgggttttaggatgatggtaattgaagttggggttgtggatggtgttgttttagagaaagtatggagggagggagtgtggaggggttggtattgagtttcggggatttttagggtgtaagggttgggtggaggaggaggagatagggtaagagtggttagagaaggagggttgggtgagagggattggggggttatgagtgtagaggaaagagatggtattagaaggaaggagagttatatgttgtagagagaattagtatggtaaggagtaaaatgttttttggatttagtagaatggtggtgattgattttcgtagcgtgagttgttgtggtggagagatggataaggaagtcggattggagtgggttaaggagtgtgtgggaggttaggaagtaaggttagagggtagcgattgggaggaggagtttggttgtggtaggagtttagagaggtatttgttttttgttttttttttttttttttagttcggattttgcgttttttttaggtttttgtattttttttttgttttttaagttttttcgttgttttttttatttttttttgtttttagagttttttttttggattttatttgttttttttgttttttttttttttttttttttttttttaggtgattcgagtttttaaatgtttatagttaggtttagttttttttttatttttttttagaataagtttttattttaggtttttgaagatgaattttgttttttagttttggacggattttattttattttttgatcgttgtttttattatttttattttagttttaggaggagaatttgggagttggagagagaagggttgggggtatggttttaggtgatacgaggtttgttatggttttagtttttaagttttttttagttattttattaggttttagttaggttttagttgagaataatgtattggatgggggatgttgttgagttaggggattttagtttttattgttgttttttggtagttagaagtgaggggttagttttattttttttgttggagtgagtttttagttgggtagttggtagtttttttgttatatttttttttgtttttgatgtttggaggtagtgtagttttttttaaaagttggtttggtagggcgcggtggtttatatttgtaattttaatattttgggaggttgaggtagtcggattatttgaggtcgagagtttgagattttagtttagttaatatggtgaaattttatttttattaaaaatataaaaattagttcggtatggcggtatgggtttgtagtattagttatttgggaggttgaggtaggagaattatttgaatttaggaggcgggggttgtagtgaatcgagattatattattgtattttagttt

SEQ ID NO: 435 - DNA, 9155 bp, Artificial Sequence
  chemically treated genomic DNA (Homo sapiens)
atttttgaaatatttttatagtttattaattttttttgagttttattatatttattttagtttaggttattattatttttttttagaatttttgttgtagtttttttattgttttttttgtttttattgtgttttttttttaatcgtttttttatattgtagttttagttattttatttaaaatattttttggttttttattttttttgtttaaaataatttaaatatttttatagtatatttgagaaaatataaatattagaatatagtttaaaaggttttttttgatttggtttttgttaaaattattaattttatttttagtttttttttttatttttttttttttttattataattttatcgtattgaaatgttttattttttagattgttaaattttttaatgtttttgtgtttatattatttttatatttttttttaaaattttgtttgtatttaagggttgaataaggatgttgtattttttaggaagttttttttgattttatttatttgaatttagatgaggtgtttattttaaatttttttataaatatgtaagtattttatttttttattatagtatttattatatttttttttattttttaatagattataagttttttgagggtaatgattttggtattttgttttataattatatatttattaatttagtaagtgtttggtataatattaaatattgtttgagtaaatatatattttattagttgggcgaggtggtttatgtttgtaattttagtattttgggaggtcgaggtgggtggattatttgaggttaagagttttagattagtttggtaaatatggtgaagttttttttttattgaaaaatagaaaaattagttaggggtggttgtggatatttgtaattttagttatttgggaggttgaggtaggagaatcgtttgaatttaagaggtagaggttgtagtgagttgagatcgtgttattgtattttagtttgagtaatagagtaaaaattttgttttaaaaaaaaaaaaatatatatatatatattttgatttatttaaataattaatgggaattgaatattttaattgatatgatatagagtaggaatttttatgttttttaaataaatattatagaaagaaattagtttttgttgggtatagtggtttatatttgtaatttaagtattttaagaggtagaggtaggtggattatttgagtttagttggagtttaagaaaagtttaggtaatatggtgaaattttatttttataaagaatataaaaaattagtttggtatggtggtatgtatttgtagttttatttattagggaggttggggtaagaggattacgtgaatttaggaattcgaggttgtagtgtttttagattatattattgtattttagtttgggtgataaagtgagatttttttaataaataaataaatataaaattaaaaattagtatttaattttttagttattatattaatttttagtaaatatttttttagtagtcgtttgataattaagttaattagaattggaattagaatgagataatatggtattgtttttttttatagagtagatttttaatgaatgtttgaaaggagatgttagttcgatgtttatttttgattaaagaaaggaatataagattaagatattagggtttcgttaggttgttttgtatttttgtattagttagatttttaattatttttttgttatatataaatatgtggtttagtttgtaattagtgggttataggaagttaaagaaattatttttttttttatagaaaataatttgggtataggaatttaggtattaatcgtttagtattaaagttgtaggaatttttagttttttttgtttttttttttttatttttttatttttagttttgattttattttattttttatttgtttttttttttatttattttttttttttttttttttttttttttttatattagaattattagggtttttattagggtatttagtttaggttttgggttagtttttatagttttattagttttatttttatttttaggaaaaattgttttttatttggagttataaaaatatttaatagagatttaattgattattaaaaattttttttttaaaataaatatttaattaattatttttttttaagttatatggaaaaatagttgtaattagaatttgatttttattttaagaaagaaagatttttgtttggttttttttatttttattttttgtttttaggtttagggttttttattaaatgttgacggttgtttgttttaaattttgttatattagtagggagggagtatagcggtatttggtatttgtattagtttttaggaatgttttttaagttattagtttattttgttgtttttagtagagacgttttttttttaagtttatagatgtttgttttaatttatagttttttaatttttaaaaatttgttgaggattttttttttttggttaaaagagaaattataattatatttttaaaaatattttatgttttaaattattttgataataataataaaatttataatgaaatgtttaaaatttgggatatttattgtaaatttaatgattgagttaatttgattttagaagcgttattagataattttattgaagggtatttggagggttttttttataaatttgttgtattattattttgagttattttgtttagaattagtttttgatttttagtaatataggataaatatatatatatgttttgtaaaggtaatttagtatagtggtaataatgatttttagaaattattttttatttttttgatatgtagaaaaaaatttgttatgatgtagtattgaagttttttttttttgataaaaatgatttttattttaaaagttttttgttagttttgtaacggtgatattttagggaaatgttaaaaatgtttttggaatatataatttaattttaggttttttgttgttgttgtttttagaatttagaaaattttaaatattgttgtttagttagaaaaaaatttgaatgtggattgttttttgtaaatttttttttaggaatgattagtaatttttttaaatttttttatttttagttattttaaaaaattatttaaagtggttttttaagtgagtgtttttaattagaataaaataagagtttattatagtttttggttatttatttttatttgtattaatttttttttttttttttatatttagaaagagtaatttgttttagaatagttttttttatttatagaagttgttgatggagttaatttttgtagaaatttttttttaaggtaaagtaaaaaaagcggggagggggtggggggaaggaagggaaaaagatttttagggaattatagtttatttgtttttgttttttagagatagaattgatttaaagatgttttttttgcgatgatttttgggatagagtagtattttaattaggttttcgttgttttatggggattttaggtaagtagaggagaggtttgatatatatatatatatatatatatatacgtatacgcgcgcgcgcgtatatatatatatatagttttttaaatttagggtttggaatgttattttaagaggttttagaaaaaggtataggatttttggttttttattttagggttaaagtattagttttttttttttttagtagggagtggagggttggatggaggcggttagagaagagggaagttgggtgttggggagagagttaatatttacgttggtgggcgtattgtttggggtgttattagcgaagattacgaagattttaagttcgaattagaagggtttttggatgtgttaggggaggtgtttgggtgtggttgtaagagatgggatagagagtaagtagtaaggttaagagggatcggggggtttacgggagggttgaagggtttaggtttagggtagaattggtaaatttagataaggagtttatggagaaggggaggggagattggaaattatgaaagattttttatcgtagttttagaaaggagagattgagaaataagttttcggtttttaggtcggttggagtcgtgtcggagtgttagattattttttaaaagattttttttggaatgagttttagtaaaggtaagttaggaggtcgaaggatttttttaggtgattcggtttagtttagagttcgtaaagtttattttttttgtagtcgggtgttaagtagtttcgagtttgttttttagtttatttgttaataaaaggcgtttttcgattgtaatttagttttttatagataggattcgttttttttcgaagttataagataaagagagtgtattattgttgaaatagtgggcgtatacgagttttaaagttagagaaaagttggacggggttgggggcggggtgtaggggtggaggggcggggaggcgggtttcggttgcgttacgttatcgagttttttttttttttttttttgtttttttcgttttcgttggagttttttattttataagtggtttatagggtataggtgaggcgggattggatagtttttgttttgatcgtcggagatttgtaaattttgtttatgtcggggttgtagagtatttcgacgtgttttatagtgtttttaaatttggaaagggcgggggagggcgggaggatgcggagggcggaggtatgtagataacgagttagagtttttttttgaaagttttaaaagtgtttacgtttttaaaaagaatggaattaatttaagaagttagtttcgtggttacgtttttttttttattcgtttttttttttgcgttttcgtaggttttttttagttgtggttgttcgggtttttagttttagtttttttattggtggaggtttttttggaggtattttagggttagggaaatttttgtcgtataaatagggtagattcgggttttattattttagtattacggtagtaggaggtttcggttaagttggaggtattggttacgattgtatgttcgcgttcgttaggtgatattttcgtcggtgatttaggggttttgcgatataaggagtttgtatgtttaagtgttagatatgtttagttttgtggatacgcggattttgttgttgtttgtagtaattttatgtttagtaatatgttaatgtaagtgtttttagtttgtttgggggagattgggtagagaggttagatgggagggtattttgttttgaaaaggaaaatttgtaatttgaattttaggtatatttggagggtagatttttaggtatgtgggaaaacgtcggaattgataagaaatatggaaattattttaaaaaatgaaaatataaaagttttgttaaaagttagggaattttttttttaagtttagagtgagatagttaattcggtttggttttttagtttagtaatttttaaagggagcggaaggtttttttttttaaggatgagatattaacgattaatgtggtggaggaagttaagggtttgtattttataggttttataatcgtattgatgtttattttgtaaaatttgaggtttgcgttagaaagttttttaattgagtaatgtaaaatttattttttaagagtttttattttttgggtattgtaaggtttgttcggaggaggaggatgacgatgttgatatgatgatggttataaggcgttttttggaggaaggaaaatgaaagtataggggatagggttttaagtagatggaattttaattaaagtttttacggatttatatagattaatgattagtatttttggttggagttttttttagtggttagttagtgaattttggaaagaagaatggatgttatttggagtgggtatattttgaaaagtaatataagtgttttaatttattttttagttatggaaatggtaatattttttaatttaaatttgttttaaattttgtttgagtttgagaattatttttttgatatgtttttagtgataagtaaatattatgaacgtagtaagttgagaaatattaatattgagatgagatttaagagatcggggttttttttatgagtttgatattaatttgttgcgtgattttgggtaagttaaacggttttttttaaaatgtgagatagagattaaagggattttaaggttattttttagttttaggttttatggttagatttttatgttaatagagaatgaagaagattagttcgtttttattttgaaaatggttgttaaagtgttagataaagatattgattagatgggggatggtattgtttgattatatttagtattttaaaaagttgttttatttatatagtacggtgtttattattgtataatttttaatgtatttgtgtgtttgtgtgtgtgtgtgtgtgtgtgtgtgtgtttgtgtgtttgtgtgttttttttttttttatttatttttagtatatatattgtggatattaaggagtaattgtagtgaataaatttatattatcgagtttatatttttaatgagattttgagagtgggaggaaagagtcggtttttagagaataaaatgaaggtagatttagggaaatttgaaggtataaaggtaatttattttttgattaatagttaattatagtttggaataaatgttattaaatatatattttttaaaatggtttatgtttgagtaattaaaaggtaaatttttaaaattataaggattttcgttaattaagttaggtataattattttttttattgatggatataatgaagtaaatatattatttttgtaatttaatagtaattttcgtaaattgtttttaaatgttagtgttggatgtggtttatttttttaaattgtgattgttgtaatagatgtttttattttaaataacgtattttttggttatttaattaaagtaatttttggggtgatttattttattgtaagtttggttatatttgtattttgtattaatttataatttttgtatcgtaggagaagaatttattttttaaggatttataataattatggtaaaaggggggatagtatttttgtttattttttttattattttttaagatttttaattcggtttttttatttatataaaatttttttttcgagataaaaatgatatatattggtaaaatgattttatttaatttaagtgaattaatttaaagtaaaatttagatgtttgaattaatttatttttatagttaataatgtgtaaattagattttttgaaaaaggatattaagaatggtataaatttaatgaagtattaggtaattttaatgttttataaaaaagtaagttagttttaatgttttataaaaaataaatttaatatagaattttaaggtaatatatttttttaaattttattttttttcgatatttaggtattaaaaatgattaaaattataaattatttttttattaatttattagttttatatttagcgatttatttgtgtattttattagtttaattgttaagtatttaaaatattttttagatatattaatattttataatagttataaaatagtaaataattaataatttaatttaaaatatatttatatattaatattgtaaataaattattttgttgatttttgttatatttttgatttgtataatttttaggttattaaaatatttttaaaaaaatataattggtttttaattaggtaatttaattttataaatttgtttttttatttgttaattattgttattgatttatgaagtgatattaataattgttttttatttttttttttttttttttatagttttataagaggtgagtaaaattttttttagaatttttaaaaatattttgatttttttggttatagtgatgtttttttttggaagggaagaagttatattaatattgattattttagatttttaagaaaattgtgaagaattatgatagttaaaatttttttggttgttttagaaagtatttatttaattttttaaaataggcggggttattgaataagattaggtttataaaatatttataagaaatatagagtaaataatttaatagaagtttgagttttaggattagtttttatgaagtagaagattttattgagttagagaatttttttatttttttggaattatttgtaaaagtatttattgttaatatatttttagtttatgagttgaatttgaggtataagtataggtacgtattgttatgtattttttgttttgtaggtatatatttttatttgatatgttggtaaaattttaaattgtagtttgaaatattaaattgagataatagtaaatgtataatgtaatgaattgtgaaggtatatttgtatattatattaaaatggaagttgtttttaaatatatatatataattttttttataataatttttgatttatttttttttaggaaattgtaagaaaggtaagagtatattatttttttataaatatttaaaattattagggataatataatttaattaaatttatagtagattatagaaggaaaatattttattaaaattttgtttatatgaatatatattagttaaagtataaaataaagtagttttgatgtttaagataataaagtttaattattttttggaattatttgtaattatatttatgtgatataaattggtgatttatatataaaaggaaaaaaaaagatttgtttttattttggagatggaaggtatattatgttaattatagggagtaaaaaaagtttattttaaagggttttgattatataaatgtgttgttaaaaatgtaataaaatgattatttaatttatagttattattttatttaaaatgttatgtatagtattgatttaatagttgaagattatagtagtttttaattttttagttgaaaaaaaattacgtataattataattaaaatatatatttttatttattgtattgtgttaattttttatatgttatttaataatattgtagttatattagttttattaattaattattattaagaatgatttgtttgtttattggaaattattttttaggtatttattattgttttgtttgtattttttttgtagg

SEQ ID NO: 436 - DNA, 9155 bp, Artificial Sequence
  chemically treated genomic DNA (Homo sapiens)
tttataggaaagatataaataggataataataaatgtttaagaagtaatttttagtgaataaataaattatttttgataataattagttggtaagattgatgtaattataatgttattagatagtatataaaaaattgatataatgtaatagataaaagtatatattttaattgtaattatacgtaatttttttttagttggaggattggaagttgttatagtttttagttattaggttaatattatgtatagtattttgaataagatgataattgtagattaaatgattattttgttatatttttaatagtatatttatatagttaaagttttttaaaataaattttttttattttttataattaatataatatgttttttatttttagaataaaaataagtttttttttttttttttgtatgtaaattattagtttgtattatataaatgtaattatagatgattttagaagataattaaattttgttattttaaatattaaagttattttattttatgttttagttaatgtatatttatatgaataaaattttgataaagtattttttttttatagtttattataaatttagttaaattatgttatttttgataattttagatatttatggagaagtagtgtatttttattttttttatagttttttagaaaagaataaattaaagattattatgaagaaaattgtatatatatatttaaaaatagtttttattttggtgtagtatataaatatatttttataatttattatattatgtatttattattattttagtttaatattttaaattataatttaaaattttattaatatgttaaataaaaatatgtatttatagaataaaaaatatatagtaatacgtatttgtatttatgttttaaatttaatttatgagttaagaatgtgttaataataagtgtttttgtaaataattttaaaggagtgaaaagattttttagtttagtgaaattttttgttttatagaagttgattttaaaatttaaatttttattggattatttattttatattttttatgaatattttataaatttagttttatttagtagtttcgtttattttggaaaattgggtgggtattttttaaggtagttagaaaggttttgattattataattttttataatttttttgggaatttaggatggttaatattaatgtaatttttttttttttaagagaagatattattgtagttaagggaattaaagtatttttaaaaattttaaaaaaagttttatttattttttgtaaagttgtagaaaaaaaaaagaaaaagtaggaaataattattagtattattttatggattaatagtaataattaataaatagagaaataagtttatagaattgaattatttaattaaggattaattatatttttttaagaatattttaatgatttagaaattatgtaggttaaaagtatggtagggattagtagggtgatttgtttgtaatattaatatgtaaatgtattttgaattaaattattaattatttattattttataattgttgtgaaatattaatgtgtttgaaggatattttgaatgtttagtaattaagttggtaaagtgtatagatgaatcgttgaatgtaagattagtagattgatgaggaaataatttatgattttgattatttttaatatttaaatatcgaaaaaaggtaaaatttaggaaagtatgttattttaaaattttatattgaatttgttttttatgaaatattgaagttgatttatttttttataaaatattgaagttatttagtattttattgagtttgtattatttttaatatttttttttaaaaggtttaatttgtatattattaattatgaaaatggattaatttagatatttgaattttgttttaaattagtttatttaaattaggtaagattattttattaatatgtattatttttgtttcggagaaagagttttgtataaatggaaaaatcggattaaagattttgaaaaataatagaaaaaataaataaaagtattatttttttttttgttataattgttataagtttttaaagagtgaattttttttttacggtataaaaattataggttaatataggatataagtgtggttaagtttgtagtaggatgaattattttaaaaattgttttaattaggtggttaagaagtgcgttatttgaagtgagaatatttgttgtaatagttataatttaggagggtggattatatttagtattgatatttaagggtaatttacgagaattattgttaaattataagaatgatatgtttattttattgtgtttattagtaggaagaataattatgtttgatttgattaacggaagtttttatgattttggaaatttgttttttaattatttagatatggattattttgaagaatgtgtgtttgataatatttattttagattgtggttggttgttgattagaaggtaagttgtttttgtatttttaaatttttttaagtttgtttttattttattttttaggagtcgattttttttttttatttttaagattttattaaaaatatgaattcggtaatgtgaatttgtttattgtaattattttttagtatttatagtatgtatattaaaagtgaatgaagggggaagagatatatagatatatagatatatatatatatatatatatatatataagtatataaatgtattagaaattatgtagtggtagatatcgtgttgtgtgggtggaataattttttggagtattgggtgtggttagataatattattttttatttagttaatatttttgtttagtattttggtagttatttttaagatgaaaacggattgattttttttattttttgttgatatgaaagtttggttatggaatttagagttggaaagtggttttggggtttttttaatttttgttttatattttagaaaaggtcgtttgatttgtttaaagttacgtagtaaattggtgttagatttatgggaaaaatttcggttttttgagttttattttaatgttgatattttttaatttgttgcgtttataatgtttgtttattattgggaatatgttaaaggggtaatttttaggtttaaataaaatttagagtagatttgagttaaaaaatgttattatttttatgattagaaagtgaattgagatatttatattattttttagaatgtatttattttaagtagtatttatttttttttttagggtttattgattagttattgggaaaggttttaattagaaatgttgattattaatttgtataaattcgtagaagttttaattgggattttatttgtttaaggttttgttttttgtatttttatttttttttttttagagggcgttttataattattattatattagtatcgttatttttttttttcggataagttttataatgtttagaagataaaagtttttaggaggtgagttttatattatttagttgaagggttttttaacgtaggttttaagttttataaggtggatattagtgcggttatggggtttgtggggtgtaggtttttgattttttttattatattggtcgttaatattttatttttagggaaaaagatttttcgttttttttgggggttattaagttgaggagttagatcgagttaattgttttattttgaatttagaggaaaagttttttaatttttggtaaggtttttatgtttttattttttaaagtaatttttatgttttttattaatttcggcgtttttttatatgtttgagagtttgttttttaagtgtatttggaatttaggttataggtttttttttttagggtagggtgtttttttatttaatttttttatttagttttttttaaataagttgaaggtatttatattggtatgttgttaggtataaggttattgtaagtagtaataaagttcgcgtatttataaagttgagtatgtttagtatttagatatgtagattttttgtgtcgtagagtttttgggttatcggcggaggtattatttggcgggcgcgggtatgtagtcgtggttagtatttttaatttagtcgaaattttttgttgtcgtggtgttaaaataataaagttcggatttgttttatttatacggtaaaagtttttttggttttagggtgtttttaaaagggtttttattaatgggagggttggggttgggggttcgggtagttatagttgggaggagtttgcgggggcgtagaggagggagcgaatgggggaagggacgtggttacggggttggttttttaaattggttttattttttttgaggacgtggatatttttgaggtttttaaggggaaattttgattcgttgtttgtatattttcgtttttcgtattttttcgttttttttcgttttttttaagtttggaaatattatgggatacgtcggagtgttttgtagtttcgatatgggtagaatttgtagattttcggcgattaaagtaggagttgtttagtttcgttttatttgtgttttgtaggttatttgtagggtggagggttttagcgggagcggagggggtagagaaggagggagggaagattcgatagcgtggcgtagtcggagttcgttttttcgtttttttatttttgtatttcgtttttagtttcgtttagtttttttttagttttggggttcgtgtgcgtttattgttttagtagtgatgtattttttttgttttatgatttcgggaaagggcgggttttgtttgtggagggttgggttgtagtcggagggcgttttttgttggtaggtgggttggggagtaggttcgaggttgtttggtattcggttatagggaggataggttttgcgaattttagattagatcgagttatttggggaagtttttcgattttttagtttgtttttgttgaggtttattttaaagagggttttttgggggatggtttggtatttcgatacgattttaatcgatttggagatcgagaatttattttttagttttttttttttgaggttgcggtgggggattttttatggtttttagttttttttttttttttttatgggttttttgtttggatttattagttttattttgagtttggattttttaattttttcgtgagtttttcggttttttttgattttgttgtttattttttgttttattttttatagttatatttaagtattttttttagtatatttagaggtttttttgattcgagtttggggttttcgtagttttcgttggtaatattttaagtagtgcgtttattaacgtggatgttaattttttttttagtatttaattttttttttttttggtcgtttttatttaattttttattttttattagggagaggaggaattggtattttgattttgaggtgggaggttaaaggttttgtgtttttttttaaagttttttgggatggtattttaggttttaggtttgaaaggttgtgtgtgtgtgtgtgcgcgcgcgcgcgtgtgcgtgtgtgtgtgtgtgtgtgtgtgtgtgttaggttttttttttatttgtttaaggtttttatgaggtagcgggggtttagttagagtgttgttttattttagaagttatcgtaaagggggtatttttaggttagttttgtttttaagaaatagaagtaagtgggttgtagttttttgagaattttttttttttttttttttttatttttttttcgttttttttgttttgttttaaggaagaatttttgtagaagttaattttattagtagtttttgtaaataaaagggattattttaaagtaggttattttttttaaatgtaaaagaagaaaaaaaggttaatgtaagtaaaagtggataattaaaaattataataaatttttgttttattttaattaaaggtatttatttgggagattattttggatgattttttgaagtaattgggagtgaaagaatttgaaagggttattggttatttttagaagggggtttatagggagtaatttatatttaaatttttttttaattaggtaataatgtttgaagttttttaggttttaggaataataataataaaagatttgaggttgaattgtatattttaagaatatttttaatatttttttgaaatattatcgttatagaattaataaaaaatttttaaagtggaaattatttttattaggaaagaaaaattttaatattatattataataaatttttttttgtatattagaagagtgagaaatgatttttaagaattattgttattattgtgttgaattatttttgtagggtatatgtgtgtatttgttttgtgttgttgagagttagagattaattttgagtaaaatgatttagggtggtaatgtaatagatttatgaaagaaattttttaaatattttttagtgaggttatttgataacgtttttggggttaagttggtttaattattggatttgtaatagatattttaagttttaaatattttattgtaggttttgttgttgttgttaaaatagtttaaaatatagaatgtttttagaagtgtgattataattttttttttagttaaaaaagaaaaatttttagtaagtttttgagaattagaggattgtaaattgaagtagatatttataaatttagagggaaaacgtttttgttaaaggtagtagagtgaattgataatttgaaaagtatttttggaaattgatgtaaatattaaatgtcgttgtgttttttttttgttgatgtggtagggtttgaagtaggtagtcgttagtatttggtgggaggttttggatttagaaataaaaaatgaaagtggagaaaattaaataagaattttttttttttaaagtgagaattaagttttaattgtagttgtttttttatataatttgggggaaaatagttgattaggtgtttgttttaaaggaggaatttttagtggttagttagatttttgttaaatatttttgtgattttaaataaggagtagttttttttggggatgggggtgggattggtagagttgtgagagttgatttagaatttgaattgaatgttttggtgagggttttgatggttttagtgtggggagaggggagagggagggaggagaaaatgagtagaaggaaaaataagtaaggggtggggtggggttaagattgagagtagagggatggaagaagggaggtagaggagattaaagatttttataattttggtgttagacggttaatatttgggtttttatgtttaaattattttttatgaaagaaaagataatttttttagttttttataatttattgattataaattgggttatatgtttatatatggtaagaaaatggttgagagtttggttaatatagaaatgtagaatagtttgacgaggttttgatgttttaattttatatttttttttttgattaaaggtaaatatcggattgatatttttttttaaatatttattgaggatttattttgtgagaagaagtaatattatgttattttattttagttttagttttagttgatttgattgttaaacgattgttaagaaggtatttgttgagaattaatgtggtagttgaagagttaagtgttggtttttaattttgtatttatttatttattgagaaggttttattttattatttaggttggagtgtagtagtatgatttgggggtattgtagtttcgaatttttggatttacgtgatttttttgttttagtttttttagtggatgggattataggtgtatgttattatgttaggttaattttttgtattttttgtagagatgaggttttattatgttgtttaggttttttttaaattttaattgagtttaagtgatttatttgtttttgttttttaaagtgtttggattataggtgtgagttattgtgtttagtaagggttgatttttttttgtgatatttgtttgaaaggtatggagatttttgttttgtgttatattaattaggatatttagtttttattgattatttaaatgagttaagatatatatatatatatttttttttttttgagatagagtttttgttttgttgtttaggttggagtgtaatgatacgattttagtttattgtaatttttgttttttgggtttaagcgatttttttgttttagttttttaagtagttgggattataggtgtttataattatttttggttaatttttttattttttagtagagaggaggttttattatgtttgttaggttagtttggaatttttgattttaggtgatttatttatttcggttttttaaagtgttaggattataggtatgagttatttcgtttagttggtaagatgtatgtttatttaagtaatatttagtgttatgttaggtatttattgggttggtgggtatataattatgaaatagaatgttaaggttattgtttttagggggtttatagtttgttggaggatagagaagagtgtgatgaatattgtaatggaggaatagaatgtttatatgtttatgggaggatttaggatggatattttatttagatttagataagtggaattaaggagggttttttggaggatgtaatatttttgtttaatttttaaatataaataaaattttaaaaagaggtgtgagagtggtgtgggtatagaggtattgaaaaatttggtaatttgaggaatggagtattttagtacgatgggattgtggtggaaaagagggaggatagaggaaggagttagagatgagattggtggttttggtagggattagattaaaaaggattttttaggttgtattttggtgtttgtgtttttttaagtgtgttatgggagtgtttagattattttaaatagagagggtaggaaattagagagtgttttgaataagatgattggggttgtagtgtggagaaacgattagaaggggagtatagtagagatagggagaatagtaaggagattgtagtaggaattttgaggggaaatgatggtggtttgaattaggatagatgtggtggagtttaagagaagttgatgagttatagaaatgttttagaagt

SEQ ID NO: 437 - DNA, 10891 bp, Artificial Sequence
  chemically treated genomic DNA (Homo sapiens)
gtaaaggtttagttagtaggaggtaagaagaagaggggaaagtgagaagaaacgtagatttgagtttgattcggtggtatttaaggagttttttatgtttggttttgtttttattttttattgttatgttttatttttagggttttgtagatggttttatattgttttggggttattgttatgttttttggtgtatttgtttttcgttgtttttatttgggagttattttgtttttttattgtatttttgtattttaaatttttatttatgtttggagatatgttttttttaggaaatttttttttagtttattttatggtttttagaatgttatttttttttttttttttttttgtttttttttttttttttttttttagggggttggggagagtgggatattttttttgtagtattttgtataattattttttttttattttttttatagatgtagaggtggtatttaaattttttttgtatttttattttatatagaagtaggtgtttagtacgagttttaagttgaatttgtatggtattaggataggatggaggagattgggtgggatttttggtgttatttgtatttgagaatatatagtaatatatttatgtttttatggaatggaatgtatattataaatttggaaaattttattttggatagttttgattttgttattttgtttttaaaatgttaaaggaaaatataaatatattttgaaagattgtttgaacggagtttaattaatagaagttgagtgttattgagtaagttgggtttattatttttaggtacggttgttgtgtgaagtttgtgtatttattatttgttatatttggggtgggtttatttttttggaatgtgaatttttttttattttattattatttttaaatgggatttgtgtagaggaagagaaagatattttttttttatagtttgtttataaatattttttttaataaggttgtgttaatttgagtttaaatttaatgtttttataaaagagagaaaaatagtgaaatggttattttgtttatacgatataatattgttgatttaatttatttgtttttttgaattgggttgatttggggtagatatattgattgtgattgtttaattttttttttttttttttttttttttttttttttttttttttttttttttttttttttttttttttttttttttttttttttttttttttttttttttgtttgagatgaagtttcgttttgttgtttaggttggagtgtaatggcgtaattttaatttattgtaatttttgtttttcgggtttaagagatttttttgttttagttttttaagggattataggtgtatatcgttatatttagttaatttttatatttttgtagagatggggttttattatattggttatgttggttttaaatttttgattttaagtgattttttggttttggttttttaaagtgttgggattataggtgtgaggtatagtattttattgtatttgtttaatttttaattgttttatttatagttatttatgttgtatttaaaggtgtaagtgaggttggttatgtgggatatttatttcggttatcgatgttttttttttattaattggggaaaatagaagttttttgtttttagtttagtggttttagaaattgtagtatttttttattagtttgatattgttatgatagaatattttttatattaagtgaatgaatatttatttataattttttttaaatatggaatatatattttttgtttttttaaagagattatattaaatttaaattagtattttattggatattttagtttattattatgaatcgtagggattatagtagatgttgtagatcgggatattttttggaagtattgatgattgtaagggtattgattttattttattgattttcggttattatgttttgtatttgttgtgttaattttatattgtttttttgtgtttttttttatttttttttttttttgtttttattgtgttttattaataattgttgtttttttattttatttttagttttttgtatttaattggtgaggttagatgttattacgtgttaatataatatttaaattatgaattagtagatatggagtaagaaggattttatagtgtataaaatgtatagttttatataatattaattttggttatttagtggtttagttttttttttttttagttttttgggtatggtatggatagtgagattgttggacgattaatttttaaattagtgatttgtatatgtgtgttatatataggtttaattttagtttgagttataaattagaggtttttaattagttgtttggagttatagatgggtaaaatattaatgttggtgtttaattggttttagaattttaataatttttatagtttattttggttttgttaatttaaattttaaattttattttttttatgttaattttcgttgttggtgaaaagaaatttttttatagtgggtggagagtttaatttgtatttatagatggattatgattgttggaaggaatttaaagtttttatatgtagatatagtttattggtaaagatgaattatagagttagaggatgaaattaagaataaatttgtaacgagtttgtattattttgttatttattaaattggattattttgaattaggtttcgattttttttatatattttagtgtgtttttttaaattttttttttttttgttgaatttttatgataatttgtatttgaagttagttgtataaatgtttttatagttgtatttaaattattagtttataggggtttttttaatttttatgtgttagaattgtgttaggtatagtttttgtttttaagtattttttaagtttattgatgagataaagattaatggatataaggggaaaaaattaaaattatataaaaatatatgtagtttaggttataaatgttagggggatttagaaagttagggagacgttgtgttttagagatattagagaaggttttttagaggggttttaatttaggaggttttgataaatgtgtggaatttggttattttattttttaggtagagaatataggattttttgagttttaaagaggatatggggtattgatggtaagagattagtttttttttagtagagattgggtttgaggaagagtttagagtttaatgtaagtttttgaatgggagtatggagatttagataaggttcgtggaaggtaggggagatgttggaaattggttgaatttttttttatttttatttagattggataaagtttagaagtattttttttaataatgagttttttttttttttaattagagtatttggaattttagtttttattaggataagtgttaaagtatgataggttagggatggggttttaggatttttggtggaagtttaaggtttagaagtagttttttttaagtgtttttagtttttagggggaaagttttagagaaataaaattgtttaggagggtagaagttttggttaagttagattttaaattttgagttttattttgtttatagttttttgggggattatatcgtttaaaaggaaggtttgtttggggacgttttttttttggtatgaaaggaggtatcggagattaagagaagagattagttaagttttgggaagaaggtagtttggttaaggtgagagagggcgtttatcggggaaggtgaggtgaggcggtaagcggagggttagggggtcgattgggaaattttggcgttttttttcggtttatagaattcgttagttggatcggttttttcgatttttggttagggtcgtagtagtgattaatcgtttttggttaaagttgttttacgacggtcggtagtgtttatttttcgggggattttcggattttagttaggaagagtagatattacgtttgagtttggagttagatagtttttttatagtaggtagtttgtatcgtttagtttcggtttttttcgttttttgtggtttttttagttttttttttagggtttgtttttgttttttatatttttatataggtttttttttgtgtagtaatatattagttttttttttggttgtcggtttaggttaatttcggtttgtgttttagaggaagtttttaacgtagagttggatgggggaggggtggagggtagtcgttgtgaacgtttaggtgggagtttggggattaggtattgtagggaagggttaaaagataggtcggggtaattttttagatttggtttagttagtttgtttttaagatttaggattttgaatttttgtgggtttttttttgtttttatttttaaacgtttgacgcggtgttttttcgtttttcgttgtttttttttatcgttttttttttttttttttatgtttttttcgtttttggtttagggttttcggtttgcgtttttgtaaatatttttttttttttaatttcggtagaatttcgaggggaggggtcggaggttatttttttcgtttgtggttagaggggggtagcgtcgtagtttcgggtttggggggtaggggttatttttgcgtttcgttcgattaggttattcggcgtattaggggtggagggcgggaagcgtgatttttagagaggggggttcggtttgggtaggtgcgggtattggtagggtttaggcgggtttcgggggcgggcggtttaggttatagtttagcggggggtagggggcggttcgcggtttgggcgagttcgttagtttcgaaaggggtcgggcgtatataacgggcgtcgcggcggggagaagacgtagagcgttgttgggttgtcgggtttttcgttttttttttttgttttaagggttttttgtatgagggcgcggtagagattcggattcgcgtcgtgtttttgtcgtttcgttgcgtttcgttcgggttcggtttagttaggtttcgcggtgagttatgattcgtttcggggttttttagacgttggtgttgttgacgttgttcgtcgtcgttgtttttcggtgttagggttaggatgttcgtaagttttttttcgtttttgtttgtttgtttgttttttatgcgttttttagtattttttttttcggttcgttttagttttggagttcgcggtttcgggttaaaacggttttcggggtcgtagcgcgtcgatttaggtataggatacgtagaagtttattaagaagagttttgttaattaaggattttgttttagggttttcggtgtttatcgtagttgtaagtatttgtaggtttttacgttgcgttagaatattgaatttgtaaagtgttggttcggagaagtttgcgtatagatataaatgggtttttttttattagttttgataattaggcgtatatgtatatagttcgttttttcgaagtatttcgagtttagtaaaaatagattttaatttatcgaatttaggtgaagtaggaaagagagagcgcgagcgagggagtaagtaaacgttaaagggttgattttatagtttgtttaaggtttggtggttggtgggtttaaagtagagttagataaaggggattaatattttgatattggtgggttgaaattttaggttataaagaacggttttcgataggttttttgagattttagcgtttttttagggtatttttttttttttagttggttttggagtaaggtgtagttttagcgtttatttcgattttttttcgttcgtttgcgttttttttttgataaagggtatagaaatttttagtaggagaggttatttgaaagacgataatattttaattagatcgtgttttttaaatgttttcgaaaatagcgttttttttttcgcggttttattttatttttcgtcgtttcgaggtattataatgagttatttttttaaattttggaatttatcgagttaggttgcgtggtgtgtgtgtgtgtgcgtgtgtgtgtgtgtatgtgtgtgttagggaaggggagtaggttggtcgattgttacggttgttataattattttaatcggtatagttagagatggtttttgtagtcgggtttaaatgttgttcggattgtatttttttattttttttttggtaaggtttattgtttgggattatatttaggataaacgaagtttggaaagtgtattaggtagagaggatttttttttttacgtgtttgggtacgttttcgacggttgggattttagttttgtttttgtatgttatagattgtaaattaatcgtagagggaaatttttcggcggggggaataaaagttttttgttttcgaggttttgtgggtttttttttgttattaggttgtttttagggatagcgtggaaggcggcgggtttaggcgggtttttcggttattagcgtagcgggggtagggttggagtttgcggcgtagttgcgaggagtcgggagtaggagattttggtcgggttattcggtagtgcgttaagttggaggcgcgtttttgggtatttgaggaatatagcgtgattatacgtggtttggatttagattgattatatttttgtattatatttataagtatacgtttataaagttgtttttttgattgatttttgttttagtgcgtaatggaattagttgggtggttttaaaataatttttaaattttttattcggtattagggtcgtttgtttaattaggcggtagagtttttttatcgtcgtattttttttgggagggagtgattttatagttttttcggtttaaattttttagtcgtttttttttttagagggagtgtgattttgtattcgagaggttgattttgcgttttggagtattttattttttataatttttttcgtttggggttagcggatttaaaggtgtgacgtggggaaatgcgtagtttgcgtggacgttaggaatgttagatatttagagttcggttatattttttttttttatttttttacgagtttgagaaatttattggcggcggcgtttttgatttttatttgtattttagagttttcgttttcgaaagtgtttttggtttaggggagagattttaatttttttttgtgaggtttgtttgtattgggagattggtagcgatggtttttagatggggttgaaacgttgttcgtatttatttaaattggtttttcgcggagatttgtgaatcgggttttgtgtgcgttcgagaaaagttttatttatgagagacgaggtttagtgggttttttcgtatttttagatttttttttttataatgtttttttgtgttcgttcgtcgttatttttcggttttagttttgcgtagagcggcggtgaagtaaaatagtttttcgaaagaggtagttttttaattggtttgttataaagaattatttatacggttttgcggtaatgaggggaatcggattaggcgcgtcgggatgttatcggtagtcgttttggagtagtaattatggtggtgttgggttttttcgtttatatttaggggattcggttacggcgttggtttttttttggggtagttatttaattttattttttattttttcggtgtttgtgagcgagtcgtgtttagagtcgtagttatagagttatttagcggtttttatatttagcgtagtttggtttcgtttttgcgtcggcgtttttcgggtcgttttttttcgggaaatttgattcgtacggggagtggttttttttttagtattttttttttttttttttgggtttttatgggcgagggtgggtttttttgtagtttgggttggagcgtattaatcgatgtttttttttttatattttttttatcgtttgtattttattgttttagttattttaacggcgggtgtgttttcgtaatttttgtattttttttggaattttttatttttttgtgattattttgtttaaaggttaggcggattttttttagtgggaaagtaaaaaggaaagtttatttttggatttttattttttttaaagagtagtgggtaggttcgtttttttttcgttttttgggtttgtggtttttttttattatttattttttgttgttgttattgttttggggattttgatgagaaaaatagcgttgggcgttttttagtacgtggtgcgggttttatagtttttggttgttaaggagcgtttttgttagtataggttttatttgtagtatgaattttagacggtagggcgttggtggaggagattagtttttgttattttttttttgtagttttggaggaggttaggtttggattggttaattttagttttagttaggtatttaacgatttttgttttttaaattggggtgttgtttttagatggaggtagggtttttttaggtagggttataggtggaggttagtattgggggcgttttggttttattggttttttaagtagtttattagtttgtttaagttttaagtgtattgtttgaatgggtttatttttttttttaaattggttttaattttaatatggtttaaagaatgagataagattttaattttaatagttcgtttttttattttttttttttatatatttatttttggagttttattgtttatagattttaatttttgtaggtagaattttttatattttttttgaatgttagttgttagttgtatttagttaattttataatttttagaggaaggtagaagaaagaagatttttttgtttttgggttggtggaagggaggtttcgttatttttttgttttttttttttttatagttttagaatttttatttagaatattttgttttttttttttcgtttattttttaattttttttatttattttattatttggtttttttcgtattaggtgggtaaagagaatatagtatagtaattttttatttttattgttgggttaagatttttattggtgaatagataatatggtgtaaggtgtataataaatatttgttgaatatatggaaaaattaatgatgttttaggaaaataatttttaagttttatatgtttaggtggttttagtttatattttttagtatttgaattttgttaagttgattgtaatttttttttttttttttttggttttttatttttttttttttttggttttttgtttttttttttttatttttggtgtagaggaggttggtagttgtgtgtaggatgggtagaggtataatgataaggatgtgtggaagtcggagttttgtcggatttgtgtttgtgatattgggattgttttttgcgacgatataatttgtgaagacgtgaaagattgttttagttttgagatttttttcggagagtgttgttttatttgtttaattgatttcgttattgttagtggttgtaatttatttattttttgtttaatataaataaattatttgtaagtattgtaaatacgtttttatagatgttggtcgtttttgtaaagtagaggggttagttatttatgggatttggtagttggggtagaaaggaaaggttattttttatttgtaggttgaaattgagtgaacgagtttgagatattagaggggtttttttttgtttaatatttttaaaaatatttgtttttaagatatatgaaggatagatgtgattttataaaaaaaaaaaaaaaaaaattttttttgaaattatttttgtaaattattagagttattatggagattaaatgttttgtttggttaatttacgaattaattttttttttgttatcgatattttgttttttttttagaagatttttatgtatgtggtttttagtgtggagaaagttttgttagttagtggggagattgtaggggtagaggttttttttttgagttatggaatattggtggtagttttttttttgttattattttttttggagttgattattaatttagaagtaaaataataggagagggaagggttaggttttgggagttttcgtggggacgggtggagatagagttttatgtatttgtattgtagtgggtggttataaatttttagttagatttagtgttggtggatgatatatgtgtaggtgatttttttttagtatttatatagatgttttatttttttgtagagtgagtggggacgtttgtgtaggttttttgggtagtttttgttgttcgttttttgttgaagtagagaaggtcgtggtaagggaagtgagaagttgtttttttttaatattttattaatattggttttttaatgtgtagatttttagattttttttgaggggttcgtgtgagtgaagtgttgattgtttttattattttgttgttattgtgaaggagaggttattgattggggatggtataggttatgatgtttcgatgttttttataatttatatgttttgttgtttttgtgtttttatttgtgtttgttttaaggagatttagttttaatgtaagatttttttaagtatttaattttttttttgggagggtttggggttcgggaacggttttttattttgtggggggaagagagattgaatttgtgtttttttttttgtggttgattagattttgagttttttattgtttttttgtgttgtttttgttttttttttttgtatgttgtttgttttttgaataataaagtttgggttatttttattttttatgggattttagtaattttagggttatagtggttttaatattttaatagaggggtttagtggagttataggaagttgtcgttttttttgattgtgtttttttatttgtttgatttaatgagtgtttgagtgataagaataggtatttttttattttaagatttttattttttttttttttatatttttttttttgtagg

SEQ ID NO: 438 - DNA, 10891 bp, Artificial Sequence
  chemically treated genomic DNA (Homo sapiens)
tttgtaagggaaaaaatatagagaagaagaaggtaagaattttgagatggaaaaatatttatttttgttatttaaatatttattagattaaataagtaaaaggatataattaaggaaggcggtagttttttgtgattttattgaatttttttgttggggtgttagggttattgtggttttggggttgttgaggttttatgaggaatggaggtgatttagattttgttatttaaaaagtaggtagtatgtaaaagaaaggagtaagggtagtataaaaaggtaatgaagagtttaagatttaattagttataagaaggaaagtatagatttagttttttttttttttatagggtagggagtcgttttcgaattttaagtttttttagaggaagagttaggtatttagaaaggttttatattagagttgggtttttttgaagtaagtataaataaaaatataaaaatagtaaggtatatgagttatgaagagtatcggagtattatagtttgtgttatttttagttaataattttttttttatagtagtagtaaaatagtaaaggtaattaatattttatttatacgggttttttagaaaggatttgggaatttgtatattagggagttagtgttggtgaagtgttaaggaaaggtagttttttattttttttgttacggttttttttattttagtaggaagcggatagtaagagttatttaaaaaatttatataagcgtttttatttattttgtagggagataggatatttgtatgaatgttgggaaggggttatttgtatatatattatttattagtattggatttaattgggagtttataattatttattatagtgtagatatatggggttttgtttttattcgtttttacgagaatttttaaagtttagttttttttttttttattattttgtttttgaattaatggttaattttaagagaggtaatagtagagaggaaattattattaatgttttataatttaaagagggagtttttgtttttgtagtttttttattagttggtagagttttttttatattgaagattatatatatagaagttttttaaggagaagataaggtgtcggtggtagaggaggaattaattcgtggattggttagatagagtatttgatttttatagtggttttagtaatttgtagagatgattttagagaggatttttttttttttttttttgtagaattatatttgttttttatgtgttttggaagtaaatgtttttggagatgttgggtaaagaaggatttttttagtgttttaggttcgtttatttagttttaatttgtaagtgagaagtggttttttttttttattttagttattaggttttatggataattagtttttttgttttgtagagacgattagtatttatgggagcgtgtttgtagtgtttgtaagtaatttatttatgttgaataggaaataaataaattataattattggtagtggcgaggttagttgggtagatggggtagtatttttcgaaggggattttagggttgaggtagttttttacgtttttatagattatgtcgtcgtagaggatagttttagtgttatagatatagattcggtagggtttcggtttttatatatttttattattatatttttgtttattttgtatatagttgttagttttttttgtattaagggtggggagggagaagtagagagttaagggaaggagggggtggggagttagagagaaaaagagagaggttgtagttaatttgatagaatttaaatgttgaagaatgtaggttggggttatttggatatatagaatttaaaaattatttttttaaaatattattgatttttttatgtatttaataaatatttattatgtattttgtattatgttgtttatttattagtgaaaattttgatttagtaatgaaggtggggggttattatattatattttttttatttatttaatacgggggagattaggtgatggagtgggtggagggagttggagggtgagcggaagggaggagataagatattttgaataggaattttgggattataaaaagaaaggagatagaaaaatggcgagattttttttttattagtttaggagtagagaagtttttttttttttgtttttttttgggaattatgggattagttaaatataattgataattaatatttagagggaatgtagaaaattttatttataaaaattggaatttataagtagtgaggttttaaaaataggtatataagaaaggggggtgaaaagacgagttattagaattaggattttgttttattttttgaattatattagaattaggattaatttggggagggggatagatttatttaaataatatatttggggtttgggtaggttaataaattgtttaggaggttagtggagttaaagcgtttttagtgttgatttttatttgtagttttgtttggagaggttttgtttttatttgaaaatagtattttagtttggggagtaggggtcgttgaatatttggttagggttaagattggttagtttaggtttggttttttttaagattgtagaggaagaatagtagggattagttttttttattagcgttttgtcgtttggaatttatgttgtaaatgaaatttgtgttgataagagcgttttttagtagttaagggttgtagagttcgtattacgtgttagggagcgtttagcgttgttttttttattaaaatttttaaggtaatagtagtagtaggggatgaataataggaaagagttataaatttagagggcgagaaagaaacgagtttgtttattgttttttaaagagagtgaaaatttaaagataaatttttttttttatttttttattagaagaaattcgtttagtttttgggtaagataattataggagggtgagggattttagggaaaatatagaagttgcggggatatattcgtcgttaaaatagttggagtagtggaatgtaggcggtgaggaaggtgtgggagagggggtatcggttaatgcgttttagtttagattataggagagtttattttcgtttatgaggatttagggaggagagggggaaatgttaggagaggggttatttttcgtgcggattagatttttcggggaagggcggttcgggaagcgtcggcgtaggggcggggttaggttgcgttgggtgtaagagtcgttgagtgattttgtggttgcggttttggatacggttcgtttatagatatcgggagagtgaaaagtgggattaaatgattgttttagaaaggagttagcgtcgtaatcggattttttaggtgtggacggaggagtttagtattattataattgttgttttaaaacggttgtcgatagtatttcggcgcgtttgattcggttttttttattatcgtagggtcgtataagtgattttttgtggtaagttaattaaaaagttatttttttcggggaattgttttgttttatcgtcgttttgcgtagggttggagtcgagaggtggcggcgggcgggtataggggggtattgtgggagagggggtttgggagtacgagagaatttattggatttcgttttttatgaatggggtttttttcgagcgtatatagagttcgatttataggttttcgcgaggaattagtttaaataaatacgggtagcgttttagttttatttggaagttatcgttgttaattttttaatgtaaataagttttataaaggaggattgagattttttttttgagttaggggtattttcggaggcgagggttttgaaatgtagatgagggttaaagacgtcgtcgttagtaagttttttaaattcgtggaaagatggagaggaggggtgtggtcgagttttaggtgtttgatatttttgacgtttacgtagattgcgtatttttttacgttatatttttgggttcgttgattttaggcgggggaagttataaaaggtgggatgttttagggcgtaaaattagtttttcggatgtagaattatattttttttgggaggaggagcgattggaaggtttgggtcggagaagttgtggaattatttttttttaggaaagatgcggcgatgagagagttttatcgtttaattaagtaagcgattttaatatcggatggagaatttgagaattattttaaagttatttagttaattttattgcgtattaaggtaggggttagttaagaagatagttttgtgggcgtgtgtttgtaaatgtagtataaaaatatagttagtttgagtttaggttacgtatagttacgttgtattttttaaatgtttaggagcgcgtttttagtttagcgtattatcgggtgattcggttagagttttttgttttcggtttttcgtagttgcgtcgtaggttttagttttgttttcgttgcgttaatgatcggaaagttcgtttgagttcgtcgttttttacgttatttttggaaatagtttggtggtaggagagggtttatagagtttcgaaggtagagaatttttatttttttcgtcgaagagtttttttttgcgattgatttataatttgtaatatataaagatagggttggaattttagtcgtcggaaacgtgtttaaatacgtggaaaaaaaaattttttttatttaatatattttttaggtttcgtttgttttgaatataattttagatagtggattttattaaaggaggggtagaaaggtgtagttcgaatagtatttggattcgattataagagttatttttaattatatcggttgaaatagttgtagtaatcgtagtaatcgattagtttgttttttttttttgatatatatatatatatatatatacgtatatatatatatattacgtagtttggttcggtgagttttagaatttagaaaagtaatttattgtagtatttcggggcggcggggaatggggtaagatcgcggggaagggggcgttattttcgggggtatttgaaaagtacggtttggttggaatgttatcgttttttagatggttttttttattggaagtttttgtattttttattagaagagaggcgtaggcggacggagggaagtcgagatgagcgttagggttgtattttgttttagggttagttgggagggggagggtattttaaagaggcgttgaggttttagagggtttatcggaagtcgttttttgtggtttgggattttagtttattagtgttagagtgttagttttttttgtttaattttgttttgagtttattagttattaagttttggataggttgtgaagttaattttttggcgtttgtttgttttttcgttcgcgtttttttttttttattttatttaagttcgatgagttgagatttgtttttgttgaattcgaagtgtttcgaagaggcgagttgtgtgtatgtgcgtttaattattaaagttggtggaaaagagtttatttatatttgtgcgtaaattttttcgagttaatattttgtaagtttagtattttagcgtaacgtagggatttgtaaatatttgtaattgcgatgggtatcgaggattttgggatagagtttttgattggtagaattttttttggtgaatttttgcgtgttttgtgtttaagtcggcgcgttacgatttcgggagtcgttttagttcggagtcgcgggttttagagttggagcgggtcggggagaaggatgttgagggacgtatggaaagtaggtaggtaggtaggggcgggggaagatttacggatattttggttttgatatcgaaggatagcggcgacgagtagcgttagtagtattagcgtttggggagtttcgaggcgaattatggtttatcgcggggtttggttgagtcgggttcgggcggagcgtagcgaaacggtaggagtacggcgcgggttcgggtttttatcgcgtttttatgtaggaggtttttggagtaggagggggaagcgggagattcggtagtttagtagcgttttgcgtttttttttcgtcgcggcgttcgttatatgcgttcggtttttttcgaggttggcgaattcgtttaaatcgcgggtcgttttttgtttttcgttgggttgtaatttgaatcgttcgttttcggagttcgtttgggttttgttagtgttcgtatttgtttaagtcggatttttttttttgggagttacgtttttcgttttttatttttagtgcgtcgagtggtttgatcgggcggggcgtagagatggtttttgttttttaaattcggggttgcggcgttgtttttttttgattataggcgggaagggtggttttcggttttttttttcggagttttgtcggagttggaggggagggggtgtttgtagaggcgtaggtcgagagttttagattaaggacggaaaagatatgggagggaggagggaaagcggtagaaaggagtagcggagggcgagggggtatcgcgttaggcgtttgggagtggggatagggaggagtttatagagatttagagttttaaattttggagataggttagttgagttagatttgaagggttatttcgatttattttttagtttttttttgtagtatttggtttttagatttttatttggacgtttatagcgattgttttttattttttttttatttagttttgcgttgaaggttttttttggagtataggtcgaagttggtttgagtcgatagttaggaaaagagttggtgtgttattgtatagaaggagatttgtgtgaaggtgtggggggtaggggtaggttttgggaaggggattgaaagagttatagaggacggagggagtcgagattaaacggtgtaagttgtttgttgtggggggattgtttagttttaggtttagacgtggtgtttgttttttttggttggggttcgggagtttttcggggagtgggtattgtcggtcgtcgtagagtagttttggttagggacggttggttattgttgcggttttggttagggatcggggaggtcgatttagttggcgagttttgtgagtcggggagaagcgttagaattttttagtcggttttttagtttttcgtttgtcgttttattttatttttttcggtgagcgtttttttttattttagttaaattgttttttttttagggtttagttggtttttttttttggttttcggtgtttttttttatattagggaggaaacgtttttaaatagattttttttttgagcgatatggttttttaaagaattataggtaaaatgaaatttagaatttggggtttgatttaattagaatttttgtttttttgggtagttttgtttttttggagttttttttttagaagttgagagtatttgaaagaagttatttttgggttttaggtttttattaggggttttgggattttatttttagtttattatgttttgatatttgttttggtagaggttggagttttaagtgttttggttggaaagggaaagaatttattgttgaaggaaatgtttttaggttttgtttagtttggatggagatggggaagaatttaattagtttttagtattttttttattttttacgggttttgtttgagtttttatgtttttatttaggggtttgtattaagttttgggtttttttttaggtttaatttttgttagaagaaagttggttttttgttattagtgttttatgttttttttggggtttagaaggttttatattttttatttggaagatagaatgattaaattttatatatttattaagattttttaggttaaagtttttttgagaagttttttttgatatttttagaatataacgtttttttggttttttgaatttttttggtatttatagtttaagttatatatgtttttgtgtagttttaattttttttttttatatttattggtttttattttattaatgagtttggaagatgtttggggataagaattgtgtttagtataattttaatatataggagttaggaaagtttttgtggattaataatttagatataattataaaggtatttatataattgattttaaatataagttgttataaaaatttaatagaaaaaaaaagaatttgggagaatatattaaagtatgtggaaaaaatcgaagtttagtttaaaatgatttagtttagtgagtagtaaagtggtatagattcgttgtaaatttgtttttaattttattttttagttttgtgatttatttttgttaatagattgtgtttatatataagagttttggattttttttagtaattatggtttatttatgagtataagttaagttttttatttattgtgggaaaatttttttttattagtaacgggaattgatataagaaaaataaaatttaaaatttaaattgataaagttaaaataaattatggaaattattaaaattttaaagttaattgaatattaatattaatattttatttatttgtgattttaaataattaattaaaaatttttaatttgtgatttaaattggaattagatttatatgtggtatatatatgtaaattattgatttggaaattgatcgtttaataattttattatttatattatatttaagaaattgaaaagaaggggaattaaattattaaatagttagaattgatgttatataaagttatgtattttgtgtattgtagagttttttttattttatgtttgttaatttatagtttagatattgtattaatacgtaatggtatttgattttattaattagatgtagaaaattagaggtgagataggaaagtagtagttgttgatgaagtataatgagaataggaaaaagggagagtaagagaggatatagaaaagtaatgtgaagttgatataataaatataaaatatggtagtcgaaggttagtggggtagggttaatgtttttatagttattaatgtttttagggaatatttcgatttatagtatttgttgtagtttttgcgatttataatgataaattgaaatgtttaataaaatgttaatttaagtttaatgtggtttttttgaggagataggaaatatgtattttatatttgagaaaggttgtaaataaatgtttatttatttaatgtgaaaaatattttattatagtagtgttagattaataaggaaatgttgtaatttttggagttattgaattgaaaataaagagtttttgttttttttagttggtagaagaagagtatcgatggtcgagatgagtgttttatatggttagttttatttatatttttaagtatagtatgggtaattgtaggtagaatagttagaaattaaataggtataatagggtgttgtgttttatatttataattttagtattttgggaggttaaggttagaggattatttgaggttaggagtttgagattagtatggttaatatggtgaaattttatttttataaaaatatgaaaattagttgggtgtggcggtgtgtatttgtagttttttaggaggttgaggtaggagaattttttggattcgggaggtagaggttgtagtgagttgagattgcgttattgtattttagtttgggtaatagagcgagattttattttaaataaaagaaagaaagagagagagagagagagagaaagaaagaaaggaagaaagaaagaaagaaagaaagaaagaaagaaagaaagaaagaaagaaagaaattaaatagttataattagtgtatttattttaagttagtttaatttagagaaatagatggattaaattagtaatattgtgtcgtgtagataaaataattattttattattttttttttttttatggaggtattaaatttagatttaggttgatatagttttattgggaaagatatttgtagataggttgtaaagaaaagatatttttttttttttttatataaattttatttaaaaatagtgataaagtgaagaaggatttatattttaaagaggtaagtttattttaaatatggtaggtggtgaatgtatagattttatatagtagtcgtgtttgggggtggtgagtttagtttatttagtgatatttagtttttgttggttgggtttcgtttagatagttttttaagatgtgtttatgtttttttttggtattttgggggtagagtaatagaattaagattgtttaggatagggttttttagatttatggtgtatattttattttataggagtataaatgtgttattatgtatttttaaatgtaaatagtattaagaattttatttagttttttttattttgttttagtgttatataaatttagtttaggattcgtattgagtatttatttttgtatgagatggggatatagagaggatttagatattatttttgtatttgtaggggaaataggaaaaaaatgattgtataaaatgttgtaaaaaaggtattttattttttttaattttttaaaaaaaaagaagaagaaagaaatagaaagaaaggaaagaaagaatggtattttggaagttatggagtaagttggggggaggttttttaagagaagtatgtttttaagtatgggtgggggtttgaaatgtagaggtatagtgagagggtaggatggtttttaaatggaagtaacgaagggtagatgtattagaagatatggtagtggttttaggataatgtggagttatttgtagggttttgggaataagatatggtagtaaggggtgaaggtaaggttagatatggaggattttttgaatgttatcgagttaggtttagatttacgtttttttttattttttttttttttttttattttttattagttagatttttgt

SEQ ID NO: 439 - DNA, 15373 bp, Artificial Sequence
  chemically treated genomic DNA (Homo sapiens)
tatatttgaagagttgttatagttgtgttggatattgttgaaaatttttaaggatgatttagatgataaattatatttgatagagagtttagtgggatttgtagagtggagttttaattttgagaatgattaagttaattgaagatttaatagggaacgtttgagttgttttacgatgtggtattttagtttttgtgttatttttgtggtaaatttataaagtaattatattatttaggaatgagattaggtaaggagatgaattttaattttttatgaatttttaaatataattataataataattatgatagtaaataaagttataattaaaatataagtatattagaatttcgtttaagagaatatgtttataatattttagaaagttttataatttaagtagaggtttattagtagttttttttttaatgattaatagtttgttatgttaaataagattttaggtgatatgtttatgtttatataagtaaaaatttatagttatttatttatttatgtgaagtaatattgatataataaatataagttattttatatgtatattaaggaagttttttagaaatttttatttgtttgaatttttgttagtttttaaaagtatatatatacgtatttaattatatatatatatgtggggggtatataaatatatatatacgtaaatatataaaaatatatatgtgaatttttttgtatgttttaagattgtattttattaagtgtaaagtagtggatttttatttaaatataatattgaaaattatttaaagattaatgataagataaaaattagaatggtaatttttgtaaattggttattaattttataatattattattttttttatttttttataatgttttattagaaaatatataaaattaagtgttagatttgtatttattatatttttaaattgcgtaaaaatatttttattataattagtgattagtggaaagtatggtgaaaatatttgtaaagtgtgttagttagttttagttgtaatgaattattttgagggttatggaatttttttgaattttttgtttaattttgggatattttttagttgtaaaatataaagataaaaatttagagttttagttttaatagtaaagaataggtaggaattaagatatttagttttttttaattaaattttattggaattttattttattaaatgttaagaaaatatggattttgtataaaagtgaaaatttttagttatttataattttaatgagtaattttgagagttatgtaatttttttaaattttttgtttatttttgggatattttttagttgtaaaatataaagataaaaatttagagttttaagtttaataataaagaatagataggaattgagatatttcgtgttttttaattaaattttattaaaattttattttattaaatgttaagaaaatataaattttgtataaaagtgaaatttttaggttaaaaagaaatggttattaaaatggttttataagaaaaaaataaggggttaatgaattttattttggggattaaggggaaattaaagaaaagggttttgaagatttggttatataattatttaaaaattggattattatgttttattgttagtgtaatttgttttaattttggatatatttatggttaaatatgtttaagttttgtaagtataatatgatttttttaattatatttttggttttattatgtatatattagtatttgtttaaatttttttaaaggaaatataattttttaaatgtggttttatttttattaattgagtgaattgattaatttttttgggaataataaagaagatttgtattgtattttatagttgtattggtagttttattattataagtagtttttaaatggttttatagtgatttgaaatttagaaaatgtttttaaaaataaagtattttgttggttttaaaaagaaaattatatataaagtcgtataataaaggggaggggagaggaaagagagaaatattgaaatatttttgttttatgtgttttttatggtggagataattgatttttttagtgttgttgtagaaagcgttgttggtatttattggtttattgagtttattatagttgtgtttgtgtattttttttaagttttattttttattgaattggaaaagatttgaatttttggttgataatttgttatatttttgttttgttttatttttttaggtattttttttgttaaaggagatttagattaattagtgttttagttggtgtaggtatttagatttgtgttaaagttttaaatgtaatttaaaaagtaaaatgatatgtttatgtgttttggttaatattagtgaagttagggaagtatgggaagaaatgtgtggttagataataatgaggatagtagtttttggatggtataataggatttagaagtgtatgtattttatttagtttagattttgtattaagaaatgttttgatttcgtattaggaaatgttttgataggaggtagaaaaataggatttgggatatagaatgtaaaggattttagtgtaaaatttttatattcgaggtagtgaagaatcgtaaattagaatatttggagaatgaattttttaggttttttttgaagattttaaaatataataatttttttatatgtaaaatattagttaatgttttttaagtgagtgtattaattatgaattttttttatgagtataaggtttttatttgaatagttaagtaaattaagaattttagaataatagtaattttatttataatgtttaaaataaagtataataagtattattttaaaaataatatttttaattttttatagtggaaaataaatttaatgaagaaatttaataaattttagtttttatagattatttaaaataatgagagaaatttaatatagatatatgaattttacgtagatataaagatattatgagaaaaattatgtttttgaattggtttgaatataggaaatattttttgtgtataggataaagatgtttgaaagatagaaagatgtatataatagtttttttttagtatttttattgtgatttagtagaaaagtttatatttatgattatttttaatagttattttttttttacgtttttaagtagtgattttttaatttaaaataaagatatataagaggttggtttcgttttagttttttttttttgttattaaatgatgttatttatattgagatgttttggtttgtgtttttgtgattgaagatataagaaagtttgggaggtcgaggcgggcggattacgaggttaggatattaagattattttgattaatacggtgaaatttcgtttttattaaaaatataaaaaattaattaggcgtagtggcgggcgtttgtagttttagttattcgggaggttgaggtaggagaatggcgtgaattcgggaggcggagtttgtcgtgagtcgagattgcgttattgtagtttagtttgggcgagagggcgatttcgtcgtaaaaaaaaaaaaaaaaaagatgtaagaaataagaaagtaagtttgttattgtttatgtttataggatttatgtatatttgggaatatatatatgatatgagttgagtgaaaatttagtaatataaattagaagaaagagaaagatgaaaattagtttaaaggaggtaatttatttaaggaggaaagttttgtattgaggtataaggaagtgatttttattaattggtgtgaaatggggagaattttatgtgtataggtatagagacggatatgtttaggtgaaggtgaagaaaattagtttaagtgattttgattagaattgaaatgtttatcgtagattatagagatagatgaattaattatgaattgatgattagggtgtaaagagatatttttattgttagatatagttttatattgtggataagtatattttttttgtagagatttattaaagatttataaatggtatttgttttttttttaaatatgatataaaaattattgtttagatagatttagaaatatattggaaagttttgtggatgaggatttggaaagtatatatataaaagtttaaattagaaatatttatattaatttttagagtaatgtagaaaaaatgattattttttttggtatttttttgttattttatgtgataaatttttttttttttagttttttaaaaagttatgttatgaaaaggttgaatttttttttagaaaaatttgttttgttttttttaggtagtataaaaattggaaattttataagaaagtattttggtttgttaaagaaatttgtgagaaatggaaatagttatagataagtatttaatttttaggaagttatttaaatattgttgaaatattttgttttttgatatttgtttgaaatttaatttttaggatttagggtgggtggatgagtcgaaggggtatacggtggtattttttttcgtgagttttttatagttttttatttaaattgagttaggattatttttggtaaaattttaatataaaaattttttaggaagattagttttgtaaattagatatattagataaatgggtattaagtagttttttaaaattatgtagttgttaattttataaggggaaataaaaatgtatgtatttatattgtatgtattaaaataaggtagagtatttttatacgtttttaagttatataaatatatatgtaagagtgaaatatgtaaaaaaatttttatataagtagatgtatataaattttagatgtgtttttttttttattgtgggttgtgttttttataagggaaaaagaaatatttattattttttttattgttgaggggatgggtgcggtttttatattttagaaaggggttggaaagtgagggaagttaaatttttttttatttaaggttaaagtaaaggaattttagtggttgagttttatgacgggttcggtgttgaagggtagggaataatttgatggtgttattttgaattgtttttttttttttttttttgtataaagagttttatgtttgatatttagatatgatgagttttgtgtaaaaggggagttggttatttttcgttttgttttattttattattattttggtataataggaaggtgagtaggtattgattttaagaaattttatgggatttttgttttttttttttttataaagaggggtgtaaaggggaaaattagttgtttgatttaagataattttttttataagttttagattgtgaaacgttgaattgattatggttgtgttttttatattatttgaaaaataatcgcgttatgtgtgtttttaagagttttgtggttaagataagatgtttttgtattaatttgtttttatgttaaaggtattggaaatttttaaaaatggttttaaaattttttttttttggattgttaatattttggaatatttttttaggtagtttggaagttattggttttttgtaataattttatgtttttttttgtttgttggattttttgtaaggttagaatattgagtattgttttttgaataagaatgttttttaaatattatggattaagaatagtttaaaggaagattttacgtattattagaattattgaatatatttttgtaaaatggttataagatatttataaatattttttaaagggattaaattgttaaaatattttattatttttgtttttattttgttttaagaatgattgattaatttattttttttagtagtttgatattaagggattaatattttttatatattttacgttttaattatattcgtattaatgaagaaaatattttttaaaatgttttaataggaggtttgattttgttgtaaataaggtaaagatattagtattgtttgattttagaaagttgttttgttatattttttaataattgtatgtaatgttttttatattttaattttttttaaaaatatatttgttttattatttatgtgaaaatatttttttatttattatagttatgaaaatgttgaataaattggaatataaatttttatagaaataaatatttaagtgttaaatgtaaagatagttaggagaaattattagataatttttattgtatataattaaatatggttatatttaaatatatagattttgtaaaggatattgtatgaaaatttggtttttgtttgtaatattaaatgtatttgttgtttttatagttaatatatgtaaatgtgtgtatgaggggaggggtagatatataatgaaatgtttttagttatatttagtttatggatataaaagaaaagaaatatttattttttttgtttttttaatttttttttttttttattttttttttttttcgttttgtttttttttttatttttttttattttttttggtttttttagatttttttttatttattattttatttttttttaggtaagtttatatttatttttttttttttttttgttttttttgtttgttattttttttttattttttatgtggtttttttatgtttttattttttttttttagttttttttttttttgtttttttatttttttttttttttgaatttttaattttttttttttttttattttttttttttttttttttttattttgttttttttaggagatgttataatttatagtttttttttaggatattaaatgattattattttttattaattatttattgaaaagattataaatttaggggttttagtttaaaaaattgtaatatatttgtagttgtttcgtggttgtaagttttttataagtattgtggttatttttttttttaatttaattttagtgggggggtgtttgttatttatagtattttgatattatattaagttttgtttatttttttttttttttttagatgtaaaaaataattaataagtataaaattttgttgatatgtgtttgtgtgtttttaagtttaaaaagagttgaaagagaattgtttagtttattttttttgttatgagtaaaagtaaagttgaagtgatttaagatagtatattttatgttttttgtgggttttataaggaaattttgttattagataagttttggaaaagttataggaggtatttgaatatatagtatattgagagttgttataaagttttggggtggggttttttatatatgtttttataattttagagacggtatagttttaatgaatatttatttttagtttatttataggtattttttggatataaataagtttttaaaaagaattttggtcgttttataaatttgtgaatattgtatttaatttatgtgttttaatttattaatggagaaatatagtttgttttatattttttgtagattataaatatgttaagttttaagtataaagatgcgttatttagtggttgataagttaggttattatttatataacgaatgttaatattaatgttatgtagttggttttggtagtttataatgagttttaaaaaatttatatgcgtgaattttaaatgttaatattgtttttttaaggaaattagtatgttacggataaatattgtaaatatatatattgatacgaaaatataatggtaataatatttagagtttttttggaaattagtttaaatgttacggttatttaaaaattttatatatgattattgtttaaatatattttttatgtttttgatgtagtttttatttgatataagtattttatttattgtttaattgttagatagattatagatagttgttattaagtaatattgttttattagggtagaaatagaaattttattttaattaaatgtgtattaatgtttgagtttttatattttgttatagtgataattttagtaaaataaattgtaggtttttagttgttttagaattttaaaattgtaaatggatttagagaattagttttttattagacgttatgagagtatattttttttattatgttttaagagggaatttgtaatttgtttaggtaatatttaagttttttggtttgtgtttgtttttataattaaatatattgaattaataggaaaaggttatatatatttaggaataattgtatttttaaagggagagaatgtatagttgtttatatattttagtgttagttatttaatatggattagtgttttatttgagattataaaattagaaaatgacggagttaaggttaggattaatattttgtttagttttagataattatagaatatatattaaaattagatatttgaatttttttaattttgtaattatttgttattgaaaggagatattaaaaaaattatatatcgttttagaaagtatatgaattaataatgtatttttaaaggtgaaaaaagaataggtatttttttgtttaatatttaattttatagagagtagtacgttaatttttttaaattttagaagtttaggattttattattttaaaagaaattattattagttttgtgtgagtaaataaagtattataatattttgtgttttttatttatgatattttgtatttatttatttgagttttttttttagggaaagaaaaatgtttaggtaataatagagttttgaaaaatttggatttttaaaattatttatttatgtataggtttttagattatttgatgttgaatattttttaagtgatttaaaggtttatatataaaaaggtatttttattaaattttggaattaaatattttagtattataagaaaagaaagtaaatttattggaataattttgggaaagaaggaaagattgtgattaaatgttttttaattattttagatttttggattgatgttttatttataggtttttttttaaaaattaagaatgattggttgtgagtttattaggattatagttgaggttaaaggatagttttttaggaaagtttttgttttatatttacggttatatgttggattttgagttgttatttagagaaaagagtgttatttatcgaaattttatagtttttattgtgaatggtttttttggtgtagagttttaaaaattatgtagtttagttttttaattttgtaatatttaatgatattatcgttttgaagtgattaaagtagattgtttaaagaattaaagttttaaagatgaaagatgttattgtttttgttggatatgaggaatagttgtaaagtttttaggtttataataattttttggaatttttttagtgaattgttttttgtaaaagttttttttaagataaaagtttaattttattgtttttatatttaaaaaaaaaaaaaaaaaaaagattatatagtgtaaaaaaaaattttttagattttttaaaggggaaattttgtttgttttatgttaagatgataacggaaaaaatgagatagttatttttatataaattatttgtgaattgtagttgggggagttatattaattattagagttttagtttgtgtttaatgaaaatatagtagaagtggattttttttagattaattaataaaatttttgtttttttttatgattgaggttaagtattgttgtttaaaatgtagttttaatgaataaaatgaaacgttgaaagaggacgagttaaaatgtttaaaagatgtaaatattaaagagaaaagatttagaaattattaaaagttaaattttttttgaattttagtattaagaaagtattgttttagtaaaatggtatatatttttttgaaattgtttttttatagtattttgtgtggaggatgatagagattgtattttttaagtaaattaaaattatagaaatattttttggagttgtatagtatgtttataacgttttagttttatttagtgaaaatttttgatgaatttagatgtatattaatatgaattatttagtaattatattttttgaaaaatagtgtgttaatgagatattttaaatatatttttgtattggatgtagaagttttttttgtttggtattattgttgttagaattttatttttttgtatatagtaaaatgtatgtagggtttttgagttatatatttattttgttggtggtttggatgttattagggtagttttagagatataatttttttttataaggttaagagaaaataaataggagaatttaattttagatggtatttttttgttttgaggttagatagaaaaatattttgtaaagaattgttgttttttaaaatatatttatttagatttagattttaattttgtagggataaaaaattatatgggatagagttttggagttggtttttttaatcgtatttagttttgaaatagtagaaagaaaatagaatgtagtaattaagagtattaaatttagagaaagtttttttatatttagatttttttttttattttgattgtgtaattttgggaaaattatttaatgtttttgtagttaagattttttatttgtaaaattaggattatgatagttgtaagtttataaggtttttgggagtatgaagtaaaatagatatttaaattatttagagtagtttttataagataggaggtattatagtattagttttattaacgttggtaaataaaattattttaaggaagaaattaaagtatttagtaatttagtgataaggatggtgaaatgtaaaattttatttataagattatataatttaaagttgtttgttaaatgtaataagataagtagaatatattttttttaatgtttttataatttgatattaagaagattttattatatatgtaattgttggtggttagatatatgatatttaaaattttttaattatttaattatttttatttttaataggataaaatattaattaatttaaaggatatttttaaggagattgaattttaaaagattaattttttagataattttaaaagattaattttttagataattttaaaagattaattttttagataattttaaaagattaattttttagataattttaaaagattaattgaattttaaaagattaattaatttaaaggatatttttaaggagattgaaaaagtatatatttataaaatatgaaataagaaaatatttataaatgataatttattaatttttttttttggaggtagtaagaataaataaaattttattttttatgtaaaatagtgtttttaaattaaaattatttatttagaatgtttatagatattttttttagagttttttttgttaagtaatttaatatattttaagatattttgataaatatataagtagtagaaaaaatattttattaaaatttatgttttttaaataatattatttaaaaggtaaattaaatattattttaattggaaattatatgaatgttaaatatttatatgtataaaatatttagttttttaaagtaatgaaaataattatgataatttatatattatatttgtgatttttagatttttagattatataatatttttttttagataaggatttagtaagaagagaaaaggaaaaaatatttattttttatttaagttaaattaattaatttaattaggtgttttagggaataatattattgttttaaaaatagtattaagataaatataatatttattttttgtttaaataatatgatttttttaagttagtatgatttaatatgaagaatggaaataaaaaaattataaaatagtaagttttatgtatatttaaaaatataaaattatgttatttggttttatttttttttaaaattttaaaatagaaaattaggaaagaagtagttaagagtggtttaagatatgtgttagttttaatatgttttatattatagattttagtaaggagatgattgagtttaatatattgtttgtgtgattataagtaaattttttttagaattgtatttcgtagtaaggaatagaaatattaaatgatatgggagatggaatttaaaattaattataaattggaatagagagatttagtttaaataattaaaataatggaaataattggaaagtttattattttttaatagtagaatgaaattatttgttttttatttaatatttttggaaaaaattaatttatttttttaatcgaagttattttgaatgtagatatttaagaaatgaagagaataatatgagatgatttatttttaaattttattttttattttatttttaaatgttgtaaatggttaattagagtatttttatttttttagaaataaaatatttttttttttgattttgttatgattttcgtatatattattaggtattaaatgaaggtttatgaaatattaatttaagagttttaatttttagtagaatatattgttaattatattttgttatgtatggaataataaaggaagttatataaaattattttttttagtaaaggtaattaaggtagaaaaatagagaaagggttaatttttagttataagtttttataggaattgattttttaggagagttaaatttattttaagtggatgtgaaataagttatggtaataaataaagttgtattaatttttattttttaaatattttaatttttttttttttatttaaaataatatgattttttaaagtaaaataaaatatatatgtattatgttgattgttatgtgtaggtgagaagagaaaaatattttaagaatatgataatttttaaaattgtattaaaataatttttatattgaggttttcgtgttttaaaaagtattataatatgtttttaataaaatttagaaataataagttaaataataacgttaatatttataatattgtatttgatttaattttaataaatttatttataattttaataagttaatattgtgtttatttatttaataattagtagaataaatggaaagtattgtatttttaatgatgtgaggatatttttaatgagatataaatataggaggatgaatatataggagggaaaagtatttatgttaatttttaggtagattaagaatatatagaagatatttaaaataggaaatgtttgagtttagttttaattattatttttatttgtttttaatatgtttttagtatttaatggttgttttttataatttacgtgttgtattaagtgtgaaaagatatgtttgatttagaggtaatgagttaaaagaattatttgtataatttaataatgtttttgaggatggatttggagggtttaaaatatatattattaatgggaaaattttgggttgaaattaatttgtaggaatattttatataaagttgatttggagaaaatttttaagtggtttattttgagaaaaggaattaatgtaattatagtgttttatgtaattttattgtataattttttaaatttaaattttcggattttttttgtagattggtgaatttagtatttaaatatgaaacgttagttttgtttagagaataaaatgagtttaatgtatagatttatttgttattattttttatattaatgtgtaaatgattgtttgtttttttattaaatatatttttcgtaatattatttaaataggtttattttatttttattgagataagtattttggtatttagtttttatatttattaagaattaagaaatgttgttttaaaagtttaggaaatgtatatagaaaatatattttatgtttttatatatgtgttttagatataggggaggaattagaataaattttttaaataaataaattatttgtttatttaaaattgtaattaaaaaatgaagttttttttcgttagttgtaaattatattgagaaattgtaatataaaaaagaatggatttttaaaattttttgagtagattaagtgttttgtataatattattaaatttgtattagaatatataaatggaaatgaggtggggaagtaattgtagtattttttagagtttaggttttgaaattttttttggtgaatatttattaaattagttaaatattttaatttatttaaatataaatttaaattattattattttagatagagagatgatatagtaacgggatttcgaaaaggtgattttttgtggttgtatgtagtgtttagatggaaaaattttaggattattaaaaggttttttgattattaggcggtaaaaattaattttgaattatttgtttattcggtagtaggttttttttaatagatattttaaatattttggttttgagaaaataaaaattttattattttataaaaatataaattattgaatagtatattatttgttgtttgtaaaaatttttgtagatgtttagaaatttattatttatttatttaattattggtaaattattatattaattgttaagaattaaagttgtatttaattataatatatagttaatgttttaagaattgagattaggttttgttttggtaatttttaagttgatttatagttaatagttgttgaaattttagtattttgtatataattatgaagtaagtttaaaattttggttgaagtaattttttttattattttaagttataaatatagatggttatgatttatattttttttattatttttatttattttttgttaatgtttattttaaaaatattttttttttttttttttggtgatttggaaatgtttttatatttatatgggatatataatatattatgttatattatgttgagttattaatgttaaatagagttaatagtgatatttaatatatataataagttttgttaaaatttttttaggaaaatttggtagagttttatgttgttaagattagtttagtttttttttgaattttttaattaggttgataaaatttagaaagtttttagagttagtgataaaattatttttttagtttaatgtttttatttgttgttaaggtaaagaatagtaattgggtagaagagtttatttttaatgtttttttaataaataaatgtttaaatgtttgtgtgatatatattgatgttaatttttattataaatgaaattaaaatatttgttggttttaaggaaaattgattatggtgtgttaattttatgttaataagtagatatgatattttaattaattttttgttatttagtaaattatatagggtaagtataattttttaatgaaaggaagaaattatttgttttaaatttttttaattttggttattgttaatagttttaatagagtaataaaaattattttttagtaaaatttaaggaaattttacgttatttaatttgttttttagt

SEQ ID NO: 440 - DNA, 15373 bp, Artificial Sequence
  chemically treated genomic DNA (Homo sapiens)
gttgaaaaataagttagatgacgtgaagtttttttaggttttgttgaaaggtgatttttgttattttgttaggattattaataatagttaaagttgaaaaggtttgaaataaataattttttttttttattagaaaattatatttgttttatgtaatttgttaagtagtaagaaattaattaaaatattatatttgtttgttaatataaaattggtatattatagttaattttttttaagattagtagatattttaattttatttatagtaagaattaatattaatgtatattatataagtatttaaatatttatttattaaaggaatattgaaaataagtttttttatttaattgttattttttgttttaatagtagatgggagtattaaattaaagagatgattttgttattaattttgaagattttttggattttattaatttagttgagaaatttaggggaaaattgagttaattttggtagtataaaattttattagatttttttgggaaagttttaatagaatttattatgtgtattgaatgttattgttagttttatttggtattagtagtttaatatgatatgatataatatattgtatattttatatggatgtaaagatatttttaaattattaaaaagaaaagaaaaagatgtttttaaaataaatattggtaaggaataagtaaaaataatagggaaaatatgaattataattatttgtatttgtggtttaaaatggtaaaaaaaattgttttaattaaaattttagatttgttttataattatatataaggtattgaaattttagtagttattaattatgaattagtttaggaattgttaaaataaaatttggttttaatttttaaggtattagttgtgtattgtggttaaatataattttagtttttgataattagtatgatagtttgttagtaattgagtaaataaataataagtttttaagtatttgtaaaaatttttgtaaataataaatgatgtattgtttagtaatttatatttttgtgagatggtgaaatttttatttttttaaagttaagatatttaaaatgtttattgaaagaggtttgttatcgagtaggtaagtagtttaaaattagtttttgtcgtttagtggttaagaggttttttagtggttttaagatttttttatttgggtattatatgtagttataaaagattattttttcgaggtttcgttgttatattatttttttgtttagggtaataataatttaggtttgtgtttaaatgagttgaaatgtttagttgatttagtaaatgtttattaaaaagaattttaaaatttagattttagaaagtattgtaattgtttttttattttatttttatttatgtgttttgatataaatttaatgatattgtataagatatttgatttatttaagaagttttaaaaatttatttttttttatgttataattttttaatgtagtttatagttaacgaaggaaagttttattttttaattgtaattttaagtaggtaaataatttgtttatttagaaaatttattttaattttttttttatgtttgaaatatatatatgagaatatgggatatattttttatatatattttttaagtttttaaaatagtattttttaatttttagtgaatataaaagttgaatattaaaatgtttattttagtggaaatgaagtaggtttatttgaatggtgttacggaaaatatatttaatagaagagtaaatagttatttatatattggtgtgaagagtaataataggtgagtttatgtattaaatttattttgttttttagatagaattggcgttttatatttaagtattaagtttattagtttgtagaaaaggttcgaaaatttgggtttggaagattgtgtagtaaaattatatggaatattgtaattatattggtttttttttttaaaatgaattatttaaaaattttttttaaattaattttatatgaaatatttttatagattagttttagtttaagatttttttattaataatgtgtattttaagttttttagatttatttttaaaagtattgttagattgtatagatgatttttttagtttattgtttttggattaggtatatttttttatatttaatatagtacgtggattatgaaaaatagttattgaatattaaaggtatattaaagataaatgaagataatagttaaagttaggtttaaatattttttattttaagtattttttatatgtttttgatttgtttagaaattaatataaatattttttttttttgtgtatttatttttttatgtttatgttttattaagggtgtttttatattattagaaatatagtattttttatttgttttgttaattattaaataaatgagtataatattgatttattaaaattgtaaatgagtttgttaaaattgggttaaatgtaatgttataagtattaacgttgttatttagtttattgtttttaaattttattagaaatatattatagtattttttaaaatacggaggttttaatataaagattattttagtgtaattttaaaaattattatatttttaaaatatttttttttttttatttgtatatgatagttaatatggtgtatgtatgttttgttttattttagaaagttatattgttttaagtaaaaaaaagagagttggaatgtttaaaaaataagaattaatgtaattttatttattgttataatttattttatatttatttgaaataaatttggtttttttgagaagttagtttttgtaaaaatttgtggttgaaaattagttttttttttgtttttttattttagttatttttgttgaaaaaaatagttttgtatagttttttttattattttatgtatgataaaatatagttagtaatatattttattgaaagttaaagtttttagattgatgttttatggatttttatttaatatttagtaatatgtgcgaaaattatggtaaagttaaggaaaagaatgttttgtttttagaggaataaaaatgttttagttagttatttgtaatatttagaaatagaatagaaaatgggatttagaagtaagttattttatattattttttttattttttagatatttgtatttagagtagtttcggttaaaaaaataagttaattttttttaaaaatattaaataaaaggtaaataattttattttattattgaaaagtaatggattttttaattatttttattattttagttgtttaaattaaatttttttgttttaatttataattaattttaaattttattttttatgttatttggtgtttttgttttttattacgaagtataattttgaaagaaatttatttgtgattatataagtaatgtattaaatttaattatttttttgttgggatttataatataaaatatattgaagttaatatatgttttaaattatttttagttgttttttttttagttttttattttggaattttagagaaaaataaagttaaataatataattttatatttttagatgtgtataaagtttattattttgtgatttttttgtttttattttttatgttaaattatgttgatttgaagaaattatattgtttggataaaaaatgaatgttatgtttgttttaatattatttttggagtaataatattattttttaaagtatttaattaaattaattaatttggtttgaatgaaaagtgaatgttttttttttttttttttttattaaatttttatttgggaaaagatgttgtataatttgaaaatttaagaattatagatatgatatataaattattataattatttttattattttagaaagttgaatattttgtatatgtgggtatttggtatttatatagtttttaattgaaataatgtttggtttgttttttaaatgatattgtttggaaaatataaattttaataaaatattttttttgttgtttatgtatttattagagtattttaaaatatgttagattatttaataaaaaggattttgaagaaagtatttgtagatattttaggtgaataattttaatttaaaagtattgttttgtatagaaaataagattttatttatttttgttatttttaggaaaaaaagttgataaattattatttgtagatatttttttgttttatattttatagatatatgtttttttaatttttttagaaatgttttttaagttgattaattttttagaatttaattaattttttagaattgtttaaaagattaattttttagaattgtttaaaagattaattttttagaattgtttaaaagattaattttttagaattgtttaaaagattaattttttagaatttaatttttttagaaatgttttttaagttgattaatattttattttgttaaaaataaaaataattagataattagaaaattttaagtattatatatttaattattagtaattgtatatataataaaatttttttagtgttaaattataaaaatattgaagagaatatattttatttgttttattatatttggtaaataattttaaattgtatagttttataaataaaattttatattttattatttttattattaagttattaagtattttaattttttttttagagtaattttatttgttagcgttagtaaaattagtgttatagtattttttattttgtagggattgttttgagtagtttgaatatttattttgttttatatttttaaaggttttatgagtttatagttgttataattttaattttatagatgaggaattttaattgtagaaatattaagtaatttttttaaggttatatagttagggtgaaaaagaagatttgagtgtaagaaggttttttttaaatttgatatttttaattattgtattttattttttttttgttattttaaaattgagtacgattaaagaagttaattttaaagttttgttttatatgattttttatttttgtaaggttaaaatttgaatttagataggtatattttgaaggataatagttttttgtaaaatatttttttatttggttttaaaataggaagatgttatttggagttaaatttttttgtttatttttttttgattttatgaagaagggttatatttttaaagttattttgatgatatttagattattaatagaataaatgtgtgatttagaaattttgtatatattttgttatatataaaaaagtagggttttaataataatagtattagatagaaaagatttttgtatttaatgtaaaaatatgtttaagatgttttattaatatattgttttttagaaaatatagttattaaatgatttatgttaatatatatttaagtttattagaagtttttattgaatgaaattggaacgttgtgaatatgttatgtaattttaaagagtatttttgtgattttaatttatttgagaaatgtagtttttgttattttttatataaaatattatagaaaaatagttttagaaaaatatatgttattttattgaagtagtatttttttaatattagaatttaagggaagtttaatttttaataatttttggattttttttttttgatgtttatattttttgggtattttgattcgtttttttttaacgttttattttgtttattaagattatattttaaatagtagtgtttgattttagttatggaaaaaaataagggttttattagttaatttgaaaggaatttatttttgttgtgtttttattagatatagattgaaattttggtggttaatgtaatttttttaattgtagtttataaatgatttatgtaagaatagttattttatttttttcgttgttattttgatatgaaataggtaaagttttttttttgaaaagtttggagagtttttttttatattatatgattttttttttttttttttttttgagtgtggaaataatgggattgagtttttattttagggaaaatttttataagaaatagtttattgagagggttttagaaagttattgtagatttggaaattttataattgttttttatgtttagtaaaagtaataatattttttatttttaaagttttaattttttaagtaatttattttaattattttaaggcggtgatattattagatgttataaaattaaagagttgggttatataatttttggaattttgtattaaagaagttatttataatggaaattgtggagtttcggtagatggtatttttttttttgagtgataatttaaggtttagtatgtgatcgtagatgtagaataggggtttttttgaggagttgttttttagttttaattataattttggtaaatttatagttaattatttttgatttttaaaaagaagtttgtagataagatattaatttaggaatttgaagtagttaagaggtatttaattatagttttttttttttttttagaattgttttagtggatttgttttttttttttgtaatgttgaaatgtttaattttagaatttaataaaaatatttttttatatgtaggtttttagattatttaaagagtatttaatattagatgatttaaaggtttatatataaataggtagttttgaaaatttaaattttttaaggttttgttattatttgagtatttttttttttttagaaaaaaagtttaggtaagtaaatataaggtattatggatgaaaaatataaagtgttataatattttatttatttatatagaattggtgataattttttttaaaatgataagattttgagtttttggggtttaaaaaaattaacgtattattttttataaaattgaatattaaatagaaaaatatttattttttttttatttttagaaatgtattattagtttatgtattttttaggacgatatataatttttttagtatttttttttaatgataaatagttataaaattaagaaaatttaaatatttgattttaatgtgtattttataattatttaagattgaatagaatattggttttagttttgatttcgttattttttagttttgtaattttaaataaagtattgatttatgttaggtgattgatattgagatatgtgagtaattatgtattttttttttttaaaagtgtaattgtttttaaatgtatgtaatttttttttgttagtttagtgtgtttaattgtagggataaatataaattagaaaatttgaatgttatttgagtaagttataaatttttttttaaagtataatgaaaaaaatatatttttatgacgtttaataagaaattgattttttgagtttatttatagttttaaaattttaaaataattagaggtttatagtttattttattggaattattattgtagtaaaatatagaaatttaaatattagtatatatttaattaaaataaagtttttgtttttgttttaatggagtagtattatttagtaatagttgtttataatttatttaataattaagtagtgaataaaatatttatgttaaataaggattatattagagatatgaaaaatgtatttaaataatagttatatgtagaatttttaagtggtcgtaatatttaagttaatttttaaaaagattttgaatattgttattattgtgttttcgtgttagtatatgtgtttgtaatatttattcgtaatatattaatttttttaggagagtagtgttaatatttaaaatttacgtatatgaattttttaaagtttattataaattattaaagttagttatataatattaatattggtattcgttatgtaaatggtaatttggtttgttagttattaggtgacgtatttttgtatttaaaatttggtatgtttataatttataggaaatataaaatagattatgtttttttattggtggattaaaatatatgaattaaatataatgtttataaatttgtaagacgattaaaattttttttgaggatttgtttgtatttagaaaatgtttgtgagtgaattagaagtgagtgtttattagagttgtgtcgtttttgaagttatgagggtatatataagaaattttattttagaattttatgatagtttttagtgtgttgtatatttagatattttttgtaatttttttaaagtttatttaatagtagaatttttttgtaaaatttatagggaatataagatgtattgttttaagttattttaattttatttttatttatgataaaaaaaataggttgaatagtttttttttaattttttttgagtttaagaatatataaatatatattagtaaaattttatatttattgattattttttgtatttaaagagaaagagggaaataaatagaatttaatgtgatgttaaggtattgtaagtggtaaatatttttttattaaagttggattgggaagaaaaatagttatagtgtttataaaaagtttgtaattacgaggtaattataaatatgttgtaattttttgagttaaaatttttaagtttgtagtttttttaataaatggttggtgggggatagtagttatttggtattttaaaaaaggattgtgagttgtagtattttttgggaagagtaggatagggaggaaaaggggagaggaatgagaaaggaagaaggattgagagtttaggggaaagaaagggtgaggaggtaaggagagagagaattaaaaaaaagaaatggaggtataaggaggttatatggggagtagggagggagtaataggtagggaagatagaggaggagagaggagtagatatgggtttgtttaggaaggggtggggtgatgagtgaagagaagtttaaaggagttaaaaggggtggagagagataaggaggagggtaaagcgaaggagaggaggggtaaggaggagaggaaattaagggaataaggaaaatgggtgtttttttttttttgtgtttatgggttgaatataattgaagatattttattgtatatttatttttttttttatatatatatttatatgtattagttatgaggataataaatatatttgatattataaataaaaattaaatttttatgtagtgttttttgtaaaatttatatgtttaaatgtaattatgtttagttatgtgtaataaaaattgtttaataattttttttagttatttttatatttagtatttaaatatttatttttatggaagtttgtattttaatttgtttagtatttttatgattatggtaaataaaagaatatttttatataaataatgagataaatgtgtttttaggggaaattagaatatgaaaaatattatatgtaattattagaaaatatagtaaaatagttttttgaagttaaatagtattagtatttttattttgtttgtagtaaagttaaattttttgttgaaatattttaaaaaatattttttttattaatgcgaatgtggttaaaacgtagaatatgtggaaaatattagttttttaatattaagttattagaaaagatgaattaattaattatttttgaaataaaataaaaataggaataataaaatattttagtagtttgatttttttgaagaatgtttataggtattttgtagttattttatagaaatatatttaatgattttgataatgcgtagaatttttttttagattgtttttaatttatgatatttgaaaggtatttttatttagaaaataatgtttaatattttaattttataaagaatttagtagataaagaggaatataaaattattgtaagagattaataatttttagattgtttggggaagtattttaagatgttaataatttaggagggaaaaattttaaagttatttttaaaagtttttagtgtttttaatatgaaaataagttagtataagaatattttattttaattatagaatttttaaaaatatatataacgcgattattttttaagtaatgtaaaaagtatagttatggttagtttaacgttttataatttggagtttatagaggaaattattttgaattaggtaattgatttttttttttatatttttttttgtgaggagaagaaagataaaaattttataaagttttttgaaattagtatttatttatttttttgttgtgttaaaataatagtgggatgaagtagagcgagaagtagttagttttttttttgtataaagtttattatgtttaaatattagatatgagattttttgtgtaaaaaggagaaaagaaaagtagtttaaagtagtattattaagttgttttttgttttttagtatcgggttcgttataaaatttagttattgagatttttttgttttggttttaaataggaaaaagtttggttttttttattttttagtttttttttgaaatatgagagtcgtatttatttttttagtagtaaaagaaatgataaatattttttttttttttatagaagatataatttatagtaagaaaaagagtatatttggagtttgtatgtatttgtttatgtaaaagtttttttatatattttatttttatatatatgtttgtataatttaggaacgtatagaaatgttttgttttgttttaatatatataatgtaaatgtatatatttttatttttttttatgaagttaataattgtataattttgaaaaattgtttgatgtttatttatttagtatgtttaatttatagaattgatttttttagaagatttttatgttgggattttgttagaagtaattttaatttaatttaaataggagattgtaagagatttacggaaagaaatgttatcgtatgttttttcgatttatttatttattttgggttttagaagttaagttttaggtaaatattaaaagataaagtattttagtaatgtttgaatggttttttaaaagttagatatttatttatagttgtttttattttttataaatttttttagtaagttagagtgtttttttgtgagatttttaatttttatgttgtttgggaaagatagagtagatttttttagagaaaaatttagtttttttatgatataattttttaggaaattggaagagaaagagtttattatatagaatagtaaaagagtattagagaaagtggttattttttttgtattattttaaagattagtataaatatttttaatttagatttttatgtgtatattttttagatttttatttataaaattttttaatgtatttttggatttatttaagtagtaatttttgtgttatatttgaaagaggggtaaatattatttataggtttttgataaatttttgtaggaaaaatatgtttgtttatagtataaggttatatttggtaatggagatatttttttatattttaattattagtttatagttagtttatttatttttataatttacggtggatattttaattttaattaaggttatttgaattaattttttttatttttatttaaatatgttcgtttttatgtttgtgtatataaaattttttttattttatattaattaatggaagttatttttttatgttttaatgtaaaatttttttttttaagtaaattattttttttaaattaatttttattttttttttttttttaatttgtgttattaaatttttatttaatttatgttatatgtatatttttaggtgtatatgaattttgtaagtatggatagtggtaaatttgtttttttgttttttgtattttttttttttttttttttgcgacggggtcgttttttcgtttaggttagattgtagtggcgtaatttcggtttacggtaagtttcgtttttcgggtttacgttatttttttgttttagtttttcgagtagttgggattataggcgttcgttattacgtttggttaattttttgtatttttagtagagacggggttttatcgtgttagttaggatggttttgatgttttgatttcgtgattcgttcgtttcggttttttaagtttttttatatttttagttataaggatataaattaagatattttaatgtagatgatattatttgatgataggaaaggaaaattagaacgagattaattttttgtgtatttttattttagattggagagttattgtttgggggcgtgggagaaaagtaattgttgagaatggttatgaatataagtttttttattggattatagtagagatgttggggaaaggttgttatatgtatttttttgttttttagatatttttgttttgtatataaaaaatattttttgtgtttaaattaatttagaaatatagttttttttatgatgtttttgtatttacgtagaatttatatatttatattagattttttttattgttttaggtggtttataaaagttgaaatttattgaatttttttattagatttattttttattgtgaaaaattagaaatgttatttttaaaataatgtttgttatgttttattttaggtattataaataaaattattattgttttaaaatttttaatttgtttagttatttaaataaaagttttatatttatgagaaaaatttatgattgatgtatttatttaagaaatattagttgatgttttgtatatggaaggattgttgtattttaaggtttttaggagagatttagagaatttattttttagatattttgatttacgattttttattatttcgaatatggaggttttgtattaggattttttgtattttgtgttttagattttatttttttattttttgttaaagtattttttaatacggggttaaagtattttttaatatagggtttgaattaggtgaaatgtatatatttttgaattttattatgttatttaggaattgttgtttttattgttatttagttatatatttttttttatatttttttgattttattgatgttaattaggatatataaatatgttattttgttttttggattgtatttggagttttaatataaatttaaatatttgtattaattaaagtattgattaatttggattttttttaataaagagagtgtttggaaagatgaggtaaagtaagggtgtggtagattattaattaaaaatttaaattttttttaatttagtggaaagtggagtttgagagagatgtataagtatagttgtgatgaatttagtaggttagtgaatgttagtagcgttttttataatagtattaagaaaattaattatttttattatggaaaatatatggaatagaaatgttttaatgttttttttttttttttttttttttttttgttgtgcggttttatgtgtgattttttttttgaagttagtaagatgttttatttttagggatattttttagattttaaattattgtaaagttatttaaaaattatttgtgataatagaattattaatataattgtaaaatataatgtaggttttttttattatttttagagaggttgattagtttatttagttgataaaggtaaaattatatttgaagagttgtgttttttttaaaagaatttgaataaatattagtatgtgtatagtagagttaaaaatatggttgaaaaagttatgttgtatttgtaggatttaaatatatttaattatagatatgtttaggattgaggtaaattatattggtagtgggatatgatagtttagtttttgagtgattatatgattaagtttttaagatttttttttttaatttttttttagtttttaaggtagagtttattgattttttgttttttttttatagaattattttaataattatttttttttagtttggaaattttatttttgtataagatttatatttttttgatatttagtaaaataaagttttagtaaaatttagttaggaaatacgaagtattttaatttttatttattttttgttattaaatttaaggttttaaatttttatttttgtattttgtaattgaaaagtattttaagaatgaatagaaagtttaaagaggttatatgatttttaaaattatttattggaattgtaaataattaaaaatttttatttttgtataaaatttatatttttttgatatttagtaaagtaaagttttagtaaaatttagttagaaaaaattgagtattttgatttttatttattttttgttattaaagttaaggttttgaatttttgtttttgtgttttgtagttgggaagtattttaagattgaatagaaagtttaaagaggttttatgatttttaaaataatttattgtaattggaattgattagtatattttataaatatttttattatgttttttattaattattgattgtggtaaagatatttttacgtaatttagaagtgtggtaaatataaatttgatatttaattttgtatgttttttaatgaggtattgtgaaaggatgaaaaaaatgataatgttatggagttaatggttaatttataaaaattattattttgatttttgttttgttattaatttttgagtaatttttagtattgtatttaagtaaaagtttattattttatatttaatgaagtataattttagggtatgtaaaagagtttatatatgtgtttttgtgtgtttgcgtgtgtatatgtttatatattttttatatatatatgtataattaaatacgtatgtatatatttttaaaagttgataaaaatttaagtaagtaaaaatttttaggaaatttttttaatatatatgtaagataatttgtatttgttatattaatgttgttttatataagtagataagtagttatgagtttttgtttatgtagatataaatatgttatttgaaattttatttaatataatagattattaattattgaaagggaaattattggtaagtttttatttgaattgtgaaattttttgaagtattgtaagtatgtttttttgaacgaagttttgatatatttatattttaattatagttttatttattattataattattattgtaattatatttgaaaatttataggaaattgaaatttatttttttatttaattttatttttgaatagtgtgattattttataaatttattataggggtgatatagaaattgggatgttatatcgtgaagtagtttaggcgttttttgttgagtttttagttaatttaattatttttagggttgaagttttattttgtaaattttattagattttttattaaatataatttgttatttgagttatttttaggaatttttagtaatatttaatatagttgtaatagttttttagatgta

SEQ ID NO: 441 - DNA, 5720 bp, Artificial Sequence
  chemically treated genomic DNA (Homo sapiens)
ttgagttagtatgaggttagggaggtttttgttaatttgaggttggagattgtttgtgtatttgtgggtttaggattgggttgggtggatttttgagtttttttttatttttaaaggtattatttttgtgtgtgaggatatcggacgtagttttttgatttatggtcgtcgtatttttttggttgaatgggaaagtcggattgcggtaatatggatttttgggagaggttttggagttttggtttggtagatatttgggaggtgtagggttggggtttggtatagcgtagtttgtttttataggtatttttggtgttttaggtagttgttatttgtaggggtagtatagtgggagggtagggtataggtgttgatggttgtggagatgggcggggtttatggaggtttatagtagggattttttttgtttttttttttttgggttggggatagttgtatgttgtttgtgggagatttttgttagttggatgatgttgattggttgaggtggtggttaggtgttcgttagttagtatgttttttgttttattttgtaggaggtggatgttagtgtggtacgtgagatttgttttaagtatatttatgattagtgtttagtagtggttggatatggtaagtggtttagggggtttgttttttgtttatttttttaggtcgtttttttggtttttttttttatttttgttttcgtattgttgtttagtttatagagtagttagttaaggttttaagtagttttttttagttttttggttgttagggagtttttgtttagaaaatttgttttagtagttttttgattgtttgttaaggtgtttttattaatattttgtattcgttaggtaacgggtatttttatgtggggtggggttttaagggttagaatatgaagggataggtttagtatttttgggggaatgtttttttttttttttttatttaaagtttgttttgtgttgttttgggtagtattttcgagttgggtgcggtatagggttaggtgtttttgtgtaggttaggtattttattttgacgttttattttatttttataggttttattgagtagtttttagattataatcggattcgtagcggtatgttttggttgcgtttttaggcgggaagtttatgtaagtaagagggtagggtcggggtttgtggttttttttttattataaatatagtatttcggtttttttaatttgtgttataggtgattattaataaaattttttgttgagaagtgtgttattttttttttggtattggtatggagtttatggggtagtagatggggagtaaggatttttttttagttttgtggtttttggatttttttgtttttttataggttgatgtgtttttagttaggggtaagcgtgggggttgtagttgaggtcggaagtttttgatgtttatagggagttgagtttagatgtttttatttagttatttaggggagttttttagttagttggttttaagattgggttgtgggagtttataggaagtgtaaatttagtttttgtttttgtaggagttttagtttggaatttttgtaggtttaggtgggaaattttttattgtggattttgtgttaagttattttttggtggtttttggtggattagaaggggttaaggggtgtttttaaggatgttttttgtgtgtgtttattttgtattttgggaggaggatagtttggggtatagtgtttttatttggtttttaattgttgtttggataagtagggtaggaattttttgttttcgttgatttaggttttaagaatagttttgagtttagtggggttcgagttttttttttttattatatttgttttaggtaagtttagagttgttggtttgataattttttttttatttttttgaggtagttaggatttggtatagtttttagttatttagtttttttgttattttttttggttttggtttttatggtgggtgcgtaggtaggttgttttttttgtattttttagtgtttttatagttaggttttttgggattttagggggaagttgaaagcgaggggtttaatttttttttgaggaagtcgttgtttggtagttataagtagggtgttgggataaggttttttagaagatggttgtttagaagtttttttagtatcgtagtttggaagtagtttaaggaatttttgtattattattattttgttttattgttttttttttattattggttgttatacgttgttaattcggagatatttgttaagtattttttacggttcgggattggggtattgcgtagattattttattttgtgaacggttggagagaagatgttgggtagcgtagaattttgataggtttaattttgggtgtttatggaggtgtaatatttaggtaggggaataagtgttaagtttgttgttaagtttgagtttttggaggatggggttttatttttaagtttagtttggtttttagaggttataggtgtgttggatacgagagtttgagttgttgggagtggtttggttttaagggattttgcgtattaagttagggattttggtttttattttggagttatgttggggaggtgtgttggaggttattgtgaagagaagtgatttggttagagttgagatttagtatggggatttttaggttatatttttgtattagttttggtgagttgtgttgtggtagaatagaggttatggttatacgaattggagttagttgtaggggatataaagaggattatatttttagtagggttgggagacgcggaggtacgagtgggttggaggagggtaattttttatagtttagtgaggagtttggtggtgtttagggtatagtgggatgtgtggggttgggatttgataaagaggttttggttggaaatagatggggtgaggtagtgattgaggttagggaaggaaatgtttagggaaagtttgggagggagaaggatgtgttttgggggttttatcgttttgatggggttgtaggtaggtattggtttcgggttgtgttttaggttgtgttttttttaggaggttagagttggggttttagagggttatatttttgttcgtgagttttatagaagttttagacgtggagttattttaattttatttttatttttttaatagttttttttagtattttttgagagatttttttatagtagtttgtttttttttttggaggtattttaattttgatgaggtttgtttgagtatttatttttttagttgggttttttgttttttttaagattggtttacgtgtgtatatatgtttgtatcgtattgtttatgttattggtttgtttttgttcgttttggttgtacgggaggaggtgatagttttagggggaaggggttgtttgtgtgataatatatttggttttttgtagttttttatttggagtatattttgtagggatggggggttttgggatatggttgaggagattttgattttggaataaggttatagtattatgttttaggatagtttggggggttagtaataagggatagagttttagttttttttgggtaataggaaagtaggtagtatggatggtttttattgtttttagttttggttatattagagttttcgggttgtggaggagtttagttagtgttgtttttatatttttttgtggattttaggggaggttgtggggtcgggtatattagaaggggtttagtagttttggtgagtatagatgtgttttttgggttgtttagagttatttaggattagtaggaaaaaaagggggagtaggatttagatgggggtttgttttttttagtagtgtttttttgttttagtgttatttatttaatggagagatatgtatatatagagttttatttttttcggatagtggttttggcgtggtgtgtgttggaggattgtttatagttttagaagcgaagttgggggagggtgtgaagttagtttgggtaaggggataggagtaaggtagggggtagttatgaagttggaagttataggtattatgagggtagtgaggaaaggaggaaggggtttaaggggatttcggtttggtaggggagatgggtggtagggatttataagaaaagtagatggaaggagaggatgtttgtgggtgaggatatgtaggtagggggatttggtttggggtatggagggttcgatttttgagagatgagttgttattgtgggtggtttcgttttttatagatgggcggttttttttttgtaggtatagttggattgtatttgtttgtgatatggtaggggatgtgggatattgggatgtatgtataagtatgatataggttttttttttttttcggtttattttttataaagagggggtgagttatttggatttaggttaaggggattttggtttttttaagatcggtttagagttatttatttgttagggttttttgtttgttaaggagattcgggtggggtttaggaggtttattagatagatggttgaattataggagtggtcggcgggatttatggtttgagggtttgtttgggtatttttattggattgggggtgagttatttttaattgtagttttattttttacggcgttgttgttttgtggttttgtaggaatttgtttattttttagtttggttattgtgattgatttaaagtagttaagatttgtgattttagatggagttaggggtatttttttagtatttgtttatgtagaattttttgggaaatttttagaagttacggggggtcggggggtttatagttaagtgcgttatatcgtttgtttgggggaggggtggggggggcggcgattttttagggatatgggtgagggcgggtgtttgggttttcgtttgtcgtttcgtttttcgagattagggatttttttttgttttgttcgagagattgtagcggcggcggcgggagcgggcggacgcgtaggtaagattaggattcgggttggaggggcgttgggttcggatttgttaaggttacgggggagtaagggatagaggcgggggttttagttgacggtttttattgtttaggatgacgttgcggtttttggtggtcgcgttttgcgtcgggattttggtagaggcgtttcgagtgcgagtttagtatagggagagaggtgggtatcgtaagggaggattcggttcggggtattgtatcgtgttatttttcgttttattcggtttttatttttaatatttttcgtttataatttagttaattttacgacgtttcgcggattttttttaattttgggatttttcgaatttttcgcgatcggtgttgggttttttaaatcgttttttattttgtttttatttaaattttggttttttggatgcgtgcggggttttttgttttatgttaatttacgtcggtttttagaggttgattttagttttaagtttatattcgtgttggcgattttttttttttcgtatatttttaatttttcgcgggagtttgttttgggatttatcgagtttaattttttttaaggtttttaggtttaggtcgattcggttttggtttgtataagatgaggtttattttttttattattttaagttttagtgaggttatcgtgcgggtaggcgggtggttggttttttagaagaggttttgattttttttgttcgttttagt

SEQ ID NO: 442 - DNA, 5720 bp, Artificial Sequence
  chemically treated genomic DNA (Homo sapiens)
attggggcgggtaggagagattagggttttttttgggaggttaattattcgtttattcgtacggtggttttattgggatttgggatggtggggagagtaggttttattttatgtaaattagggtcgaatcggtttgagtttgagggttttggagggagttgagttcggtgggttttagagtagattttcgcggagggttgggggtgtgcgggggagggagagtcgttagtacgggtgtggatttgggattgaggttagtttttaggggtcggcgtggattggtataaggtaggggatttcgtacgtatttagggagttagaatttgggtaggaataggataggaggcggtttagggaatttagtatcgatcgcggagggttcggggagttttagaattaggaggaattcgcggggcgtcgtggagttggttgggttgtgggcggggggtgttggggatgaaggtcgagtggagcggagggtggtacggtgtagtgtttcgggtcgggtttttttttgcggtgtttatttttttttttgtgttgggttcgtattcggggcgtttttgttaggatttcggcgtagagcgcggttattagaagtcgtagcgttattttaggtagtaaaagtcgttagttaggattttcgtttttgttttttgttttttcgtggttttggtaggttcgagtttagcgtttttttagttcgagttttggttttgtttgcgcgttcgttcgttttcgtcgtcgtcgttgtagtttttcgggtagagtagagaaaagtttttgatttcggggggcggagcggtaggcgggaatttaggtattcgtttttatttatatttttgagaggtcgtcgttttttttattttttttttagataaacgatatgacgtatttaattataaatttttcgatttttcgtggtttttgggaattttttagaaggttttgtatgggtagatgttgagggagtatttttaattttatttaaggttataggttttggttgttttaggttaattatagtgattaggttgaggagtggataggtttttgtagagttataaggtagtagcgtcgtggggggtggggttgtagttggggatgatttatttttaatttagtgggggtgtttagataagtttttaggttatgggtttcgtcggttatttttgtgatttagttatttgtttggtgggttttttgggttttattcggatttttttgataggtaagaagttttggtaaatgagtgattttgggtcggttttagggaaattaaggtttttttggtttggatttaagtaatttattttttttttgtaggggataagtcggaaggaggagagaatttgtgttatgtttatgtatatattttagtgttttatattttttattatgttataggtagatgtaatttagttgtgtttgtagggagggggtcgtttatttgtggagggcgggattatttatagtgatagtttattttttaggaatcgagttttttatgttttaggttaggtttttttatttatatgtttttatttataggtattttttttttttatttattttttttgtaggtttttgttatttattttttttattaggtcgaggtttttttgggttttttttttttttttttattgtttttatggtatttgtagtttttagttttataattgttttttattttatttttgtttttttatttaggttgattttatatttttttttagtttcgtttttgaggttgtggatagttttttaatatatattacgttagggttattgttcgaaggaggtggggttttgtatatgtatatttttttattagatgggtgatattaaggtagagaggtattgttaagaagggtaggtttttatttgggttttgtttttttttttttttttgttaattttgaataattttgggtagtttagaaagtatatttatatttattaaggttgttgggttttttttaatatgttcggttttatagttttttttgggatttatagggagatatggggatagtattggttggatttttttatagttcgaggattttggtgtggttagagttggaggtagtgaagattatttatgttgtttgtttttttattgtttaaggaaggttggggttttattttttattattgattttttaaattattttggggtatagtgttatgattttattttaaggttagggtttttttagttatgttttaggattttttatttttgtaaggtgtgttttaggtggggggttgtagagaattaggtatgttattatataggtagttttttttttttaagattgttattttttttcgtgtagttagggcgggtaagagtaggttagtggtatggatagtacggtatagatatatgtgtatacgtgggttagttttaggggagataggaggtttagttgggagggtgggtgtttaggtaaattttattagaattgaggtgtttttaaaagaaaggataggttgttgtgagagggttttttaaagggtgttgggagaggttgttgagaaggtaggagtaaggttggaatgattttacgtttggagtttttatgagatttacgagtaggagtgtggttttttgaagttttagttttggttttttgggaggaatatagtttagggtatagttcgaggttagtgtttatttgtaattttattagggcggtggagtttttagagtatattttttttttttttaagttttttttgaatatttttttttttggttttagttattattttattttatttgtttttaattagggtttttttattaggttttagttttatatattttattgtattttggatattattaaattttttattggattatggaagattatttttttttaatttattcgtgttttcgcgttttttagttttgttgggaatgtagttttttttgtgttttttatagttggttttagttcgtgtggttatgatttttgttttgttatagtatagtttattaagattgatatagaaatatggtttgagagtttttatgttgaattttaattttgattaagttatttttttttatagtaatttttaatatatttttttagtatggttttagggtaaagattagagtttttggtttggtacgtaaggttttttagaattagattatttttagtaatttaagttttcgtgtttagtatatttgtagtttttaagggttaggttgggtttagaaatgaagttttattttttaggagtttaaatttgataatagatttggtatttgtttttttgtttgggtgttgtatttttatgagtatttagggttgggtttgttagggttttgcgttgtttagtattttttttttagtcgtttataaagtagaatgatttgcgtaatgttttagtttcgggtcgtagaaggtgtttaataaatgttttcgaattggtaacgtatggtaattaatggtgagggaaaggtagtggggtagggtgatagtgatataagggttttttgggttatttttaagttacgatgttggggggatttttgaatagttattttttaaaagattttgttttagtattttgtttgtgattgttaggtagcgatttttttaaaggaaaattgggtttttcgtttttaatttttttttgggattttagagaatttgattgtggaagtattggggggtgtaggaggagtagtttatttgcgtatttattatggggattagagttaaaagagataatagagggattaggtagttaagagttgtattaggttttggttgttttaggaaaatggggaggggattgttaggttagtagttttggatttgtttgggataaatgtagtagagggagggggttcgggttttattgagtttagggttatttttggagtttgagttagcggaggtaaaggatttttgttttgtttgtttaggtagtagttagaaattaaatgagaatattatgttttaggttattttttttttagaatgtagagtaaatatatataagaggtatttttggagatattttttggttttttttggtttattagggattattagggggtgatttggtataaggtttatagtgaggggttttttatttgagtttgtagggattttaggttgggatttttataggggtaaaggttgggtttatattttttatggatttttatagtttaattttgggattagttggttgaggaatttttttaagtggttgagtggaaatatttgggtttagttttttgtaggtattaaagattttcggttttagttgtaatttttacgtttgtttttggttgaggatatattagtttgtgggaaggtaggaggatttaggagttatagaattagagggaagtttttgttttttatttattgttttatggattttatgttaatgttaaaagagggatgatatattttttagtagaggattttattggtggttatttgtggtataggttagaggagtcgaagtgttgtgtttgtggtgggggggggattataaatttcggttttgtttttttgtttatataggtttttcgtttagaagcgtagttagaatatgtcgttacggattcggttgtagtttgggagttgtttaatggggtttgtggggatagggtggagcgttagggtggggtatttggtttgtatagggatatttggttttgtgtcgtatttagttcggagatgttgtttagagtagtataagataggttttgagtggaaagagaggagagaatatttttttaggggtgttgagtttgtttttttatgttttggtttttgaagttttattttatatggaggtgttcgttatttgacgggtgtagggtattgatgaaggtattttggtaggtagttaaggaattgttgggataggttttttgagtaagaattttttggtagttaggggattggggagagttgtttggggttttaattggttgttttgtaagttgagtagtagtgcgggagtagaggtggaaggggaggttaagagaacggtttgaggaaataaataaagagtagattttttaggttatttattatatttagttattgttgggtattggttatagatgtatttggagtagattttacgtattatattggtatttattttttgtagggtgaggtagagggtatattggttaacgggtatttggttattattttagttagttagtattatttaattagtagagattttttataggtagtatgtagttgtttttagtttaaaagaggaaaggtagaagggatttttgttatagatttttatgggtttcgtttatttttatagttattagtatttatgttttgtttttttattatgttatttttgtaggtgatagttgtttaggatattagggatgtttataggagtaggttgcgttatgttaggttttaattttatattttttaggtgtttgttaggttaagattttagaattttttttaggggtttatgttatcgtaattcggtttttttatttagttagggggatgcggcggttataggttaggaggttgcgttcgatgtttttatatataggagtagtgtttttaagggtgagagaaggtttagaggtttatttagtttaattttggatttataggtatataaataatttttagttttaggttgataaggatttttttgattttatgttgatttag

SEQ ID NO: 443 - DNA, 6534 bp, Artificial Sequence
  chemically treated genomic DNA (Homo sapiens)
gtgtgataaagtgtagaaaagtgtgataaagttaattttaagtattttttttattttttttaggttttgtgtattgtttagaaatgttttttatgataaaaaaaattattttttaaatttattttaggttttttataatttgttatttttatatatgggtttttaattaatttgtttaagaatatagttttggtatgttgatatagaaatttaagttgaatttttttttgaatatatggttaattattttaatatttagtttattttttttttattgtttttgaatttaatttttattataaattaaatatatatatttttattatagattttaaatattatatatatatatatttatgttgtttagttttgaaattttgggtttaagggatttttttattttggttttttaaagtgttgggattataagtatgagttattatatttagttatttgtttttaagtttttatttttattttttgtgtttttagagacggttttgttttgttatttaggttaggatgttatggtttaattatagtttattgtagttttaaattttagggtttaagtgatttttttattttagttttttaagtagttgggagatattattatattttgttaatttttttttttttttttgtagagaaaggggttttattgtgttgttttagttggttttgaatttttagttttaagtgatttttttgtttgagtttttaagagtattgagattataggtatgagttattatatttggttaatatggagtttttttatatagaaatgtagatatatgattttttatttatttagggtttttttgtgttttaagagttttatgtaagaagtatttattgaggaggttgaagtgggaggattatttgagttttggaggttaaggttgtagtgagttaagattgtgttattgtattttagtttgtttttaaaaataaataaatatttatatgtaattggttggaatttttagtttatgttttgtggtttaaagttttttttaaaatttatatatatatatatatatatatatatatatatatatatatataattttttttttttttttttttagatagagttttatttttgttgtttaggttggagtgtagtggcgtgtttttagtttatcgttatttttattttttaggtttaagttatttttttgttttagtttttttgagtagttgggattataggtatgtattattatgttcggttaattttgtatttttagtagagatggggtttttttatattagttaggttggttttaaattttcgattttagatgatttgtttgtttcggttttttaaagtgttgggattataggcgtgagttattttgtttggtttaaaatttattttgattggttttagttttaagttttagttattattggattggtttagtttataattttaagtgtggtaggatgtattttttaaagatggttgtattaataataaaaattgtatttttaggttgggtgtagtggtttatatttgtaattttagtattttgggagtttaaggtagaaggattgtttgagtttaggagtttaagataatttgggaaatatgataagattttgtgtttataaaatataaaaaattagttgggtgtatggttgggtgtagtcgtttacgtttgtaattttagtattttgggaggtcgaggtgggtagattatttgaggttaggagttggagattagtttggttaatgtggtgaaattttgtttttattaaaaatataaaaattagttaggtatggtggtaggcgtttgtaattttagttattcgggaggttgaggtaagagaattgtttgaattcgggagatggaggttgtagtgagtcgagattatattattgtattttagtttgggtaatagagtaagattttgttttaaagtaaaataaaataaaataaaaaattagttgggtgtagcggtgtatgtttgtagttttagttatttaggaggttgaagtgggaggattaggagtttaggaatttgaggttatagtgagtggtgatttttttattgtattttagtttaggtgatagagggagattttgttttaaaagtaagaaagaaagaaagatataaataaataaattttattttttattttttttttaaaatgtgatattggttgggcgcggtggtttatgtttgtaattttagtattttgggaagataaagcgggtagattacgaggcgggcggattatgaggttaggagttcgagattagtttgattaatatgatgaaattttatttttattaaaaagataaaaattagtcgggagtggtggcgtacgtttgtaattttagttattttagaggttggggtaggagaatcgtttgaatttaggaggcggaggttgtagtgagttgagattgcgttattgtattttagtttgggtgatagggtaagattttattttaaaaaaaaaattaaaaaatgtgatattaatatttatttttgaggtggggtttttgttttttttttttgattatgggtagatttttgtaattgttttaatagtaagaatgtggtgaaggtgttattgtatgatttttaaggacgggttttgagtggtaattttttttagtttggtgtttttttattttttttgagttgttatagaggatgtttagttattttgaagttgttatgttggagaaattttatggaaagtttataaagagataaaggagagaattgtttaagtaattttagttgtttcggttttagcggttgaaggttttttagtattgatattagatatgtgagtgaagaagttttttaggtgatattaggtttagttattatttgattatgattttataatagattttaggttagatcgaattagtagagttatttttaaatttttaatttaaagaaattgttattttaagttgttgaatgttagggtgatttgttatggtgtaataggtaattaatatattaatgtgtgttgtttagattgtgaaatttattttttttttataatttttatatataaaaagaaaatttatttatataaggttttttttgtggttagtttataaaagatggagagataagtgatgtgaaataaataatttaaaattgaatttggatattttagttttaaaaattttttataggtttattttatttattttaagtaatgtttattattttttttttatatttttttttttttgtttttattttttaataaattttaaatttttttttattttgttaggtagagtaattatatttttttaagtttttttttttaaatttagttttaggataattttttaaaatttagagttttttgttaatttgtttaatggagttggatttttttagttttaattaggtttattattttagttgatttgtttgtggttagtttttttatattggatgttaatttagtaaaatagttatttataaattataaggaaagttaaaatgtattaagtatttattatgtgttggttcgaggttaaatgtttcgtatgagttattttatttaatttttataaaaattttttaagataaggataatttgttgggtacggtggtttatgtttgtaattttaatattttgggaggttgaggtaggtagattatttgaagttaggagtttaagagtagtttggttaatatggcgaaattttatttttattaaaaatataaaaattagttaggtattgtggtttatgtttgtaattttagttattcgagaggttgaggtaggggaattatttgaattcgcgaggcgaggttgtagttagttgatatcgtgttattgtattttagagttttttaagattttgttttaaaaaaaaaatatatatatatatatatatggattattagtatttttattttatagatgaggaaaatgagattttatagagtttggggtgtttgtggttatatttataattgtgaaaaagttagattttaaagtattttattaatattgtttaagtgagtgggagggaagggaaggttttttggagtcgggttatgttggatagcggggttcggaaattttggtgaataaagtggtagttgtttttatgaatatggagtgagaaggtttaattttaaatatattagtgtttaaggtagttgtagagaattaaaggtaatagaaaaaggggagttggatggtaggagtttggatggggaagattttaagggtaggtgaagatgttaatagttttttgtttggaggatcgaagaagggttgggttttattgtagatttttaggagatagatttgtttgttgggatagagtagggaggtgaaagcgaggtgaggaagttcgggggtgggggaggtgtatatagttttattaaagagttggaagaggtcgatggagtatttatgagacggttgatttaggaaggattgtggtatattaatatggaaaaggtttgtttgtttgtgtttggagaggaaggagttagaggagaggggagtaaggtgggcgggagttggggagagtttgtagtaagatttgtagagttcgaggtgttttcggtttgggttttggagaggacgtagggtaagtgatggggtataggttgtgcgttagggggaaggtgttggggtttgaaggtttcgaggggaattttagacggttttatgtttttttataaagaaattggattattattttcgattcgtatttcggtcgtttttcgaggatagagggtgggcgtaggaggttggatcgagcggggcggagttggatgtttggcgtcggtttttttttcggtaatttcgtcggtttttttaggtgatagtttacgtcggttttcgtttcgtttttcgtatatttaggagttttagtttattttgttcgcgaatagttagcgttggaggagcgtcgggagattttgtcgtcggtgcgtgcgcggatacgtattcgttttttttggtttcgtcgttagttatggtcgtcgttacggttttttttcgtagtttttttgtttttttttaggtggtagtgttcgttttggcgtagattgtaagtttcgtagttttttcgttgttagggtttagggtgcggggtttggagttcgggatggaggagttttgtttgtgtttcgcgtttattgatatttttagttcgagaggttatttgaggatagcgtcgcgggtaggttttttcggtgggtgtatatatggtgtttatcgcggtatcgtgaatggaggtggttgagtcggagagttaaacgggattcgtttttagacgcgcggttcggttcgggataggtagcgtggggtaggagttggcgttcggttttggtagttcggggagtttaggtggcggggtatataatggtgtttatttattcgttgcgtagttttcgttttcgtcgttttttagggggcgtcggttttaattagacgtcgttgtcgtttcgaggcggtttttcggttttgttcgtttatttacgtttttttttcgagggtcgtcgggggttgcgggcgcgcgggtagggtagagattgggttcggtcgggtgttgggtgtggtttcgagttcgtttgcggggcgttagtttggtatttcgcggtttggggaggtcgtgggtatcgggatttttgtttgggttcgagttggttttttaaaagggtcgttttttaagatttttgatttgtttagagatgggtagtaggatggagattttttagttgtgagttcgttttattttgatatgatttgtgatttttttgaaattttatatttatttaggggtattgaattgtaggtaaacgggatttagagagagggtttgttttttgggaggtgtcggttttttttgtttttttgtagtagttagggtttagtagagggaggatcgggtagttgtgttgtcgaaggggcgtttcgagtgggaagatagtattcgttttatttttttatattttttttttttgcgttttttttattttttcgtcgggttttttcgtattatggggagaggaggaggcgttgtttttgtttgtcgtttacgtaagaataataattcgagttatcgtttattgagggtcggtagtttgttaggtataattttatattttatttgtgatttatttgagttgtttacgtttttatttattttttatcgcgatcgcgtaagggtaaattggtatagtggaaggagtcgggtagatttagggcggatttttggcgtcgtcgtttatttttagtgattatggattttttacgttttgagttagttttttcgattgtaaattggggttcgtaatagcgttcgtttttcggttttgagtattttgtaagataatgaatgtatgtaatggtatatagtgtttgttatatagaagatttttaatacgtgggagttcgcggaagagttgcgtttttaggatttcgtttttagggtcgtttgtagtttcggggacgtttagttttttgtattgtttgaggattgttttatttcgtgtgtgttttttaga

SEQ ID NO: 444 - DNA, 6534 bp, Artificial Sequence
  chemically treated genomic DNA (Homo sapiens)
tttgaaaaatatatacggggtggggtagtttttagatagtgtaggaagttgggcgttttcggggttgtaagcgattttgggagcggggttttaggggcgtagttttttcgcgaatttttacgtattgagaattttttgtatagtaggtattgtgtgttattatatgtatttattattttatagaatatttagaatcgggaggcgggcgttattacgggttttagtttgtagtcgaagaaattggtttagaacgtgaagggtttatggttattgagagtgggcggcggcgttaggagttcgttttggatttgttcgattttttttattgtgttagtttgtttttgcgcggtcgcggtggggaatagatggagacgtggatagtttaaataaattatagatggaatgtaaggttgtgtttagtaggttgtcggtttttagtgagcggtggttcgggttgttgtttttacgtgaacgataggtagagatagcgtttttttttttttttatggtgcgggaaaattcgacgggaaagtgggggaggcgtagagaaaggaggtgtagggaggtgaagcgggtattatttttttattcggagcgttttttcggtagtatagttgttcggttttttttttgttaagttttgattgttgtaggggagtaggaggagtcggtattttttagaaagtagattttttttttggatttcgtttgtttgtaatttaatgtttttgggtgggtgtgaggttttagggaggttataagttatattaagatgaggcgagtttatagttggagagtttttattttgttgtttatttttgaatagattagagattttaaaaggcggtttttttaagaggttagttcggatttaggtaggggtttcggtgtttacgatttttttaggtcgcgaagtgttaggttggcgtttcgtaggcgagttcgaaattatatttagtattcgatcgggtttagtttttgttttattcgcgcgttcgtagttttcggcggttttcggaagggagacgtgggtaggcgggtagggtcgagaggtcgtttcggggcgatagcggcgtttggttggagtcggcgttttttgggaggcggcgggggcggaggttgcgtagcgggtgaatgagtattattgtatgtttcgttatttgggtttttcgggttgttaggatcgggcgttagtttttgttttacgttgtttgtttcgggtcgggtcgcgcgtttggggacgggtttcgtttgatttttcggtttagttatttttatttacggtgtcgcgatgggtattatgtatgtatttatcgaggggatttgttcgcggcgttgtttttaggtggtttttcgggttaggggtgttagtaggcgcgggatataggtagagtttttttatttcggattttagatttcgtattttggattttggtagcggaggggttgcgaaatttataatttgcgttagagcgagtattattatttggaggagaataaggaggttgcggggggaggtcgtagcggcggttatggttggcggcgagattaagggggacgggtgcgtgttcgcgtacgtatcgacggtagagtttttcggcgtttttttagcgttggttgttcgcgggtagggtgggttggggtttttgaatatgcggggggcggggcgggggtcggcgtgagttgttatttgagaggatcggcggggttgtcgggagggaggtcggcgttaggtatttagtttcgtttcgttcggtttagttttttgcgtttattttttgttttcgaggggcgatcggggtgcgggtcggagatgatggtttagtttttttgtgagaaggtataaggtcgtttgaggtttttttcgggatttttaggttttagtattttttttttgacgtatagtttgtgttttattatttattttacgttttttttagggtttaggtcgagagtatttcgggttttgtagattttgttgtaggttttttttagttttcgtttattttgttttttttttttttggtttttttttttttaagtataaataaataggttttttttatattaatatgttatagttttttttggattagtcgttttatgaatattttatcggttttttttagttttttagtggagttgtgtgtattttttttattttcgaatttttttatttcgtttttatttttttattttgttttaataagtaaatttgttttttggaggtttgtagtgaagtttaattttttttcggttttttaggtaggaagttgttggtatttttatttgtttttgaagttttttttatttaagtttttgttatttagtttttttttttttattgtttttaattttttgtagttgttttaagtattggtgtgtttaggattgggtttttttattttatgtttatagaaataattattattttatttattagagttttcgaatttcgttgtttagtatagttcgattttagagagttttttttttttttttatttatttaggtaatattggtaaaatgttttggaatttgatttttttataattatagatatgattataggtattttaaattttatgaagttttattttttttatttgtaaaatggggatattaatagtttatatatatatatatatatattttttttttaagatagagttttaaaaggttttggagtgtagtggtacgatgttagttaattgtaatttcgtttcgcgggtttaaatgatttttttgttttagtttttcgagtagttggaattataggtatgagttataatgtttggttaatttttatatttttagtagagatggggtttcgttatgttggttagattgtttttgaatttttgattttaggtgatttgtttgttttagttttttaaagtgttgggattataggtatgagttatcgtgtttagtaaattgtttttattttaaagggtttttgtggaaattgaatgagatgatttatgcgaggtatttaatttcgaattagtatatagtaggtgtttgatatattttagttttttttatgatttatggatgattgttttattaggttggtatttaatgtggggaagttggttataggtagattagttaaaatgatgaatttagttgaagttagaaaagtttaattttattgggtaggttagtaaagggttttggattttgaaaggttgttttggagttgagtttgggagaaagagtttgagagaatgtaattgttttgtttaatagagtgaagaagaatttgaagtttgttggaagatgagagtaagaggaggaggatgtaagagagggatggtgggtattgtttggggtgggtggggtaaatttataaaggatttttagaattgggatgtttaaatttaattttaagttgtttgttttatattatttatttttttattttttgtgggttaattataagaaaggttttgtgtgagtaagttttttttttgtgtgtggaaattatggaaagaggatgagttttatagtttggatagtatatattgatgtattaattatttgttgtattataataaattattttaatatttagtagtttaaaatgataatttttttggattaggaatttgagagtgattttgttggttcggtttggtttggggtttgttataaggttatagttagatggtggttgggtttgatgttatttagaaggtttttttatttatatgtttgatgttagtattgggaagtttttaatcgttggggtcggaatagttggagttgtttggatagtttttttttttatttttttgtgggttttttatgaagtttttttaatatggtagttttaaggtagttgaatattttttatagtagtttagagggagtaggagagtattagattgaagagaattgttatttaggattcgtttttggaagttatgtagtggtatttttattatatttttattgttgaggtaattgtaaaggtttgtttatgattaaggggagggaatagagattttattttaaggatgaatgttaatgttatattttttaattttttttttgagatggagttttgttttgttatttaggttggagtgtagtggcgtaattttagtttattgtaattttcgttttttggatttaaacgatttttttgttttaatttttggagtagttgggattataggcgtacgttattattttcggttaatttttgtttttttagtagagatgaggttttattatgttggttaggttggtttcgaatttttgattttatgattcgttcgtttcgtgatttgttcgttttgtttttttaaagtgttgggattataggtatgagttatcgcgtttagttagtgttatattttaagaagagaataagggataaaatttatttatttatgttttttttttttttttatttttgagataaggtttttttttgttatttaggttgaagtgtaatggaggaattattatttattgtagttttaagtttttgggtttttgatttttttattttagttttttgagtagttgggattataggtatgtatcgttgtatttagttaattttttattttattttattttattttgagatagagttttgttttgttgtttaggttggagtgtagtggtgtgatttcggtttattgtaatttttatttttcgggtttaagtaatttttttattttagtttttcgagtagttgggattataggcgtttgttattatgtttggttaatttttgtatttttagtagagatagggttttattatattggttaggttggtttttaatttttgattttaagtgatttgtttatttcggttttttaaagtgttaggattataggcgtgagcgattgtatttagttatgtatttagttaattttttatattttgtagatatagggttttgttatgttttttaggttgttttgaatttttgggtttaaataatttttttgttttggatttttaaagtgttgggattataggtgtgggttattgtatttagtttggggatgtaatttttattattgatgtaattatttttggaaaatatattttgttatatttggggttataaattgaattaatttagtggtagttgaagtttaaagttggagttaattaagataaattttaggttaggtaaggtggtttacgtttgtaattttagtattttaggaggtcgaggtaggtagattatttgaggtcgggagtttgagattagtttgattaatatggagaaattttatttttattaaaaatataaaattagtcgggtatggtggtgtatgtttgtaattttagttatttaggaaggttgaggtaggagaatagtttgaatttgggaggtggaggtagcggtgagttgaaagtacgttattgtattttagtttgggtaataagagtgaaattttgtttaaaaaaaaaaaaaaaaaaaattatatatatatatatatatatatatatatatatatatatatataaattttagggaaggttttggattataagatatggattggaggttttagttaattgtatatgggtgtttgtttgtttttggaaataggttggagtgtagtggtataattttagtttattgtagttttgatttttaaggtttaagtgatttttttattttagtttttttagtaggtattttttgtataggatttttaaagtatagggagattttgaataagtggagagttatatatttatatttttgtataagaaaattttatgttggttaggtgtggtggtttatatttgtaattttagtatttttgaaagtttaggtaggagaattatttgaggttaggagtttaagattagttggggtaatatagtgagatttttttttttataaaaaaaaaaaaaaaaattagtagggtgtagtggtgttttttagttatttgggaggttgaggtggaaggattatttgaattttggagtttgaggttgtagtgagttatgattgagttatgatattttagtttgggtgatagaataagatcgtttttaaaaatataaaaaataaaaatagaaatttaaaaataaatggttaggtatggtggtttatgtttgtaattttagtattttgggaggttaaggtgggaagattttttgagtttaagattttaagattgggtaatatagatgtatatatatataatatttgaaatttatgatgaaagtatatatatttagtttatgataaaggttaaatttaagagtagtgaggaaagggtagattagatgttgaggtaattggttatatatttagaaaaaaatttaatttagatttttatattagtatattaaaattatatttttgaataaattaattgagggtttatatataaagatagtaaattataaaaggtttaaaataaatttaaaaaataattttttttgttatggaaaatatttttgggtagtatataaaatttaaaaaagataagaaaaatgtttaaagttgattttattatatttttttatattttattatat

SEQ ID NO: 445 - DNA, 6112 bp, Artificial Sequence
  chemically treated genomic DNA (Homo sapiens)
tttatttatatatattttttttgttatttttatgtcgattttattttatgtgtttgtttttgaaatttttatgtaatgtttattacgttaaaataaataagtagattagaggcgtgggtttattcggttatgttggaattttttaatgtttaaggggtataagtgtgtcgatatacgtcgtttaattttatttttttaaaagaatttaaggatgtttgtatttagtatgtttttatttttttatatgttaaaacggtattatagattttttgtatcgaggttattttgttttttatagattgcgattttttggtaaaagttgttttaattttattttagtatttataattttatatttggtggttagaggaggttcgtttgtaggtttagttaaatcgggttgatggtattttaattatttaggtttagtttataggtttcgataattattttgatattattgtttatttaggttttgatgtttttattacggaataagtaataaaggtgtgtatgagagtttgggataaattacgtattttaggttaagtttttgttttttttattattgttaaatagggttataatgaattatattttgattttttagttaaattataagatgttgttgaaaaatttgtttttgatgagtatatttaaggtatttttttttatatgttagttttttaaaatgcgaattatgagtgtaaaatggtcgtgtattttattttacgttaaaatttatttgattatgaggtgttgtttgtatatattaaagtttgtgaaggcgttggatcggagatttatagagttattttgtgggtatcggttatgaagtacggtaattaaattggttcgattgattttttttttggagtttgttataattgtggttaatttggttatatttaaaaaaattatattgttaaaaatttaaaagcggttaagtcggtttaataaatacggttaaatgtttttgttattgtttgtttgcgttgtcgtaagggtaaatattgggtaagtatttgttatttagtttgatatagatgaaaattttttgttatagaattagggaaataggaagtaaggttagttttaggttttaatattaaatgggatatttcggatttagattaatgttgtgtttttgcgttaagtagttttaacgtagtttttagtataaataaatttatttatagttaatttagatgggttttagtttttttttttgttttagtataatgtttgtttatttttatagtaggtagtagggcggtcgatttttgtagtattatttttttaaatttattatttaattttttgtttttaattgtttttatgggggttattggttttttattttaaggttcggtgggtttggtgttaggtagggtatttattttatgatattaaaggtattatagtttatattagttttattaattttgatttttttgatgagattaaatttatgtaaatttatggtgtttgttaaagtttttgtttttatttcggttagtgagttaattgtttaattatttttattatttaatattgttttaaataaaggagataagatatggggttttgggatgggttttagcggtgaaaaagtcgtttattggattaatgtaatttttaaataatggtttatttgtattatatatatttaaggaaaaaaggttgagggtttagttgatattggggttgatgtttttattattttttttaatttatggttttttttttggtttaaatattttattaatatgaaattagaaggtgttagaaaagttgaagaagtttattagagtatatttattttggtttgtattggttttgatggttaaaagggaataatttagttttatattatgtttatttttattaattttcggggtagagatttgttggtataaattggggttgaaattaatattttatataatttttatagtgtttttagttaatatataatggaaaatatggggtttgtttttagattcggtttcggtttaaaacgtgaaaaaattattaaatttttttaagttattgtaaaagaagataaggttggtttaaaagtataatttaattattttttatttttaattatatttagtattgtttaagttttttaaatgtttttaaaaataatattttgattgtagttaaatgttattatataggtaaaaaattttttttaaacgaaggtaagttagtgttatggaaaaatttttaaattaatatttgggaatttggaataattataacgtggggaagagggtatgtttgtgttttattaggagatcgttaatttcgtttgggtgtttattaggagatttaaatttcgtgtgaatattgataataaaaattacgaggaagagacgttcgcgttagagattgtttttatatttgatgagatttgtatcgattttttagaaattggtatgttaaattaaaatgggtttggtttaattttttttaatggtaatgtaaatttttttaattaattttattttttttaattatttttttttttttacgaatttaaaaattttattatttttattagtttgaaaataatatttttttgttttttttttttttttttagtattggattttatttataataggttttatttaataattattttttttatattttttgttttattagtttttttttaaattgatttatttgttatataaaattatttttattgggtttatgtgtttttttttttatttattcgattttttatttggatggatgtttttgtagaaatttatattaacgatagtgtgtggatgtttggaattatagatgatcgttgtatcgtttagttaggagaaggtattgtatttaatgttattatgggttataaatatttttttttgtgttttggatatgtatttggttgtatttatttagaagtttaagtttgggttgtttgttttttagagagattagttatagggaaatggggatatttggtttttggttttttttttttttttttaagataaataaaaagaggagtaataggagatattttatatttttaatataaatttgtaggaaaattatattttaaaaattttgagggtttatttaaaattttaatttgggaatgattgtgttaatttatatgtagtagtattaaaaaatgattcggttgggcgtagtggtttatgtttgtaattttagtattttgggaggttaaggtaggtggattatgaggttaggagattgagattattttggttaatatagtgaaatttcgtttttattaaaaatataaaaaaaattagttaggcgtggtggtagatgtttgtagttttagttattcgggaggttgaggtaggagaatggcgtgaattcgggaggcggagtttgtagtgagttgagatcgtattattgtattttagtttgggcgatagagtaagatattgttttaaaaaaaaaaaaaaaaaaaaaattttaaaaaaataatttatatggtttagtaatagattgggtacgaaagggttatttaaaaaatagttgtttttttggcggaaaggaatgtttggagattatttattttattttttattgggaggattaggattattattttattttgtatagaaggtttagtttgtttttttttttaaaataggaagataagggtattatttttttaagtttcgtatgatattttttattttgagtttagaatatttagaaatttggaatttggttattgtcgtgtttggattgtgagtatgggaaggggaagtttttttgtttgttgtttttattatcgttttttatattcgtgattttgaattttatgataaatgttttttgaattttttttttttttttgatgtcgaatttttttttatgggatttcgttagtacgggtgtatttaatttttttgagtttgtttatttgacgtatgtagttaagaagttttgaaagatggagtgttttggttgagggttttaggttttagtaaggttacgaggtggtgattgttttttagaattttgttgggttatttttcgttttggagatttttaaaatttttatagtattaattttgtttatttatatatatagttagttttttttttcgagtttatcgcgggtagagggttagttattatgttttttatagtcgttatttttgggaaggagttttgatttcgtttttatatttttttatatttattgtttgtggggagagttgttcgttgttataagtatttagggggttgggtcgaggggttttttgtatggtgggggattatgttgtcgtgtatggaatgaaattggttatatataatagatatggtggcgttttggtcggatttaggggagtttgttttataggatgaggtttgaattgttttgagtgattagatatttagtttttgtttcgagtgtttagttatgattattgttttgatttagttaattgttttttaggggttttaggaggacgagtgtgtatttttttattgttttgtgtagtttttaatttttagagtttaggggtttggggagaagttgggaagtttggttagtggggtcggtgtttggtgatttcgggaggtgggatattattatttttagaattgtagttgttattgggatattagttttgggagattataggtgtagttagtatagtaggattttagataaggtatttagttttagtttttttatttgggaagggggttatttgtggttagaagtagttcggatttttgagtaagattagattaagaggtcggtatgtggatattttcgcgtgggtatttttacggggatattttggttatcgtcgcgcggatatttttacgaggatatttcggtcgcgcggatatttatcgcggggacgtttcgattttattttatttgttgcgtttcgcgtcgcgtttcgtatttcgttcgttacggtttgcgttcgttatcggaagcgtttttttaattttcgtagcgttatcgttattgtcgttatcgtcgtggggtttttggggtagttagggttgttcgtcgcgttgtttgcgtcggatcggggcgggtttagtttcgggcgggtcgtcgcgggagaggtgagagcgttggttagatcggggtcgaatgcggtcggattcggggcgggggtttttagatttagggtggaatattgggatagggtgtggggaattcggatcgttgtgaagtgatttgacgttgggtgggagttttcggatttggggtggggaatttggatgggaattggggaattcggattttgggtggggatttttggatcggggtggggtttttagattttttgtggaaagttgaggttgaagatttgtgttgtgatgaggggttttagatagcggtgagagatttcgttttaagattgggttgggggtttagattaggaggataagtttttttttggagtagggtttgatttggtgagggtgtggtagagttataggggagggttttatttggtttttgggttgggattagatttttagagttggagagttgtaggaggtttgggggagggtttgtggagttttagatttagagggttttggtgatttttttaataggttttttgttggaggttttggggtattttagggtttttttttgtaagagagaggttgttttattaggaaggggtttaggattttttagggtcggggggatgtgtggtgtgtaggattacgtgggaatgttagagaaaggggaagttatttcgggtttgttttgttaatagatttgttttttggatttttttagttagggatttttgtgttttgttgttttttattgtttaaagtgattttttaagtttgagggatcgtaggagttgttttgtagagtttagtgagatattagttaatgtagaaaaaatagattttatttggtaattattgataatatgagaaaaagttggttttatgttgatttgtttagatgtgtttggagtttaaagggagagtgagggagtgggaaggggtggggatttagtagagttagggaaatagaaaattattaaaattgggaagggagggttggtttttgtgaaattaattgatttgggtt

SEQ ID NO: 446 - DNA, 6112 bp, Artificial Sequence
  chemically treated genomic DNA (Homo sapiens)
aatttagattagttggttttataggggttaattttttttttttagttttggtgattttttgtttttttaattttattgagtttttatttttttttatttttttattttttttttaaattttaggtatatttagataaattagtatggagttagtttttttttatgttgttagtagttattaagtaaaatttgttttttttgtattaattagtgttttattgggttttgtagggtagtttttacggttttttaggtttggagggttattttaaataataaaaagtaataggatataaaaatttttggttggaaaaatttaaaaagtaggtttgttagtagggtaggttcggagtgattttttttttttttaatatttttacgtggttttgtatattatatattttttcgattttggggagttttgggtttttttttggtggagtagttttttttttgtagggaaaggttttggggtattttaaggtttttaatagggagtttgttggagaagttattaaggttttttgagtttggggttttatagatttttttttaggttttttgtaattttttagttttgagagtttgattttagtttaaggattaagtgggatttttttttgtgattttattatatttttattaggttaagttttattttagggagaggtttatttttttggtttggatttttaatttagttttgaagcgggattttttatcgttatttggagttttttattatagtatagatttttaattttagttttttataaggagtttggggattttatttcggtttaaagatttttatttaaggttcgaattttttagtttttatttagattttttattttaagttcggagatttttatttaacgttagattattttatagcggttcgaattttttatattttattttagtgttttattttaggtttgaaggttttcgtttcgaattcggtcgtattcggtttcggtttagttagcgtttttatttttttcgcgacggttcgttcgggattggattcgtttcggttcggcgtaggtagcgcggcgggtagttttagttgttttagaagttttacgacgatggcggtaatggcggtggcgttgcggggattaggagggcgttttcggtggcggacgtaggtcgtggcgggcggggtgcggggcgcggcgcggggcgtagtaggtaggatggggtcggggcgttttcgcggtaggtgttcgcgcggtcggggtgttttcgtgagggtgttcgcgcggcggtggttagggtgttttcgtgggggtgtttacgcgggggtgtttatatatcggttttttggtttagttttgtttaggagttcgggttgtttttagttataagtagttttttttttaggtggggaaattggggttgggtgttttgtttaaggttttgttgtgttgattgtatttgtggttttttagagttggtattttagtaataattatagttttgaagatgatgatattttatttttcgaggttattaggtatcggttttattggttagattttttaatttttttttagatttttagattttagaggttagaggttgtatagagtaatgggaggatatatattcgtttttttggagtttttgaagaatagttaattaaattaggataataattataattgagtattcgaagtagaggttgggtgtttggttatttaggatagtttaagttttattttgtaggatagatttttttagattcgattagagcgttattatatttgttatgtgtggttagttttattttatgtacgataatatggttttttattatgtagggggtttttcgatttagttttttggatgtttgtgatagcgagtagttttttttataggtagtgagtgtagaggggtgtaaggacggggttagggtttttttttagggatggcggttatgggaggtatggtggttggttttttgttcgcggtggattcgggagggagggttgattgtgtgtgtgaatgggtagagttggtgttatggaggttttgggggtttttaggacggagggtggtttaatagagttttgggaggtagttattatttcgtggttttgttgagatttggaatttttagttagggtattttattttttaaagttttttggttgtatgcgttaggtgggtaagtttaggaaggttaaatgtattcgtgttggcggagttttataaaaggggattcggtattaaaaggaggaaaaaggtttaaagggtatttattatggggtttagaattacggatgtgaggggcggtagtggggataatagatagaaaagttttttttttttatatttatagtttagatacggtaatagttaaattttaaatttttaggtattttggatttagaatggggaatattatacgagatttagggggataatgtttttatttttttattttaagggaaagaataaattgaattttttatgtaaaataggatgatgattttggtttttttagtaagaaataaaataagtagtttttaggtattttttttcgttagaggagtaattgttttttaaatagttttttcgtgtttagtttgttattaaattatatgagttgtttttttggggttttttttttttttttttttttgagatagtgttttgttttgtcgtttaagttggagtatagtggtgcgattttagtttattgtaagtttcgtttttcgggtttacgttatttttttgttttagtttttcgagtagttgggattataggtatttgttattacgtttggttaattttttttgtatttttagtagagacgggattttattgtattagttaggatggttttaattttttgattttatgatttatttgttttggttttttaaagtgttgggattataggtatgagttattgcgtttagtcgagttattttttaatattattgtatgtgagttaatataattatttttaaattgaagttttagatgggtttttaaaatttttaggatatggtttttttataggtttatattgaaagtatggggtattttttattatttttttttttatttgttttaaaggagaaagggagaggttagagattaaatgtttttatttttttatagttaatttttttggaagataagtagtttagatttgagtttttagatggatataattaggtgtatgtttaaggtatagaggagggtatttataatttatagtaatattaaatgtagtgtttttttttggttgagcggtgtaacggttatttgtagttttaggtatttatatattatcgttagtatagatttttgtaggagtatttatttaggtgagaggtcgaataagtggaggaaaaggtatataagtttaataagaataattttgtgtagtaggtaaattagtttaaggggaaattggtgagatagaaagtgtaaggaagataattattaaataaaatttattgtaagtgagatttagtgttgaaggaggaagagaagaatagagggatgttatttttaggttaatagaaatggtgagatttttaggttcgtaaggagaaaaagataattaggagaagtgggattagttagaggggtttatattgttattagggaggattgaattagatttattttgatttggtatgttagtttttgaggagtcggtatagattttattaggtatgagggtagtttttgacgcgaacgtttttttttcgtggtttttattgttagtatttatacgaagtttaagttttttagtgggtatttagacgggattgacgattttttggtaaaatataagtatatttttttttttacgttataattgttttaggtttttaggtattggtttgggagtttttttatgatattggtttgttttcgtttagggagaattttttgtttgtataatggtatttagttgtagttagagtattgtttttaggaatatttagaaagtttaaataatgttaaatataattgggagtggggagtagttaaattatgtttttaaattagttttgtttttttttatagtaatttgaagaggtttagtaatttttttacgttttggatcgagatcgagtttggaaataaattttatgttttttattatatgttgattgggagtattgtaaaagttatgtggaatattaattttagttttaatttgtgttagtaaatttttgtttcgaagattaatggggatgggtatgatataaggttgaattgtttttttttgattattagggttagtgtaagttaagataaatgtgttttggtgaatttttttagtttttttaatattttttagttttatgttagtgggatgtttaagttaggaggaaggttataaattagaggaaataatagaaatattagttttagtattaattaggtttttaattttttttttttgaatgtgtatggtgtaggtaggttattgtttagaaattatattaatttaataagcggtttttttatcgttggagtttattttagggttttatgttttattttttttgtttaaaataatgttaggtagtaaaagtaattgagtaattgatttattggtcggaatggaaataggaattttggtagatattataagtttatataagtttaattttattagaggaattagaattaatgagattagtatgaattatgatatttttagtattatgaggtggatgttttgtttaatattaggtttatcgaattttgaggtaaagggttagtgatttttatggggataattaaaggtaaagaattaggtagtaaatttagaggaatggtattatagagatcgatcgttttgttgtttattgtggaggtagataagtattgtattgagatagaagaagaggttgggatttatttggattggttgtaggtaaatttgtttgtgttgggggttgcgttgggattgtttgacgtaaaaatataatattggtttgagttcgaggtgttttatttgatattggggtttgggattggttttgttttttgtttttttggttttgtggtaagggatttttatttatattagattgagtggtaagtatttgtttaatgtttatttttacgataacgtaggtaaatagtagtaggagtatttggtcgtgtttgttgagtcggtttggtcgtttttaagtttttaatagtgtagtttttttgggtatgattaagttggttataattatagtaggttttaagaaaagaattagtcgagttagtttggttgtcgtgttttatggtcggtgtttatagaatagttttgtgggttttcgatttaacgtttttataagttttaatatatgtaggtaatattttatgattaggtaaattttgacgtaggatggaatgtacggttattttatatttatggttcgtattttgaaaagttaatatatgaagaagaatattttgagtgtgtttattagagatagattttttaatagtattttgtaatttagttaaaaaattaagatataatttattgtgattttgtttaataatagtaaaagaaatagaagtttggtttggggtgcgtaatttattttaagtttttatatatatttttgttatttgtttcgtggtgagagtattaaagtttaaatgagtagtagtattagagtaattatcggagtttgtgagttgagtttgagtaattggaatgttattagttcgatttagttgagtttgtaggcgggttttttttgattattaggtatggaattgtaaatgttgagatggagttagaatagtttttgttaaaaggtcgtagtttataggaagtaaaatgatttcggtataaagagtttgtaatatcgttttaatatatggagaagtaggaatatattgagtataagtatttttgaatttttttaaaaaggtaagattgagcggcgtatatcgatatatttgtattttttgagtattaggaggttttagtatgatcgaataagtttacgtttttaatttatttgtttgttttggcgtaataagtattgtatgaaagttttaagagtaggtatatgagatagagtcggtatagaagtgataggaaaagtatgtatagataag

SEQ ID NO: 447 - DNA, 6616 bp, Artificial Sequence
  chemically treated genomic DNA (Homo sapiens)
ggcgggagaatcgtttgaatttgagaggttaaggttgtagcgagtcgatatcgttttattgtattttagtttgggtgatagagtgagattttatttcggaaaagttagtataaataattattgtttggtaaaatttgttgtttgtttttattgttgaagagtagttatcgtagggagttaagtgtggattttatttgttggatggggatttatgtggtggggggaggtgttggaggttggatgtttatagtgtagattgtaattaggaatgaggcgcgggagtaaggttagagtgggtttttgcggtgttcggtgtttttttacgtttaggtagtaggtagttattgttttttttgggtattttttttttttggtaagtggtttgggaggtagttttgttttttcgtggaaaatttatgtataggtgatttgaatgtagttgtttatagtttttgggtttaattttgttaagtattgtatttatattttatagtcggaatagaagtgtttaattttgttaagtattgtatttatattttatagtcggaatagaagtgtttaattttgttaaggttatttaagaatgagaagaataagtaatatttgatattttaaatgaggtttaagtttgtttttaagaagtttttagaagtttttgataggattttatatggttagtagttattatattttttttttttatttttgggttggtttttagttgttttgtgattttttttttatttaatttataaaagttagagtgttttaagttacgtttttggggtgtgatgagagatattggttttttttttcgtttttggttttttacggttttggttagttttttgatagaatgttaggtgcgtgagttttaggggcgttaggattttatttttttttgttttttttttattttattgtttttttttcgtttttttgacggtgggttttaagattttttaggagagggttttttttagatttcgggggaaggaatgttgatgttatgaagtttttataaaaatttaagaggacggggagtttttatgttttttttttatatttcgttttatgtgtttttttatttgtattttttgtagtgttttgtataataaatttataaatataaggttttttttgagttttgtgagttgttttagtaaattaattaaatttaaataggaagttatggaaattttattttgaagttggtgggttagaggttttagagtttggatttgttgttgagtttttaattcgtgggttttgatattatttttaggtaggtagtgttagaatagaatgcggagatatttagttggtggtcgttgtttggtgtgtggggaaatttttatatattcggttatataagtttttttttgtgttgattgttggcggtgagagtagaggatatacgcggttggagagtttttttttacgtagtttttaagtgttaagatttgtttttatggttttagaagttatcggtatattattggtttttaatttatatttatttttggtttttgtatttagatttattttttattttttaatttaggatttttttatttgaatattttaaatttaatatattttaaatagaagtaattattttttttttagatttgtttttttgtttttttttttaataaatggtattagtgtattatcgttttagcgtataagttaggaatttaggtaatatttttattttttttttttttaggtttatgtacgattagttattaagatttgtggatttttttatttgtttttttttttgttttttttttcgtatttatgttgtatttagttttgttatttttttgtttttagttttgggtgtatttttgtttttagtattttttttgttgtaggttggggttattattcgaaggtattgatttgattacgtaatttttttttagtggtttttttttgtttttaggatggtgtttaaatgtttttgtatgatttataaggttattataaagtaatttgtttattatttaattttttttgttcgttgtttttttatattttattttattgttttttttaaatttttttattcgtttttttttttcgtttattatttttttttgttttttgtatatgttggttttttgaatgttttttttttattttttattttttgagggttaaaggttggttcgttgtttgtatgtttttttttttgggtaatttgattgttttgattgtttaagtttaggttggttgatttttttcgaattttttgttatttttttattaagtttcgtttgtgaggtttaggtgttgtgtttgttggtttgttgtatttttaagtgttaagtaggtattgtgttttatttatagttatatttttttttagtacgggtttggtataaagtagatatttaaaaatatttattagaaaagtgaataatttcgtataaatgttattgatgaatttagttttttgtaagttaatgtattttatagatttaataatttttttgataatagaataattaagatggttggaaaggttgagcgtagtggtttatgtttggaattttagtattttgggatgcggaggtggtcgtattatttgaggtaaggagtttaagattagtttggttaatatagtgaaattttatttttattaaaaatataaaaattagttgggtgtggtggtggacgtttgaaattttagttatttgggaggttgaagtagaagaattatttgaatttgggaggtggaagttgtagtgagtcgagattatgttattgtattttaggttgggtgataagagcgaaattttattttaaaaaaataaaaagatggttggaaagatttggattaaaatatatatatatattttttagtggtgttttagtaatgatagtagatatttttaagagttaaaatatttagttttataaatattatttaagtattataattatttgaattttattcggaaatgatatgaagtttaattttaataggtatttaaagatgtgtttaggaattttacgttaggattttttgtttagagatattttttgtttgtttagaattgatttgggtgttataattagttaagttataaatggtagattatgaaatggtttcgttttatttggtggaggagggatatagataaagaaattttatttatatttttttaagtttagttattttttatattaattagttattattttttagtattatagtttatttttaaatgaaaaataaatagtattttagtttaggtatgtaggtttgaagttatagtttattttttttttaggttttaataattcgatggaatttatagatggtttttttttttttattgattatcggaattgaaaagttattgtttaaaatttatttattaattagtttatttgtatgttatatttttttttttattgtattttaataaagttgttattgtaaataaaaatataaaagcgtgttggatagatcgtttgtttttgttgtttaatgttatagaaattcgtttttttttttttttttttttttttgagacggagttttgttttgttatttaggttggagtgtagtggcgtgatttcggtttattgtaatttttgttttttgggtttaagcgatttttttgttttagtttttcgagtggttgggatgataggcgttcgttattacgttcggttaagttttgtatttttagtagagaaggggttttattatgttggttaggttggttttaaatttttgattttaggtgattcgtttgtttcggttttttaaagtgttaggattataggggttagttatcgcgttcggttttatagaaattttttagtttttaaaagttatggaaatattttagataagttgttaattattaacgggaataaattttttttatataaagtttaggtatatttaattaaggggagttaggtttaagatgtattatatagatttgattatgtaattatttttttataagtgtttgagtttcggggtgttcgagtatcgatagttaaagaagtatttatattttgttagataaggaatcggttttgcgaaggtgcgaagaattaaattttagcgattaatgttttaataacgtgaatattttttgtaattcgaaatttttaagggaaattttgtcgaatttttattaagtgaacgatgatttgtttttataaaggttattgattttaggaaattaacgtataattcgtcgttttaaagtgtttttaaaagtatttacgacggttaaagtcgttgttattacgggacgttatttatttagcgttaagatttaagcgttatcgtggattattttatttttggttacggtaattttagggagcgggttttaggagtttgttggagggcgatcgttgggttagttttttttttgttgattgaggggaggttaggttgtttgtaaggggaaggggtttttttcgcgtttattagggtgagagttatttttagtatgggggcgagggttagggtgtcgtggaagagggggatgtagtttacgaagagggtgtggtgggcgtcggggtcgtttagggggaggtgttttttacgcggtttttgtttttcggttattaggagttcgttgacggcgtagtgcgggtatttggcgtcgtgtagtattattttgtagtaggtttgggtggttagttttatttcgggtatgttgattcgggagggtttcggaggtttttgggcgcgcggttgaggtttggattcgttgtttggtcgcgcggcgttttagtcgagaagcgggacgaggcggcggcgattgatggcgcggtcgcgggttggtcgggggattttttaggttcggtttcgtttgggtttcggtttttggaaaagcgattcgcgtttttgggaagtcgtagttttagattttagtcgcgtttttcgttcggcgtcgtcggaaagtagtttttttaacgtttgtcggaaagtagttcggttcggtattttacgacgttcgtagcgttattttttttcgttttacggtgattttcgtgcggtcgggtgcgggcggagtttttttcgatttcgtggtgtttcgcggcgcggttttgttttttttcggtcgcgggatatcgggtgtagagggcggtcgcggcgggtagtggcggtaggtgagataggaggtggtcggtgcggcgtcgttaggtcgggtcgggtcggggggtcgggagttattaagtttgtacgttcgtagtttggtcgttcggttttagtaggaagtatcgaatgggtttcggagttaggtgatattgaggtcggttcgtggggatttcgggttcggtggttttaggttcggggggtcgtttcgaagtgttcggtttattttattcggtttcgtagcggttgcggatcggtttcgggtattgattttggagcgttcgttggtcgagggtttaggttgcggggaggcgggttcgcgttttgtgtttgtagttttcgtttttgtttttttaaaaggtttttgtgtaatttttttcgggttttgcggggttttcgggcggcgttcggttttttagtttggaaggcgtttattgtttgtttacgtaagggttaggtttaaggagagaagttagacgcgggcgtttagttttgacgttatgtttgtttattttgttttaaggagggtatttttttatattatttttattagtttttcgaagggtcgatttaaagggggtcgtgtaaggttgatgggtttgaatagaggagggttcgggtgagggggggttttataggtttttcgttttttttagggattggaaattgatcggggttgtgttggtagttttttttaatttttttttttagtttatgtataggcggtattaggttttaaatatttagttgaatgtgatgcgtgttacggtttttgtgagttgttatttttttttatcgttttttgaagaatggagtttgttacggtagtatagtgttttaatgatttttagtttttttagagttattttgttagtattttttttttttgtttttttttgtttgagacggatttttgttttggttgtttaggttggggtgtagtggtgcggtttcggtttattgtagtttttatttttcgggtttaagcgatttttttattttagttttttaagtagcggggattacgggcgtttattattatgttcggttaatttttgtattgttagtagagacgggattttattatgttggttaggttggttttgaatttttgattttaggtgatttgttcgtttcggttttttaaagtgttggaattatcggcgtgagttatcgcgttcggtttttttttgtttttttaaaaagattaatgttttgttaattatttgaagcgcgtatatattatggtagttgatttataatgaagttttttaaaagtatgttaattattaagaaaaattttattttaggttattttgtgaatttagagatagtgataaagaatggattatttgcgttggggagaagtaaataaaaaaattttaaaatgttttggggtaaaaagaagattaattttttgttgtttgtttttatttatagagaaggtgtatatttttattttttaga

SEQ ID NO: 448 - DNA, 6616 bp, Artificial Sequence
  chemically treated genomic DNA (Homo sapiens)
tttgaaagataaaaatgtatattttttttatgaataaggataaatagtaaggaattagttttttttttgttttagagtattttggaatttttttgtttgtttttttttaacgtaaatgatttattttttattattgtttttgaatttataaaatgatttaggatgaggttttttttagtaattggtatgtttttaaggagttttattataaattaattgttataatatatacgcgttttaggtaattaatagaatattggtttttttaaaaaaataaggagaggtcgggcgcggtggtttacgtcggtaattttagtattttgggaggtcgaggcggatagattatttgaggttaggggtttaagattagtttggttaatatggtgaaatttcgtttttattaataatataaaaattagtcgggtatggtagtgggcgttcgtaattttcgttatttgggaggttgaggtagaagaatcgtttgaattcgggaggtagagattgtagtgagtcgagatcgtattattgtattttagtttgggtaattagagtaagagttcgttttaaataaaaaaaggtaagaagaaaaaatgttaataaggtgattttgaaaaagttagagattattaaagtattgtgttgtcgtgatagattttattttttagggagcggtggggggaggtgatagtttatagggatcgtggtacgtattatatttaattgagtgtttaaaatttaatatcgtttgtatatagattagaaggggaaattggagaaggttgttaatatagtttcgattaatttttaatttttgaggagagcggaaaatttatgagatttttttttattcgggtttttttttatttaggtttattaattttatacggttttttttaaatcgatttttcggaggattggtgagagtgatgtggggaaatattttttttggggtagaataaataagtatgacgttagggttgaacgttcgcgtttagtttttttttttgggtttagtttttgcgtgagtaaataataggcgttttttaggttggaaagtcgagcgtcgttcgggagtttcgtaaaattcgggaggggttgtatagggattttttgaaggagtaagggcggaggttgtaggtatagagcgcgggttcgttttttcgtagtttgagttttcggttagcgggcgttttaaggttagtgttcgaggtcggttcgtagtcgttgcgagatcgggtaagatggatcgggtatttcggggcggtttttcgagtttggagttatcgagttcggagtttttacgggtcggttttaatgttatttggtttcgaggtttattcggtgttttttgttgaagtcgagcggttaggttgcggacgtgtagatttgatggttttcggtttttcgattcggttcggtttggcggcgtcgtatcggttattttttgttttatttgtcgttattgttcgtcgcgatcgttttttatattcggtgtttcgcgatcggaagagagtaaggtcgcgtcgcggagtattacgggatcgaggaagatttcgttcgtattcggtcgtacggaggttatcgtggagcggaaaagggtagcgttgcgaacgtcgtaaaatgtcgggtcgggttgtttttcggtaggcgttggagaggttgtttttcggcggcgtcgggcgagaagcgcgattggagtttggggttgcggttttttagaggcgcgagtcgtttttttaggagtcgaggtttaaacggggtcgggtttgaagggtttttcggttagttcgcggtcgcgttattaatcgtcgtcgtttcgtttcgtttttcggttgaggcgtcgcgcggttaggtagcgggtttaggttttagtcgcgcgtttaggggttttcggggttttttcgggttagtatgttcggggtgaaattgattatttaggtttattgtaagatggtgttgtacggcgttaagtattcgtattgcgtcgttaacgggtttttggtggtcgagaagtagaagtcgcgtaaggagtatttttttttgggcggtttcggcgtttattatatttttttcgtggattgtattttttttttttacggtattttggttttcgtttttatgttggaggtggtttttattttggtaagcgcggaaagggttttttttttttgtaggtagtttggtttttttttagttagtagagaggaagttggtttagcggtcgttttttagtaggtttttaggattcgttttttagggttgtcgtggttaggaatggggtgatttacgatggcgtttgggttttggcgttgaataaatagcgtttcgtagtagtagcgattttaatcgtcgtggatgtttttagaggtattttaaggcgacgagttatacgttagttttttgaaattagtagtttttgtagaaataagttatcgtttatttggtggggattcgatagagttttttttgaggatttcgagttgtaggaagtgtttacgttgttgggatattaatcgttaggatttggtttttcgtattttcgtagagtcgattttttatttggtaaagtgtaaatgtttttttggttgtcggtattcgggtatttcggagtttagatatttgtagaaaggtagttgtatggttagatttgtgtgatgtattttaggtttggttttttttgattgaatgtgtttgagttttgtgtaaagagaatttgttttcgttaatggttaataatttatttagaatgtttttatggtttttaaaagttaaagaatttttgtggggtcgggcgcggtggttgatttttgtaattttagtattttgggaggtcgaggtaggcggattatttgaggttagaagtttgagattagtttgattaatatggtgaaattttttttttattaaaaatataaaatttagtcgggcgtggtggcgggcgtttgttattttagttattcgggaggttgaggtaagagaatcgtttgaatttaggaggtagaggttgtagtgagtcgagattacgttattgtattttagtttgggtgatagagtaagatttcgttttaaaaaaaaaaaaaaaaaaaaaaaaacgaatttttgtgatattaaatagtaggagtagacgatttgtttaatacgtttttatgtttttgtttgtaatgatagttttattgaagtatagtgggaaaaaagatgtagtatgtaggtagattagttggtaagtgaattttaggtagtagttttttagtttcggtgattaatgaagggaaaaagattatttataaattttatcgagttgttaaaatttgaaggaaaagtaaattgtagttttagatttgtatatttgagttgaggtgttgtttgttttttatttaagaataaattgtgatgttaaaaaatagtagttaattgatgtaagaagtagttaagtttgagaaggtgtaagtagaatttttttatttgtgttttttttttattaagtaaaacgaagttattttataatttattatttataatttaattaattatgatatttaagttagttttgggtaagtaagaagtatttttgggtaaagagttttggcgtaaggtttttgggtatatttttgagtgtttgttaaagttaaattttatattattttcgggtaggatttagatgattataatatttagatgatatttataaaattaagtattttagtttttgaagatatttgttgttattattgaaatattattggggagtgtgtgtgtgtgttttaatttaggtttttttaattatttttttgtttttttgagatggagtttcgtttttgttatttagtttggagtgtaatggtatgatttcggtttattgtaatttttattttttagatttaggtgatttttttgttttagttttttaggtagttgggattttaggcgtttattattatatttagttaatttttgtatttttagtagagatggggttttattgtgttgattaggttggttttgaattttttattttaagtaatacggttattttcgtattttaaagtgttgggattttaggtatgagttattgcgtttagtttttttaattattttaattgttttgttgttaagagaattattggatttgtgaaatgtattgatttgtagggagttagatttattagtagtatttatgcgggattatttatttttttaataaatgtttttgagtatttgttttgtgttaggttcgtgttgaggagggatatggttgtggatgaaatatagtatttgtttagtatttgaaggtgtagtaagttagtaagtatagtatttaaattttataggcggagtttagtaaaaaagtggtaagggattcgagagaagttagttagtttaggtttgggtaattagggtagttaggttgtttagagaaaggaatatgtaggtagcgggttagtttttgatttttaggaggtgggggatggagggagaatatttaagggattagtatgtgtaaagagtaggagaaaatagtgggcgggagaggagagcgagtgggggagtttggagagagtaataggatggagtgtaaaggggtagcgggtagagagagttgagtggtggatagattgttttgtagtgattttgtagattatgtagaggtatttgggtattattttgaggatagagggaagttattggaggagagttgcgtgattagattagtgttttcgagtgatggttttagtttgtagtagaaaggatgttggagataggagtatatttaagattagaggtagggaggtggtaaaattgagtgtagtatgggtacggagaaggggatagaagagagagtaggtgggagaatttataggttttggtgattaatcgtgtatggatttaggggaaaaggaagtaagggtgttatttaggtttttggtttgtgcgttgggacgatggtgtattggtgttatttgttgagggaagaggtagagaaataggtttggaggggaggtgattatttttgtttggggtatgttaagtttgagatgtttaaatgaagaagttttaggttgaaaggtgaagaatgggtttgagtatagagattagagatggatgtagattgagaattagtggtgtgtcggtgatttttgaagttatgagagtaggttttagtatttgaggattgcgtagggaaaagttttttaatcgcgtgtgttttttgtttttatcgttaatagttaatatagaagaagatttgtgtgatcggatgtataggagtttttttatatattaagtagcggttattagttaggtgttttcgtattttgttttgatattgtttatttggagatagtgttagagtttacgggttgagggtttagtagtaagtttaggttttggaatttttgatttattagttttaaggtggggtttttatggttttttgtttggatttgattaatttgttggagtaatttatagagtttagggaaaattttatgtttatgggtttattatataggatattgtaaaggatatagatgaagagatatatagggcgaggtatgggaaaggggtatggaagtttttcgtttttttgggtttttatgggagttttatgatattagtattttttttttcgaggtttaggggggatttttttttggagggttttaagatttatcgttagaaaggcggagagggaatagtggagtggaaggagggtaggagaaggtggggttttagcgtttttgaggtttacgtatttggtattttattaaaagattaattagggtcgtgaggagttaggaacggggaggaaaattagtgttttttattatattttaggaacgtggtttggggtattttggtttttatgggttgagtggaggaggagttatagagtaattgaggattagtttaggagtgggagaagaaggtgtggtggttgttggttatgtaaaattttgttagaaatttttaggagttttttgaagataaatttgaattttatttggaatgttagatgttgtttattttttttatttttaagtaattttgatagagttaaatatttttgtttcgattatgggatgtgaatgtagtatttgatagagttaaatatttttgtttcgattatgggatatgaatgtagtatttgatagagttaaatttaggaattataaataattgtatttaagttatttgtatatgaattttttacgggggagtagggttgttttttaaattatttattagggaggaaagatgtttagaggggatagtgattgtttgttatttgagcgtgagagggtatcgggtatcgtaggggtttattttgattttgttttcgcgttttatttttagttatagtttgtattgtagatatttagtttttagtatttttttttattatatgagtttttatttagtaagtaaggtttatatttgattttttgcggtaattattttttagtagtgaaaataagtagtaagttttgttaggtaatagttatttatattgattttttcgagatggagttttattttgttatttaggttggagtgtagtggagcgatgtcggttcgttgtaattttggttttttaggtttaagcgattttttcgtt

SEQ ID NO: 449 - DNA, 14095 bp, Artificial Sequence
  chemically treated genomic DNA (Homo sapiens)
ttattatttttagtaaattaatgtaggagtagaaaaataagtatcgtatgtttttatttataagtgggagttgaataagaaaatatatgggtatagggaggggaataatatatattggggtttgtcggggggtggggtgatggggagggagagtattgggaaagatagttaatgtatgttaggtttaatatttagatgatgggttgataggtgcggtaaattattatggtatacgtttatttatgtaataaatttgtatattttgtatatgtattttagaatttaaagtataaattaaaattaatttatagaaaagaatatttattttttcgtttaaattttatatttatgaatgaaattgtgttttataatataattttttgagtgaatttataaagaaggagcgaatgtttttaaattgaaaaaaaaattaataatataaattatgtttattatattttaattttacgtgaattatttaattttattaatgaatattgatttattttttaagttatttataattagttagtttttttaaatttagttatttttaagtaaattgataaaatgaaggtttggaatttattaagggataattttaatttaggtaaattttttttagagtgtagagagattggtaagttcggtttggagttattttagtgtttttttatatggttttttatagcgtgttgtgttttttgtttttaggggcgttattatgagtagtagtaaattttttttttattggtattggttttttagaattgttacgtagttattttttgtaaattaagattaggatataaattagagtgttgagagttatgtagtgtatataatttttatatggtgttaaaataggagaaaatgggttaggggtgttatgagagaagagcgttttaagaaagttatgtattaaatttttatgtagttaaagtagtgaattaagttatttttttaaaaagggttgttttttaatttttttaaaaattataattatattattgtggttttattttatttttgataaattatatgttttgatttttataatagttaaggtagtgagagaataagtatgaaggatttagttaaatatttatgttattttttttaaagttttttttttatagtattattgtatgttaaggttttttgtatgttagagtttgggttttttttttttttttgtttgagattattttatattttaggagttgatgaatagggtcgtgatttattaatgggtagttaaagggggatggtggtatgattgaagaattatttgagagattattttttaaatagttatgatttgattgataggggagaataggattagtaatgtttatattgtgttagggtaagtcggtgtatttattagtaaagtttgtacgtgattatatttatttttaaaattttagagttatataattttttgtgaaaaagaaagtagcgtggttatttgttcgattggttatagttagagtgatttgttattttgtatttagagttttttgttgttataaagtgaaggatagttttcgatgattttttaataattttgttggtatggagtaggggttaagagttagtttttaagggttagtaaaaaatgaaattagaaggtatatataggaatagcggtagtaaagagagattgtattttgttagatagaaataaatagaagggttgttttgtaaaggaggttgtttttttgacgttagttatttatagttttagaattatgattgttaaatgtagataagatttatttagtttagaaatttttaagacgataaaaaaagaaaatgtggaaaatgattaaaatttttgttatataattgtatttaggttattaagttgttaatttagatatatattagttgtttataattaagatatattttgggattttgaggtaaaaattttttgataagtatagttaagaggataggttgtttggtagtttagattttttttttttttgtaatgttttaagttttttaggttttttttggtgtttttttgtttttttttgtttaattttagtttgtgttgttgtggtatattttttgagtatagaaaatttttaattggaatattatttaaagtttatttttaagtattatttttggaattattgtaatgaagtttgtagtgtaaaatgattttgttaatggttgagtttattagtttttagtgtttttttttttttgtttatttttattgtttatttatttattatttatttattttttattttttgagatagagtttttttttgtcgtttaggttagagtgtaatggcgcgatttcggtttatcgtaagttttatttttcgggtttacgttatttttttgttttagtttttcgagtagttgggattataggtgttcgttattacgtttggttaatttttttttttttttttttttttttgtatttttagtagagtcggggttttatcgtgttagttaggatggtttttattttttgatttcgtgatttatttgtttcggttttttaaagtgttgggattataggcgtgagttatttcgttcggttttttttttttttatttaaatagttttaaggtttagagaattttttttattttttgttatatgttttttgatgagaagagtaattattataaaatagaatagaaatacggattgtatgattttttttgtattatattataaaacgtttataagggtattggttatagtgttattgtttaattattttattttattattaatatgaggggtgtgttatgtatatattttggaatttttagtaattatttgaataggtttgtttgttggatggttggttggtataatttgttgaaataagtgattttgggtatggttacggtgttttgattaatatttttttatgtataagattggggttgagtttgagtattgagtgaaaaatgaaaagtaaatggttgagatagttgttggtttatatcgtggttttatgttaattagaaaaagaattgttttttttttttatgttttggggaggataaacggttgaaaaatgtttttcgtttgtgtggattattaggggaaaagtagttttttgtaaggtatagggtatggtcggtggtatttgagtaagattttagtttttcgttagtttttttagtggatatgacggtataattgtttaaggtagttttagaaggaggttttggggtattttgggtaatatgatttagttttttgtattaagttatttagttaagattattattagttggtgagagaagtttttttattgtttgttttaatataggttattttaattaatttgagatttttagatgaggaaattgaagttgggttgaagtattttatttgaggttatttggtagtattagatttttttttagtattttttattttttttttttgttttatttttttttatagtatttattattaatattgtgtattttattttttatttttatatttttagtttttttaagtagaatgtaagttgtatgatggtaggtgttttgttttttgcggtatttttagtgagtagaatagaatttggtatagattgttgtatttttagtgagtagaatagaatttggtttatttaataatattttttaaatgaaggaattgtttaaatatcgtatgtttttttttatattaatttattttaataagtggtttttagtaaatatataacgttttgaggtatttgagagaaaaaaaattatattaatataaagtgttaattgttattaggattttttttagttaaaaaaaaaagttattttatatttttagatatatattttttgattaaaaatagggttttaagaaaaagttttttattttaaaatttatatttattttaaagagaaaaattttagtttaatgataaattggggtattttttatttattaagattaatttttgtttttgaagataggtttagttatggtttgtttatttgatgattaaaataaagttattagtttttgttaggttttgttagttatttgtatatagtaatatagaatgatttggtaaagtttttatgtagatttggtttaagtttataaaatagataaatttttttaaattaaatttttatttttgtttatttaaatttggtatgttagatattatgttttatattataaagttgtaattaattatttgttagatttttagaaatagttatgtattatataataatgtttgagtaaatgataaattgtatatgtgatggtggttttataagattataataatatatttttattgtatattttttatgtttgtatatgtatagatatagaaatattattgtgttataattgtttatagtatttagtatagttatagattgtataggtttgtagtttaggagtaataggtatattatatagtttatttagatgtatagtaggttatattatataagtttgtgtaagtatattttgtgatagttatataatgataaaatagtttaataatgtattttttagaacgtatttttgttattaagaatgattgtagtaaaaagttatatgttttgatttattttatataatttttattttgatttattaaaagtgtattgtttgtaggatattgtgttgtgatatattgttagaggaataaagggagtatttagatacgttttttgtttttttggaatttatataatgaatggaaaaaggtatagagttatgtatattttaatgtttttaataataattgttgattttttatttttagttagagaagtttggtaattaagaattgtttttttggtggtttacgagaatttaattgaattggaaaatatttgttttaatgaaataatttatttttgtgtaatattaaattgtgttaattaagtaaataaggaagaaagttttatttataaaattgtttgtttttgattttattttatttttttttaggttttaagaaggggaaaaaaatgaagattttgatatttggtatttttttgtttttatgtagtattttagtttgggcgaaagaaaagtattattatattggaattattgaaacgatttgggattatgtttttgattatggggaaaagaaatttatttttgttgatacgtaagttattatttttattgtttatagattaaaattttaagttatttttaaaggatagagttaataagatgaaatatttttaaaattttttatatatagaaattgtaaaatgtgggtttgaaatttaagatatttgaattaattttttttatatttttgtatattttttatttggtggattattttgttttttttttgttgtttttggggatttgtgtttatattttattattttttatggtcgtaattgtattttcgattaggaatttgtttttttatgtgtttatgtagaagtttttttatttaaataattattgtatataatgttatgtttattgtattatttaatggttatttatgataggtataaaatttttttatattttttaaaatattatttatagaaataaaatataattttagtaaataagattttgtttgatatttattgagagattttagatagttaagtaggttaattttttatagttttagggttttaatttgtaaaatgaggataataagtatagtttatagggttatttaaagagcgggtgtatgtaaagtttttagtataatgtttggtatatatgtgtataaaaaaatgttaggtatttattaggatggtttttaaaaagttttatgtaatttaaatgtttttattttttagttggaaaatttttttattgaaagtaatatttattatatagtaaaataaaaagtttagttttttttgaagttttttgtatagaagtttatttatattgaggtttttatttttaatgatgttaattaaatattaattattaaatgggaatttggaatttaaaattaatatttattatattaaaatgtattttagtggtaataaaatataaataagtttaatgattattagttgttaagattatatttttaaaaaatagttaaataaggatgtcgaagtttgtaattattgaattttattgatgagtatatattattttttttaatattatgtaaagttgaaattttttattataaaaataaatatataatagatattaatatttaattattatattatgaatttaataatatataataaagaaagtttttgatttgaagataagtggttgtaaataaaattaatatattttgtaattattttttttttaatttggttttaaggtggtattattttttaaggaatatgatatatttttatagttttattagaaatattattttgtatggatttagtatttttttgattaaatataatataaattatatgtggtttttatttttaaggaaaaagttagatatattaaaaaaataaaaatattatttttttttatgtttttatttattattattttgttattgttcgtgattaaaaattaaattagttttattaggtataaattaagtgtaagatattgttttgaatatgttttaaaaaaaaatttttaattttaaaaattagggagtagaagagtgaaggagtttgtttagaatttggtgaatgggggcggaggaaatttttttgtttttaattatttttgtggtttgtttgtgttagggaagttatttaatgagtataagtttgtttattttattgtgattatattagtttttttttatgttgttaatagagatatatttaagattgagtaatttataaagaaaaagaggtttaatggatttatagttttatatgattggggaggttttataattatggtggaaggtaaaggaggagtaaaggtatgttttatattgtaaatttttttatatttttttgttatttgagttttttaagtttttaggaagttttaaatttttttatattttgttatttttttttgagttttttaaattattttagtttttgtttgttatttaattttaaagttatttttatatttttgggtatttttatagtagtgttttattttaggtattaatttattgtattagtttgtttttatattgttaataaagatatatttaagattgggtaatttataaagaaaaagaggtttaatgaatttatagttttatatggttgggaaggttttataattatggtagaaggtaaaggaggagtaaaggtacgttttatatggtagtagttaagaaagagtttgtgtaggggaatttttatttataaaattattagattttatgagatttatttattattatgagaataatatgggggaaattatatttatgatttagttatttttatttggtttttttttttgatatgtggggattattataatttaaggtgagatttgggtggggatatagttaaattatattagttatttaaaaagtatatttaatagagatatttaaggttttttaaaaggaaaaatggagtattttttagttgtaaagtttatttttttttttgttattgttttgtgattttaatattttttttggttttaataatatgttatagttttgtaaattttaggtgggattgttttttttgtgattttttttttttatatattttattagtgaattttgaatatagttttagtaattttgttaatattatgttaaattttttgtatagatgtgtgtagatagtaattttttggttttttttttgttttagatttgtagtatgtttagtttagttagtgaaggatgatggagtattataagatatggttggtattttttatcgtatgatgattaaaaaggagtggaaataaatgggttgaagaataagatgtgaaagagtgtaatatgaattttaggtaaagaatcgagtttaagttgaatgttgattttgaaggtttgggatgatgaataggaaaatatgtattgagagtattagtatatgtatatgtaagtattagtgtttggttattagtatttagaatataggagatattaaataaatatttttgaataagtttaaatgagtaaataaaagatatataggaagataggaaaaattatagattgtattgtaaaaatttttttttgttttttatgtggagagatttatgttatagaataaattaggtaatagaataagatagaaaagttatttgaggggattatatgtagggttagtgtaattgaaaatattggtagatattaaaagagaaaaatgtataggttttgggggggattaaaaaaataaagtttatttttttggtattaatgttaataatatttatttttaaaagagtgaagtggaaaataatttttttatatttagtattgttatttatttgggttagtgttttatttgttattttaatatattagtaagtagttaaagattttataagagataatttttgattttaagttatatatatttaaattaaaataaatgatatatatataaaaataattagtaaatataatagtgtgttttgggtttatagtaggtattagttaattatttattgaattaattgattatataatagtaaaaattatagtaatttttttatttttagattatttttttttttgatgatttttaggaagttggaaataagtgaaaatttttttaagtatacgaacggttattataaaatttttttatatttgattttataggtttttatttaggtttggtaatttttttaatatatagtttttataaatattattatcgggttttttattttattagaggtttttaaaataaatggtatagtgaagatgttattataagtaggtttaatgattaagaagaaataatagtttaaattttgattaaaaaattagataataaagaatattttattttacggtaattataattattataattatgattttgagtgattaggatataataagtatttaataagtgtttattttattattgttattaaaaaagttattttttttttattatattcgttgtttaggaaaatagggaagtaaataaaatatttttaaagaaaaagtttgtattaatgatatttattttatttttattaaaagataaatttgggtatattgaaagtttaataagtttatttaagtatttagttatagtaattgggtgttttaagattataagtagttttgttaatgtttttttgggtagggaggaaatttttataacgtatttttagattaagaaatagatattagattggttaaagtggagattttttagttagatgttagttggcggtttttgattggtaaagtttttagttatagattcgaagttttattttattgtttattatattgaattgggttttggtttgtttacgtaggaatttaaggcgttgatgttgttttagtttagtggttttttaagttatatagtatttttttaaaaatgatttttaaatttttaaatgatttttaaataggtataattattagttaaaattttttggaaaatttattttaaatgatttattttttaaggttgttaaataaaaaatagtaagtaatagggttgggcgtggtggtttatatttgtaattttagtattttgggaggttaaggtaggtggattataaggttaggagtttgagattagtttggttaatatggtgaaatttcgtttttattaaaaatataaaaattagttaggtgtggtggcgtgcgtttgtagttttagttatttaggaggttaaggtaggagagttgtttgaatttaggaggtggaggttgtagtgagtcgagattacgtcgttatattatagtttgggcgatagagtaagattttattttaaaaaaaaaaaaaaaaaagtaagtaatagttagtgtagtatatttttaaatattttatataagatagtttgtatggaagagttaattaagtgattaatattttatattgattaaattttatttattattaagtttttattttttttgagaatatagataaaagaaaatttattaggtattgtatttatgttgcgttagtggaggaaggttggttagaatcggtaaattatttgaatttgtgttatatatatttaggttgagtttttgttatatttttgtagtagttaatttttgattgttttttttatgatttttgtttatggtaggtagtatttttaaagtggtttttagaagaaattttattttaaatttttagaatttgtgaataggatgagatattatttttatgatttatgttttagttagtgagattatttgaagagtttatatattgaagttgatttgaagatgaaaggggttatttaggagggtatacgggtgattttaagaaattgggagaggttttcggtttatagttagtaagtaaataaggattttaattttatgattttattgaattgaattttggtaataatttaaatgagttaggtagatttttttatagagttttagataagtatttagtttagtagttttttgattttagtttggtgatgtttgaggtagtgaatttagttatattatgttagattttgatttatagaatagtgagattataaatgggtgttgttttaatttattttgtgataatttgttatgtagtaataaaaaatatatgttttaattaatgaagttaaaaatttagaaattttttatttataatatttaagttttgggaattacgtttaagtataaattaagattatttgagtgaattttaaatttatgggagggaatagtattattaatattttattaaagtaatattaaaaaatagttatgttattattaaaaatttatttttgggtttaagattattagaaattataggagcgggtttttttttttttaaataaggggttaaaaagagagaatgtgattgattatttgaagggagatatgtttatagtaatgagtagaaaggaatatattatagttgttaataggaagaattataattaaatgtgaattatttggttgaaagaatagttataatagatttttgtggttgaatatttaattggtaaattttttgtaagtttttagtaattggttttttgtttttaagttgtgttgtcgaaattaaatagagagtttttaatgattttttaatgtttatttggagataaagtataaataaatagattttttttaaagtgttatatagtgtaaaatattttttagtttggttaagatagttttttttataataaaaggtaagatgtaaaaagtagtttgtatattgtaatgtgtataaaaggaattttagatgttaaaacgtttagatatgttatatttttagattaataattttaaaagtaattttaatttttttaaaaaattttgtttagaaaaattagttataaagtttaggtaatataggttttggttttggttttaggtatttgtttatggtaatgttttttttattttaggaaatgattaatataggagtattttaatgtaataaaattattttgataaagtttgttatagtttattaaaataggatatgatgtatgttaaagtgtatttatatttagaaaatataaagaaatattttatttaaatgaagttttaagaatttgagggttaatttttaattttggtttatgtaagatgtgtattaataggatatggtaaagtatggagtaaagtttttaaatattattaaattaattttttagaaataaaagtgtgtttagatttttaagaaaatttattttggggtttagataagtttttgtgagattgattggtttagggtttcggtgggattagagtggaattgtatttttgtattgtagattttgtagttgtagttgtgtatttaattgaaattgtatttttattgatttttttttagttatatggattgaatgattttttgtttttaaatttagtagtttttgatgtaataattttgttgttgttaagatatatatttattaagattttttttgtgtattttttgttatgggtttagggatagagtttattttagtgttttgttttttttttatgtttatttgtgtttatgaagttttttttaatttttttttattttgttttaataaattgggaaatggtaataaataattagaaagtgaaaataaatagaaaaaatgagggtatatttatagttttgttgttttatataggttgtaaataatgatattttatttttttaatttttagtttagtttttttattaggataggggatggatagggaaatattattttagttatttttttagtgaataattttattttttttgggaattcgggtttatataatttaggaaaattggtatttttagtgtattggtatatggtagtgattaggaggaaacgtttattatagaaattttttgattaatttagagaatggtgatttttatttttaatatttgtttattttgtttaaatttagttattaggattattgttaagtggttatggtatttggttttagtatttaggtttaatttatatagtttttatcgtagaggttttgttatttttaggtatgatttggaaatcgagttttttatttttttgttttatggtattaggaattttattgtttttgggattgggtagtttttttaatttttaattttagagtttttttaatataggttatttagggttttagagtagattattttattaaaatatattagtgtgttggttaataatgtagatatttgggttttgttttagatttatagaattagaattaatggagttgtgttttaggagtttgtattttattaagtttattagtagatttttgtgtatatttagatttaagaaatattaggttttagatttttgaaaaattatatttttaaattttgtagtagtgaaagtttagagtttttatataagttttgtttttgttttaaagaagggaaagaaaaatatattttatttttattagtgagtttataattgaggaaataagataaaatttattttttagttagattattcggttttataaatgttgagtagaaattggtaaagtattaaagattaataagatgaaagaaggtaatatatatatatatatatatatatatatatatatatatatatttatgatgatgagtagtttttatttaaatggaagagttttggttgtggaggggtttgttaaaggttagaatttaagtgggttttgttaaatggtaatatgatgttgtttatgaatagattttattgggttatataagtttttagttaaggttgataatataagaaattaatttaaattaaatttattttttttttatttttttttttttagattgttatttattttattgatattttaaagaaagttttaagtaattattaatggatatttattagaatataaatatttaatgttaagtatttgtattagtgagggattaaaaaatatagggattatttaaatttaaaagtaatttaaaaattatatatattgtatgtattaataattttagttttgatttagtgttgttaaaagaaatataaaagaattaatttagttttattaattttattttaaggaaaaaaatatataaatatatatatatatattttgaagttttaaatatttagattgattaattataaatttaaatttttttagtagttaagagaggtagaagtgaaaaaatgttttaattaattgttttattttaatattttaatttaattttgtattttattttattatataatatgtttgtgttttaatataaaaattatggagaaaatattttagtaagatgtattatatttttatgatgttttcgtagatggttttttgatatatatttgatatggaaagttttatattattaaaataatagggttaattattagttttttattttaattttggaggtatttttataataggtaaatatttaatgtgatgtgtttattaatttttttaattataatgttattaaattataatgataatgttatttttagaaatgatggtttttgatagagttgttttgtttttttttgtagg

SEQ ID NO: 450 - DNA, 14095 bp, Artificial Sequence
  chemically treated genomic DNA (Homo sapiens)
tttgtaaagaaaaataagataattttattagaagttattatttttagggatgatattattattataatttaataatattataattagagaaattaatgagtatattatattgaatgtttgtttgttgtagggatgtttttaaaattgaagtggagggttggtagttagttttgttattttaatgatgtgaggttttttatattaggtatatgttagagaattatttgcgaaggtattatagaaatgtagtgtattttattgaagtattttttttatgatttttatattaagatataggtatattatgtaatggaatagaatataaaattaagttgaaatattaaaataaagtagttaattaagatatttttttatttttattttttttagttattggaaaaatttgagtttataattaattaatttggatatttgagattttaaagtatgtgtgtgtatatttatatatttttttttttaaagtaagattaataaagttaaattaatttttttatattttttttaatagtattaaattaaagttagagttgttgatgtatgtaatgtgtgtggtttttaaattatttttgaatttaaataatttttgtgttttttaattttttattagtatagatatttaatattgaatgtttgtattttagtgaatgtttattaatagttgtttaaaattttttttaaaatattagtgaggtaaatagtaatttggaaaagaaaagatggaaagaaagtaaatttggtttgaattaattttttgtgttattaattttaattgaaggtttatatagtttagtgggatttatttatgggtaatattatgttgttatttggtaggatttatttagattttggtttttggtaagtttttttataattaaggtttttttatttgaataaaaattgtttattattatgggtgtgtgtgtgtgtgtgtgtgtgtgtgtgtgtgtgtgtgtgttgtttttttttattttattgatttttgatattttattaatttttatttaatatttgtggggtcgagtaatttgattgaggaataagttttgttttgtttttttagttgtaagtttattggtaaaagtgagatatattttttttttttttttttaagataagagtagagtttgtgtgagagttttggatttttattgttatagaatttaaagatgtggttttttaaaagtttaaggtttgatgttttttaagtttgaatatgtataggaatttattgatgaatttagtgaaatgtaaatttttgggatataattttattgattttgattttgtgggtttggggtagggtttaggtatttgtattattaattaatatattggtgtgttttgatgagatagtttgttttggggttttgggtaatttgtgttgaagaggttttaaggttgaagattaagagagttgtttaattttagaagtagtgggatttttgatattatgagatagaaaggtagaaaattcggtttttaggttatatttggaagtggtaggatttttgcggtggaggttatatagattaagtttgagtgttggggttaggtattatggttatttggtaatggttttggtggttgagtttgggtagagtgagtaggtgttgaaaataagagttattattttttggattgattaaggaatttttatgatgagcgtttttttttagttattattatatattaatatattgggaatattaatttttttgaattgtataaattcgaatttttaaagaagataaaattatttattaaaaaaatgattgagatgatgtttttttgtttattttttgttttggtgggagggttaagttagaagttagaaaaataaagtgttattatttgtagtttgtgtggagtagtaaaattgtgagtatatttttattttttttatttgtttttattttttaattgtttgttgttattttttaatttgttaaagtaaaataggaaaagattgggagagattttatggatataggtaggtatgggaaaagggtaagatattggggtgaattttgtttttaaatttatagtaaggaatgtatagaaagagttttaataaatatatgttttaataatagtaaaattgttgtattaaagattattaagtttaaaagtagagagttatttagtttatatgattgagaggaggttaataagagtgtaattttagttaggtatataattgtagttgtaaagtttatagtataaaggtataattttattttggttttatcggaattttggattaattaattttatagagatttgtttaagttttagggtaaatttttttaagagtttgaatatatttttatttttgagagattgatttgataatatttggagattttattttatgttttattatgttttattggtatatattttatataggttaaagttaaaagttagtttttaaatttttaaggttttatttaaataaaatgtttttttatattttttgaatgtaaatatattttggtatatattatgttttattttgataaattatagtaggttttgttaaaatgattttattgtattgaaatgtttttgtattaattattttttaaaataggaagagtattgttataaataaatatttaagattaagattaagatttatattgtttaggttttgtaattaatttttttaggtaaagttttttgggggggttaaaattgtttttaaaattattgatttgaaggtataatatatttaggcgttttaatatttgaaattttttttatatatattgtaatatgtaaattgttttttgtattttgttttttattgtgaaaaaaattgttttaattaaattggaaaatattttatattgtgtgatattttgggagaagtttatttgtttatgttttgtttttaaataaatattaaaaggttattaggggttttttatttaatttcgatagtatagtttgaggataaagggttagttattggaagtttgtaggaagtttgttagttagatatttagttataagaatttattatagttgtttttttaattaaataatttatatttaattgtagttttttttgttgataattgtagtatgtttttttttatttattattgtagatatatttttttttaagtaattaattatattttttttttttagttttttatttaaaaaaagaaaagttcgtttttataatttttggtagttttagatttagaaatgagtttttaatagtagtataattattttttagtattgttttggtaagatattaataatgttatttttttttataaatttagaatttatttaagtgattttggtttatgtttagacgtggtttttaaaatttgggtattataggtgaaaagtttttggatttttgattttattaattgagatatatattttttattgttgtataataaattattataaagtaggttaaaataatatttatttataattttattattttatgggttagagtttggtatggtgtggttgggtttattgttttaggtattattaagttgaaattaaggggttgttgagttgagtatttatttgaggttttgtggagaaatttgtttagtttatttgggttattgttagaatttagtttagtggggttatagaattaaaatttttgtttgtttgttggttatgggtcgagagttttttttagttttttaaggttattcgtatgtttttttaggtggttttttttatttttaagttagttttagtgtgtggattttttagataattttattgattaaaatataaattatgagagtgatgttttattttgtttataggttttggagatttaggataggattttttttgggagttattttggaaatgttgtttattataaataagaattataaggaaaatagttaaaaattaattgttgtaagaatatggtagagatttaatttaggtatatataatataaatttaagtgatttgtcggttttaattagtttttttttattggcgtagtatgaatgtagtatttagtgaatttttttttgtttgtgtttttaggagaaataggaatttgataataaatggaatttggttagtgtgaaatgttagttatttaattagtttttttatataagttgttttgtgtgaagtgtttggaagtgtattgtattagttattgtttgtttttttttttttttttttgagatggaattttgttttgtcgtttaggttataatgtaacggcgtgatttcggtttattgtaatttttattttttgggtttaagtaatttttttgttttggttttttgagtagttgggattataggcgtacgttattatatttagttaatttttgtatttttagtagagacgggattttattatgttggttaggttggttttaaatttttgattttgtgatttatttgttttggttttttaaagtgttgggattataggtgtgagttattacgtttagttttattgtttgttattttttatttggtaattttggagaatgagttatttaaagtaaattttttagaaaattttagttagtaattgtatttatttaagaattatttaaaaatttaaaaattatttttgaagggatgttatataatttgggaggttattaggttgagataatattagcgttttgggtttttacgtaagtaaattaaaatttaatttaatgtagtaaatagtaaaatgaaatttcgaatttgtaattagagattttattaattagaagtcgttaattaatatttaattagggagtttttattttaattagtttaatatttattttttagtttgagaatacgttataaaagttttttttttgtttagaggagtattgatagaattgtttgtggttttagggtatttaattgttgtggttgaatgtttgaataaatttgttaaatttttaatatgtttaagtttattttttaataggggtaaaatgaatgttattagtgtaagttttttttttaaaaatattttatttgtttttttgtttttttaaatagcggatataatggaaaaaaagtaatttttttgataataatagtgaaatgaatatttattgaatatttattatattttgattatttaagattataattatagtaattatgattatcgtaaggtggaatgttttttgttgtttagttttttggttaggatttgagttgttatttttttttggttattaggtttgtttatagtgatatttttattgtattatttgttttggaaatttttaatggaatgaaaaattcggtaataatgtttgtaagaattgtatgttaagaaagttgttaagtttgagtgagagtttatgaagttaagtataaaagagttttgtgatggtcgttcgtatatttaaaaaaatttttatttatttttagttttttagaggttattagaaaaaaaagtaatttgaagataagagaattattataatttttgttattatatagttaattaatttagtaaataattaattaatgtttattatggatttagaatatattattgtgtttattaattgtttttatatgtatgttatttattttaatttgaatatatataatttaggattaggaattattttttataaagtttttaattatttattgatgtgttgaagtgatagataaggtattgatttaagtaaatagtagtattgagtataaggaaattattttttattttatttttttagaaataaatattattggtattaatattagagaagtaaattttatttttttagttttttttaaaatttatatattttttttttttaatatttgttagtgtttttagttgtattaattttgtatataatttttttaggtgatttttttattttattttgttatttgatttgttttatagtatgaatttttttatatgaggagtaaggaaaagtttttataatatagtttatgattttttttatttttttatgtattttttatttatttatttaaatttatttagaaatatttatttagtgttttttatattttaggtattagtgattaagtattagtatttgtatatgtatatattagtatttttaatgtatatttttttgtttattattttagatttttaagattaatatttagtttaaattcgattttttatttaaaatttatattatatttttttatattttattttttagtttatttatttttatttttttttagttattatacgataagaagtgttaattatgttttgtgatattttattattttttattgattgggttaaatatgttgtaaatttgggataaagaagggattaaaaggttgttatttgtatatatttatgtaaaaagtttagtatagtattggtaaaattgttgaagttgtatttaaaatttattggtaagatatatgggggaaaaaaattatagagaaagtagttttatttagagtttgtaaaattgtagtatattgttgaagttagaggagatgttaaagttataggataataataaaaagagaggtggattttgtaattagaagatgttttatttttttttttaaggagttttaagtatttttattaagtatattttttaagtaattgatatggtttggttgtgtttttatttaaattttattttgaattgtaataatttttatatgttaagggagggggttaggtggaggtaattgaattatggatgtggttttttttatattgtttttatggtagtgaataagttttatgagatttgatggttttataaatgagagtttttttgtataagtttttttttggttgttgttatgtaagacgtgtttttgttttttttttgttttttgttatgattgtgaggtttttttagttatgtggaattgtaagtttattaaatttttttttttttataaattatttagttttgagtatgtttttattagtagtgtaagaatagattaatatagtaaattggtatttggagtggggtattattgtaaaggtatttaaaaatgtgaaagtgattttggaattgggtagtaggtagaggttggaatagtttggagggtttagaagaagatagtaagatgtgggaaagtttggaattttttagagatttggagggtttagatgataggaaggtatgggaaagtttgtaatgtaagatatgtttttgttttttttttgttttttattatgattgtgaggtttttttagttatgtggaattgtgagtttattaaatttttttttttttataaattatttagttttgagtatgtttttattagtagtataagaagagattaatatagttataatggggtaaataggtttatatttattgggtagtttttttggtatagataggttataggagtaattaaaaataaaggaatttttttcgtttttatttattaaattttaaataaatttttttatttttttattttttgatttttagaattaaagatttttttttgaagtatatttagggtaatgttttgtatttagtttatgtttgataaagttgatttgatttttgattacgaataatggtagagtggtggtgagtgggggtatagagaaggatagtatttttatttttttaatgtgtttgattttttttttggaaataaaaattatatataatttatattatatttaattaagaaaatattgaatttatgtaaaataatgtttttggtgaagttgtaaaaatatgttatattttttagaagataatattattttaaaattaggttaaaaaagaaataattataagatgtattagttttatttataattatttatttttaggttagaaattttttttattgtatattattaaatttataatataataattggatattagtatttgttatgtatttatttttatggtgaaaaattttaattttatataatgttaaagaaaatagtatatatttattaataagatttaataattataaatttcggtatttttatttagttgttttttaaagatataattttggtagttgatggttattgggtttgtttgtgttttattattattgaaatatattttaatgtagtgaatattgattttgaattttaagtttttatttggtggttaatgtttaattaatattattaaaagtgaagattttagtatagataaatttttgtataaaaaattttaaggagaattaaattttttgttttattgtgtagtgaatattgtttttaataaggggattttttaattgaaaaatgaagatatttaagttatatggagttttttgaggattattttaataagtatttgatatttttttatgtatatatgtgttaagtattgtattaagagttttatatgtattcgttttttaaataattttatgagttatgtttattatttttattttataaattaggattttgaagttgtgaaagattaatttatttaattgtttggagttttttaataaatattaggtaggattttatttgttaaaattgtattttatttttataagtgatgttttgaaagatataaaaaaattttatgtttattatgaataattattaaatggtgtaataaatataatattgtatatagtaattgtttaaatgaaagaatttttgtataaatatataaaaagatagatttttaatcggagatgtagttacgattatgggaggtagtaagatgtgaatatagatttttaggaataataggaaagaagtagggtagtttattaaataaaaaatatataggaatataaaggagattgatttaagtgttttgggttttaagtttatattttgtagtttttgtatataagaaattttaaaaatattttattttattggttttattttttaaaaataatttaaaattttggtttataaataataaaaatagtgatttacgtgttaatagaaataagttttttttttttatggttagaggtataattttaagtcgttttaataattttaatgtaataatgtttttttttcgtttaggttggggtattatataaaaatagaaaaatattaagtattaaaatttttattttttttttttttttggagtttgagaagaaatgaagtaaaattaggagtaggtaattttataaataagatttttttttttatttgtttgattgatataatttagtgttgtataagagtaaattgttttattaaagtaaatattttttaatttagttaagttttcgtaaattattaaaaaaatagtttttggttgttaggtttttttgattgaaaataaaaagttaatagttattgttggaggtattagggtgtgtataattttgtgtttttttttatttattgtgtaaattttaggagggtagagaacgtgtttaaatgttttttttgtttttttgataatatgttatagtatagtgttttgtaaatagtgtatttttagtaaattaggataagaattatgtaaaatgaattaaaatatgtagttttttattatagttatttttaatgatagggatacgttttgagaaatgtattgttaggttattttgttattgtgtgattattatagagtgtatttatatagatttatatgatatagtttattatatatttaggtaggttatatggtatatttattgtttttaggttataaatttgtatagtttataattatgttgaatgttatagataattgtaatataatgatatttttgtatttatatatatgtaaatatagaaaatgtatagtaaaaatatgttattataattttatgggattattattatatatgtagtttgttatttatttaaatattattatgtggtgtatgattatttttaaaagtttaataaatgattaattgtagttttatgatatgaaatatgatatttagtatgttaaatttaagtaaataaaaataagaatttaatttggaagaatttatttgttttatgagtttggattaaatttgtataaaaattttattagattattttgtattgttatatgtaaataattagtagagtttaataggggttaataattttgttttaattattaaataaataaattataattaaatttgtttttagaggtaaagattagttttagtaaatagaaagtattttagtttattattagattgaaatttttttttttgaagtggatatgaattttaaggtggaagatttttttttaaaattttgtttttagttaggaagtatatgtttaaaagtatgaaatggtttttttttttagttgaagaaaattttgataatagttgatattttgtgttagtataatttttttttttttaaatattttaaaacgttgtgtatttgttgaaggttatttgttgaaatagattggtatagaagaaagtatgcgatatttgaataatttttttatttaggaaatattattgaatgagttaagttttgttttatttattgggaatatagtagtttgtgttaagttttgttttatttattgggaatatcgtagagaataaaatatttattattatgtaatttatattttatttggggaaattgaaaatataaaaatgaaaaatgaaatatataatattagtggtgaatgttatggagaaaaataaagtagagaaggagaataaggagtgttagggaaaaatttgatgttattaaatgattttaagtaagatattttagtttagttttagtttttttatttgaaaattttaggttaattgaaatgatttatgttaaggtagatagtggaggagttttttttattagttggtaataattttaattaaatggtttggtatagaaaattgaattatgttgtttaggatgttttaaggtttttttttaggattgttttgaataattgtgtcgttatgtttattgagaggattgacgaaggattaaaattttgtttagatgttatcggttatattttgtgttttgtaagaagttgttttttttttaatggtttatatagacggggggtattttttagtcgtttattttttttagggtatggagaagggggatagttttttttttaattggtatgaagttacgatgtgaattagtaattgttttagttatttgttttttattttttatttagtgtttaaatttagttttaattttgtgtatggaaagatgttgattagagtatcgtaattatgtttagagttatttgttttagtaaattgtattaattaattatttaataaataaatttgtttaaatagttgttgagggttttagaatgtatgtatagtatattttttatattggtggtgaaatgaaatggttaaatagtaatattgtgattagtgtttttgtgaacgttttatggtgtaatgtaaaaaaggttatgtagttcgtatttttgttttgttttgtggtagttattttttttattaaaaggtatgtggtaggaagtggggagaattttttgagttttaggattatttaaataggagggagaggggtcgggcggagtggtttacgtttgtaattttagtattttgggaggtcgaggtaggtggattacgaggttaggagatggagattattttggttaatacggtgagatttcgattttattaaaaatataaaaaaaaaaaaaaaaaaaaaaaaattagttaggcgtggtggcgggtatttgtagttttagttattcgggaggttgaggtaggagaatggcgtgaattcggaaggtggaatttgcggtgagtcgagatcgcgttattgtattttagtttgggcgatagaagaagattttgttttaaaaaataaaaaataaataaataataaataaataaatagtaaaaataaataggagggagaaggtattgggagttaataagtttagttattggtagagttattttgtattgtaaattttattatagtgattttagagatagtatttaaaaatgaattttggataatgttttaattgagagttttttgtatttaagaaatgtattataatagtatagattggggttagataagaaggagtagaggggtattagaagaagtttaggaaatttagagtattgtaagaaagagaggaatttagattgttaaatagtttgtttttttagttgtgtttgttaaaaggtttttattttagaattttagggtatattttggttataaataattagtatatgtttaagttaatagtttagtaatttgagtatagttatgtagtagaagttttaattattttttatattttttttttttgtcgttttaaggatttttggattgggtgaattttatttgtatttggtaattatgattttgagattgtgagtggttaacgttaaggaagtagttttttttatagaataatttttttgtttatttttgtttggtaggatgtaatttttttttattgtcgttatttttgtatatattttttagttttattttttgttgatttttgagaattggtttttaatttttattttatgttaatagaattattaggaaattatcgagaattgttttttattttgtgatagtaggagattttaagtataaaatagtaggttattttgattatgattaatcggatagataattacgttgtttttttttttataggaaattgtgtaattttggaattttagaggtgagtgtggttacgtatagattttgttaatgagtatatcgatttgttttagtatagtgtgagtattgttgattttatttttttttattagttaggttataattgtttaggaaatgattttttagatagttttttagttatgttattatttttttttggttgtttattaatgggttacggttttatttattagtttttgggatgtaaaatggttttaggtaagggaagagagaaagtttagattttaatatatagaaagttttaatatatagtagtattatgggaaagagattttaaaaaaaatggtataagtatttagttgaattttttatgtttgtttttttattattttgattgttatagaaattaaagtatgtgatttattaaaaatgaaatagaattataataatataattataatttttaagaagattaaagaataattttttttaaaggaataatttaatttattattttgattatatagaaatttaatgtatgatttttttgaaacgttttttttttataatatttttggtttatttttttttgttttgatattatgtgagggttatatatattgtatagtttttaatattttgatttgtgttttggttttaatttataaaaggtgattgcgtgataattttgagaggttaatgttaatgagagaaaagtttattgttatttatgatggcgtttttggaagtagaagatatagtacgttatagagggttatgtgggaaagtattggagtagttttaggtcgggtttgttagtttttttgtattttggaaggagtttgtttgggttggggttgttttttggtagattttaaatttttattttgttaatttatttaaaggtgattgggtttaaaggggttgattgattgtaaataatttggagaataaattaatatttattaataaagttaaataatttacgtaaaattaaagtataataggtataatttatattattggttttttttttaatttaggggtattcgttttttttttatagatttatttagaaaattgtattatggaatatagttttatttataagtatagagtttgagcgaaagggtagatatttttttttgtaaattaattttaatttgtattttaagttttagggtatatgtgtaggatgtgtaggtttgttatataggtaaacgtgtgttatggtggtttgtcgtatttattaatttattatttaggtattaagtttagtatgtattagttattttttttaatgttttttttttttattattttatttttcgataggttttagtatgtgttgtttttttttttgtgtttatgtgtttttttgtttagtttttatttataagtgagagtatgcggtgtttgtttttttatttttgtattagtttgttgaggataatgg

SEQ ID NO: 451 - DNA, 6593 bp, Artificial Sequence
  chemically treated genomic DNA (Homo sapiens)
ttttgattttaaagaatgttttttgtttataatatataattatttttttaatttatttagttattttacgtatttttattggagtatttaattcgtttatatttatattatcgataggtaaggatttattattgatattttgttattttttgttttgtagtttttttgtttttttttttttttgttgttgtttttttttgtgttttgttgatttttttgtagtgatatgttttgatttttttatttttttttttgtatgtatgtatttatttttttttttttatttattgtatgtattttttttatggtttttatgtttttttgttttttttttttttttttggatatttataattaatatatttgtttatttggtggtgtttgataatttttttagattttttttattttttttgattttttttgttttttgtttttttgattggataattttaaatgatttgttttggagttgattaatttttttgtttgattaaatttgttgttaaatttttatgatgaattttttattttagttattgtatttttttattttagaatttttatttggtttttttttattttttttatttttttataatatttttatttatttaatgtgttattttttttattttgtttagttgtttatttgggtttttttgtaatttgttgagttattttaagatgattattttgaattttttgttagataatttatagatttttatttttttagggttagttgttgtatatttattttgtttttttgattgcgttttatttttttgtttttttatgttatttgtagttttgtattgatgtttttatatgtgatatttatgttttaatgatatgttttttatttttaatgaattggttttgatagggaaagatagtttagatagagtttttgggttttgtttttaggttttgatttaggtgtttagtttttttttttttttttttttttttttttttttttttttttttttagtattagtaattttttgttttttttggtttttatgttagttttatttgtgttttatatgagatgagatagaaattagttttttagggagtttattgaaaggtttaggatattagagttatgatttattttttttttttttttgaaggagaggttttagttttatgttttttatagattttttcgagttttgttagttatgggaaggtgtttatttttttagtttttttaggtatttggattatgttatgtttttaagtattttgtaagaggtataatagaagttagttttttgaggggtgtattgaaaggttagaaatgttggatgtttattttattttttattttttgttttttttatattaggaaaggattgtagtttttttggtgttgagttgtattcgtaggtaaagtgaaatagttttttttatttgttttagtgtggttgattgtgattttttgtttgtttggggtattgaaattttttaatttaattttgaattttttatgaagttaatttgttatttatattattgttaaatttgtgtttttgttgggaaatgagggttggaattttttattttgttattttgttgatattattttatttttgatgtttttgaggttatttatgtttattgtatttgtatgggggagatgtatgtattagtggtggttttggtttagagtttttaatgtggttgtggtaaattttagatgttagagatggagtttttttgaggtttaggtggggttgagatttgtttttgtttatttatatggttgttgatagattttagtttttaattgaatgttagatcgaggatgttagttttttttaggttgtttgttagatgttttagttttttgttatataagtttttttataatatggtagataatttttttaagataagcgatggagtgatgggggattgggggaaggaaaggagggagagagagagggagagggggaggagagagcgtatatataagtatgagagagtaattaagatgggagttgtagtttttttaataatttaattttggaagattattttattatttttgttgtgttatgtttatgagaaaattattaagttttgtttatatttagatggaagaaattaagttttattatttgtaaaggaggagtataaagaattgttttattataatattatatgatgttatgttattgtatatttttttttaatattgtatttagtgatataatattggtagtttgaaattagttatggtgggaatatttaaattatggaaattagtaaatattttaagttagatttttttttttagatagttgatatttattagtatatattaggatgaatatagagttatgtgtttataaaatttttatgaagtagacgaattttaggaagggttttgaaagaaggaaataaaatattattgataaagaaaaagatagttttttaatttaaagataatagaggtgaagtaagaagtggagggagatttagggagtttaaatatgtttttatggatgtttataatgatatgaagaaaaagtagttttttttttttttttttgttttttgtgtgtgtatgtgtgtatatgatttgaaatggagattgtatattaaatttaattatgtgtatatatattaaagatttggtatataagatttttttttaatttagtaattaggatgggtatataattttttatataattgtttatgaagttataaataagtaatttatacgttagtaaagttgatatagttgatttatatttaaaatagtttagaaatttaaagattaaattttagtttatttgaattgatgttttggtgtatgtagtacgattaataatatgtgaggagtgttattatttattaaatgagtaggaatttattttaaaaagaaaatttttagaattatagtattttaggtttgaaagagatagtgggaaatttatagtatattattttttaaaatgtttttgttaattaaatattaatattagaaatgattggttttttttttaaaatttagaagtttgttaatatttgaaatttattttagatttgatgaatttataggggtttaagaatttgtatattttataaattttttatatgattttgttgtaagtaaacgttagagagtgaaaaatttaaattttttattttatagattagggaaataaataattaagttgtaaaagagaattttttgtttaataagtgagattatatagtaggtatgattttatatattataatttttttttttttaaaataaaattttttaaatttagtaattagggtggatatataattttttgtataattgtttatgaagttataaataagtaatatatatgttagtaaagttggtatagttgatttatatttaaaaatagtttagaaatttaaagattaagtttttattttaaaattttttattttggagaaaatagaacgtatattttttgtttaaagagatagttaaggaataatataggattttaatgaaaaatatgttgtttatgtgtgtagttattagttagtatgttttatttagttataaattagtgtggttattttaaattgttaatatgaaaattttaattttttatttttgaagttatttggttttagttatttaatttttttttttaggtttttaaggttgttgttttgggtatggttttagaaatataattataagtttgattttaaatttttggattatgtaattaagtatagattggttatagtggaaaatatataatttttagttttgtttatattgataaaaaaaaaaatggttggatttatattaatttaatttgagtgttatgtgtttatagtgatagttttttttcgaaaacgtaaaaaaaaaaaaaaaaaaaaaaagaagatttatgttgttgtagtatatgtatataggggtgtttaaagttagtttttttagtagtattttattaattatgtttgtgtttttatttattgatttaataagatgatttaaatatttaattttttttttacgtaaaagtttttattatgggtaatgtattgttaaacgggtgaagaatgaataggtttagaaaaataaagaagtttaatatggaaaattattcgtatggtgtttattttttttgttcggttgtaatatttaatggattatttattaatttagatttgtgttgtttttgaatttaaatagtagtttttttagagtaatatttgttttagatattgttttaggaatataaatttcgattaaggggtggatatttaaagttgtaaatgattttttatttttataatagttttgtaaaaggaacggaggtgttatgttattattagagtttttttaataggatttaattttaatgttaaattaaattttttgtttaaagtattagtagagttgtatttattttttttatagtattaaagaggagggttggtgtaggtatagttatatgatattgttttatttattttgtttgtttgttttttggaagaatttaggaatgtgtataaatataattaaggatagtatttataaattggaagaaagtatttttatttttttaaatttttaaattaaagtatttaatgttttgatttttagtaagattttttaataaatgaaaatttaatttttgggtttgtgttttgatttttgatataattatgaaagacgtattaggagatggtaagtggttgttagtatttttttttttttggaatattttttaatttttggtggattaagatggaaattggtaggtttggaatagatgtttttttaaaaggttttattaataatataagaatattttttttatacgtagtgacgtgggtgggttatgggtgttttaatgatagtaacgttttcgaatttcggattttagttgttattttatttgcgtcgtttcggacgttatttggttgttgacgtggtttcgagttagtaaataacgttagtagtttttttagatttacgtcggttcgttttttcgtcggtttttttttcgtagtggttttttttgtagtttttttgggtttcgcggttagtagtgtagttcgtggagtcgcggttttgtcgttttttttgggtggttttagtgcgcgggttgatatttatttagtcggggaaggtgaggcgagtagaggttggtgcggaatttgtcgtttttagtagcgtcggcggttaagtttagggtcgggtagataaaagaggtcgttcgcgtaggaaggtacggtcggcggcggcggagcgtagcgatggtcgggcgagggggtagcgcgttgttggttttgtgcggggtattggttgtttgcgggtggtttttgggcgtcgaagtttaggagttcggggcgttcgcggcgggtatgaggcggcgtcggcggttgtagtaagaggacggtatttttttcgagtattatcgttatttcgagttgcgcgaggcgttcgtgttcgtgtggttgtagtgtatcgttattagtaggatttatacggtggggcgtagtttcgagggtcgggagtttttggttatcgagttgttcgataattttggcgtttatgagtttggtaagggcgttgttttttgatagttttgggggtatttcggaggggggcggtagagggtgggattggtggcggtgggggaaggagggagggatgggtttaggggtgttttttggtaaaaggtatttaaggtggaaggtgggaagtggagggagggatggaaatggggaagaattcgatttagagcgttagtggtttaatttttgttttttcgttttatttttttagtattaattttatttttttagattttaggttattttttagtaagtataggtttgggaggttggggtggcgggggatgggggggatagtaatatagaaaaaataaattttgacgtacgtaattttagcggtcgtttttattttgttgtgtgaaaaatttaaaggaatgattgcgagttttcgtaaggggggttggttttttttgttgataagagtagaaagataaggtgtagaaggtagtgattgagaggaaaggagaacgagggagaaagagttatttattatgttttttttaatttttagaggattagtttattggttttgtgtatttatttttatttgtgtgtgtatacgtattaggtatattcgttgttgtggatgtttggggaattttagggatattgttaatttggggtggtggtgtataaagatacgttggtgtttttttttttattagggtgaaaagtggtttttgatttttgaaattagattttgaaattgtataaggtttttttaaggaaaaaggagtattttattttttttgttataattatttgagatgaatagtttgtgatggggtttttattttaattgatgtttttaaataattatttgtattcgttttttttaggagtatattaaagtattttttggtttatgttaattgtgatgtatttagtattaataaagaggtatttaaaaatgtttttgggatttttttcgttatgtttttgtttaggaaataatttgggtttggttttttgataattaaggtata

SEQ ID NO: 452 - DNA, 6593 bp, Artificial Sequence
  chemically treated genomic DNA (Homo sapiens)
tgtattttgattattagaagattaggtttaaattattttttaagtagaaatataacgaaaaaagttttaagaatatttttaaatatttttttattaatattaaatgtattataattaatataaattaaaaggtgttttaatatatttttaggaaagacgaatatagatggttatttgggaatattagttggaataaagattttattataaattatttattttaaatggttatagtagagaaaatggaatatttttttttttttggaaaggttttgtgtagttttaaaatttggttttaaaagttagaaattattttttattttggtaggaggaggggtattaacgtatttttatatattattattttagattggtaatatttttaagattttttaagtatttatagtagcgagtgtatttaatacgtatatatatataggtagagatgggtatatagagttaataaattggttttttggaaattagagaaaatatgataaatgattttttttttttcgtttttttttttttttaattattgttttttgtattttatttttttatttttgttagtaaggaagattaattttttttgcgggagttcgtaattatttttttgggttttttatatagtaaagtgagagcgatcgttggggttgcgtgcgttaggatttgttttttttgtattgttattttttttatttttcgttattttagttttttaagtttatatttattagagggtggtttaaggtttggggagatgggattggtgttggggggatgggacgggaaagtagaaattgggttattggcgttttaagtcgggtttttttttatttttatttttttttttattttttattttttattttagatattttttattaagaggtatttttgggtttattttttttttttttttttatcgttattagttttattttttgtcgttttttttcgggatgtttttagggttgttagggggtagcgtttttattaggtttatggacgttagggttgtcggatagttcgatgattaggagttttcggttttcgaagttgcgttttatcgtgtaaattttgttgatggcggtgtattgtagttatacggatacgagcgtttcgcgtagttcggggtagcggtggtattcgaaggagatgtcgtttttttgttgtagtcgtcggcgtcgttttatgttcgtcgcgggcgtttcgggtttttgggtttcggcgtttaggagttattcgtaggtagttagtgtttcgtatagagttagtagcgcgttgttttttcgttcggttatcgttgcgtttcgtcgtcgtcggtcgtgtttttttacgcgggcggttttttttgtttgttcggttttgggtttagtcgtcggcgttgttgggggcggtaagtttcgtattagtttttattcgttttatttttttcggttgaatgagtgttagttcgcgtattggggttatttagaggagacggtaaagtcgcggttttacgggttgtattattggtcgcggagtttaggggagttgtaggagaaattattgcgaggagggggtcggcggagagacgggtcggcgtggatttgggagggttgttggcgttatttgttggttcggaattacgttaatagttaaatggcgttcgggacgacgtaggtgaaatgatagttaaggttcggggttcgggaacgttattgttattgagatatttatgatttatttacgttattgcgtatggaaaaaatatttttgtattgttagtggagttttttaaagggatatttattttaagtttattagtttttattttgatttattaagaattagagaatattttagaaaaaaggaagtattggtagttatttgttattttttgatgcgttttttataattgtattaagagttaaaatataaatttaagggttgggtttttatttattagaaggttttgttggaaattagaatattaagtgttttgatttagaggtttaagagaatagaaatgtttttttttaatttgtagatattgtttttaattgtatttatgtatatttttagatttttttagaaaataaatagataaaataaataaggtaatgttatatggttgtgtttgtattagtttttttttttaatattatggggaaaataagtataattttgttgatgttttagataaaggatttagtttggtattaagattaaattttgttaagaaaattttgatgatgatatgatattttcgttttttttgtaaagttattgtaaaaataaaaaattatttatagttttaaatatttattttttagtcgggatttatatttttggagtaatgtttggagtagatgttattttaaagaggttgttgtttggatttagggatagtataaatttaaattaataaataatttattgggtattgtaatcgagtaggaaaagtggatattatgcgggtaattttttatgttaagtttttttgtttttttaaatttgtttattttttattcgtttaataatgtattgtttataataaaaatttttacgtggaaaaggagttagatatttaagttattttattggattaataaataaaagtatagatatggttggtaaggtgttgttggaggggttggttttaaatatttttatgtatatatattatagtagtatggattttttttttttttttttttttttttttgcgttttcggggagaaattgttattgtaaatatatggtatttaagttgaattgatgtggatttagttatttttttttttgttaatgtaggtagagttaaaaattgtatattttttattatgattagtttgtgtttgattatatggtttagaagtttgaaattaaatttataattatatttttaaaattatgtttaaaatagtaattttggaagtttagaaaaaaaaattgagtagttaaaattaaataattttagaagtaggaggttaagatttttatgttagtaatttagagtaattatattaatttgtggttaggtggggtatattgattagtaattatatatataaataatatattttttattgaagttttgtgttgttttttagttgtttttttgaataaaggatatgcgttttattttttttaaaataaaaaattttggaatgaaaatttggtttttgaatttttgggttatttttaggtgtaggttagttgtattaattttattggtatatgtattatttgtttgtggttttataggtaattatataaaagattatatatttattttgattgttggatttaaaaaattttattttggagaaaaaaaaattgtaatgtgtaaaattatgtttattatgtggttttatttgttgggtagggggtttttttttatagtttagttgtttgtttttttaatttataaaataaaaggtttggattttttattttttaacgtttgtttgtaatagaattatgtagagagtttatagaatgtgtagatttttaagtttttatgaatttattaggtttggggtgggttttaggtattaataagtttttaggttttaaaaagaagattagttatttttgatgttgatgtttgattgataaagatattttgagaaataatgtattgtaggttttttattgttttttttagatttaaaatgttatgattttggaaattttttttttgaagtgaatttttgtttatttgataaatggtggtattttttatatattattggtcgtattatatatattaaggtattagtttaaatgaattaaaatttggtttttgaatttttgagttattttaggtataggttagttgtattaattttattggcgtatggattatttgtttgtggttttataggtaattatgtaaaagattatatatttattttgattgttggattaaagaaaaattttgtatgttaagtttttaatgtgtgtatatatagttaaatttagtatgtaatttttattttaaattatgtgtatatatgtatatataagaaataaaaagagaaagaaagagttgttttttttttatgttattataggtatttataagagtatatttaaattttttaggtttttttttattttttgttttatttttattatttttaaattaagaaattatttttttttttattaataatattttattttttttttttaaagttttttttaaaattcgtttattttataaaaattttgtgaatatatagttttatatttattttgatgtgtgttggtaaatgttagttgtttggggggaaaagtttgatttagaatgtttgttaatttttatggtttaaatatttttattatggttgattttaaattattaatgttgtattattgaatatagtgttaggaagagatatgtagtagtatgatattatatagtgttgtgatgggataattttttatattttttttttgtaagtgatgaaatttaattttttttatttgagtgtaggtaggatttagtggtttttttatgaatataatatagtaaaagtaatgagatgattttttaaaattaggttattaaaaagattgtagtttttattttaattgtttttttatgtttgtgtgtgcgtttttttttttttttttttttttttttttttttttttttttttttttagttttttattattttatcgtttgttttggggaagttgtttgttatattgtggagaggtttatatagtaaggaattgaggtatttggtaaatagtttgagagaaattgatattttcggtttagtatttagttaagaattgaggtttgttaataattatgtgggtgggtaggggtagattttagttttatttgagttttaagagggttttatttttgatatttgaggtttattatagttatattagagattttgagttagaattattattaatatatatattttttttatatagatataatagatataaataattttaagaatattaaggatagagtgatgttagtaagatagtagaataggaagttttagtttttattttttaatagaaatatagatttaatagtgatataagtaataaattagttttataagaagtttaggattaagttaagaaattttagtattttagataaataaaaaattataattagttatattgaaatagataagaaaagttattttattttatttgcgagtataatttagtattagagagattataatttttttttggtgtagggagggtaggggatagagagtagggtgagtatttaatatttttggttttttagtatattttttaaggggttggtttttgttgtgttttttatagagtgtttaaagatatggtatagtttagatgtttgggaaagttaggagaatgggtatttttttatggttggtaaggttcggagagatttgtagaaggtatagaattaaggttttttttttaggaaagaaggaggagtggattatgattttaatgttttgagttttttagtgagttttttgaagagttagtttttattttattttatatggagtatagatgagattgatatgggaattagagggagtaagagattgttagtgttgaaaagaaaagaaaggaaaagaaaaaagaaaagaaaagaaaaagattgaatatttggattaggatttaggaataagatttagaaattttatttgggttgtttttttttattaaagttagtttattaagagtggagaatatgttattaagatatggatgttatatgtaaagatattaatgtaaagttataagtaatatgaagaaataggaaaataaaacgtaattaaaagaataaaataaatatataataattggttttaaaaaaatggagatttatgaattgtttgataaagaatttaaaatgattattttaaagtagtttaataagttataagagaatttagatagataattaaataaaatgagggaaataatatattaaataaatgagaatattatgaagaaatagaaaagataaagaagaattaaatggaaattttgaggtgaaagaatgtaataattgaaataagaaatttattataagggtttaatagtagatttgattaaatagaagaattagttaattttaagataggttatttgagattatttagttagagaagtaaaaagtaaagaaaattaaaaagagtgaagagagtttaagggaattattagatattattaagtgaataaatatattgattatgggtgtttagaaggagaagagagagataaagaaatatggaaattataaagaaaatatatataatagataaagaaaaagaaataaatatatatatataaaagaaaaaataagggaattaaagtatattattataaaaaaattagtaaaatataaaggaagatagtaatagaggaaaagagagataaaagaattataaaatagaaaatgataaaatattaatagtaaatttttatttatcgataatgtaaatgtaaacggattaaatgttttaataaaagtacgtagaatagttgaatggattaaaaaaataattatatgttgtgagtaggaggtattttttagaattaaag

SEQ ID NO: 453 - DNA, 2095 bp, Artificial Sequence
  chemically treated genomic DNA (Homo sapiens)
tttgtttttatattaaattagaaattaaattttttttatggttagttttttatgtttaggaatgcgtgaagatagttagtttgtgaggttagaagtaagatggagttggttatgttagattttttttgttgttataattttcgtaaaggtggttttattaattatcgggattttttattattggagatgattttagattttttttagtttaaagatttggagaggaatgtatataataaattttattaaattattttttttttttatttatttttttatatattttttttttataagttattattattaggaatttttttttttttttgttttgttaatttttgtaatgtattaaatgtattattgtttgttaaaatgttgtgttattttttaggtttaattgtttttttgtttttttatttttttaggaaggtttttgtatatatatatgataaatttttttttttgttaatttgttttttgttagtttaatttgtagggttttagatattgaatttaagaaggtaaaggaaaatatttttttttttttttatagtggtatatgtatattatgaattattattatttagtattttaaaggatggaaattttgatatatgttatattatgtatgaattttgtggatattatgttaagtgaaataagttagttataataagatgaatattataaaattttattggtgggagtgtttaaaatagttaaatttatagggatagaaagtagaatggtggttgttaggtattagggggatggggaaatgagaagttgtgtaatagttatagaagtttagttttgtaaggcgagaatgttttggagattagttatttaggggttaagggaaaagttttttttttttttatgaagttttattgaaaaattaatttataaaaggtagattagtaggagaaataatatataaatgtatttaatgtgtatatgggaatttttagaatgaagatagaggaaagtgtatatttttatgtttaggtttaaaaagtatgtagagttgtttagaaatatgattggataaaagggtatgatgtaattttaatagatggagtgaggaaatttagtaaggtttgtttgtttagattttttttggtttttttgagtagtattttttttttttgcgtatgggataggattttttttggaatgggggttttatgatttataattaaataaggtaggttcgattatttttttatgattagtttttatatagaatgtaaattaaaagtatatgagataggtttcgattaatgtataagtaaattttagtattaataatattgtattttgtatttgttttgtttaaaattttttgtatgatatgaggtttttggggttttgtgagttttgtttgttttgttttgttttgagagagggtttttttttgttatttaggttggagtgtagtggtttaattttagtttattatatttttattttttgggtttaagtgatttttttattttagttttttgagtagttgggatcgtaggtatacgttattaagtttagttaatttttaagttttttttagatacggggttttgttatgttgtttaggttggtgtggaatttttggatttaagtgatcgttttattttagttttttaaagttggggttataggtgtgagttattgtgtttggtatgatatgagtttttaatattatataaatatatgtttatttttgtatttatttatttatttattgagatagggttttatttatattatttaggttggtggagtgtagtggtatgtttttagtttattataatttttgttttaagggtttaagtaattttttttttttagttttttaagtaattggggttataggtaggtattattaggtttggttaatttttgtatttttagtagaggtggtgttttattatgttgttcgggttggttttaaatttttgattttaagtgatttatttgttttcgttttttaaagagttgggattataggtgtgggttatcgtgttcggtttattttttttattatagttttttgagttttttttttattttttttttttatttaatttttttg

SEQ ID NO: 454 - DNA, 2095 bp, Artificial Sequence
  chemically treated genomic DNA (Homo sapiens)
tagaaggattagatgagagaagaagataaagaggaaatttaagaagttataatagaaaagataggtcgggtacggtggtttatatttgtaattttaattttttgggaggcggaggtagatggattatttgaagttaggagtttgagattagttcgggtaatatggtgaaatattatttttattaaaaatataaaaattagttaggtttggtggtgtttgtttatagttttagttatttgggaggttgaggaaggaggattgtttgagtttttgaagtagaggttgtagtgagttaagagtatgttattgtattttattagtttgggtgatgtgagtgaaattttgttttaataaataaataaataaatataaagatagatatgtgtttatataatattaaaaatttatattatgttaggtatagtggtttatatttgtaattttagttttgggaggttgaggtgggacgattatttgagtttaggaattttatattagtttgggtaatatagtaagatttcgtgtttagaaaaagtttaaaaattagttaggtttggtggcgtgtgtttgcggttttagttatttaggaggttgagatgggaggattatttgagtttaggaggtagaggtgtagtgagttgagattgagttattgtattttagtttgagtgatagagggagatttttttttagaataaagtaaaataaataaaatttataaaattttaaaaattttatattatataagaagttttggatagaataggtataaggtataatattgttgatattagaatttatttatatattgatcgggatttgttttatatatttttggtttatattttgtataaaaattggttataaggaaatgatcggatttattttgtttgattgtaggttataagatttttattttagaaagggttttgttttatacgtagaaggaagaaatgttgtttagagaggttaagaagaatttagatagataggttttgttgggtttttttattttatttgttaaagttatattatatttttttgtttagttatatttttaaatagttttatatattttttgaatttaagtataaaaatgtgtatttttttttgtttttattttgaaggtttttatgtatatattaaatgtatttgtatgttattttttttattagtttgttttttgtgagttgattttttagtgaaattttatagggagaaggggaattttttttttggtttttagataattaatttttagaatattttcgttttgtaaaattgaatttttatggttattatataattttttatttttttatttttttagtgtttgataattattattttattttttgtttttataaatttgattattttagatatttttattagtggaattttatagtatttattttattgtaattggtttattttatttagtataatgtttataaggtttatgtatagtatagtatatgttagaatttttattttttgaaatgttaagtaataatagtttatggtatgtatatattattgtgggggaagaaaaaaatgtttttttttatttttttaggtttagtatttggggttttgtaaattagattgataaaagatagattagtaggaggaaaggtttattatgtatatatataggggtttttttagaaaagtgaaggggtagagaagtagttagatttaagaggtgatatagtattttgataaatagtgatatatttgatatattgtagagattgataagataaaggaaaagggggatttttaatggtggtaatttgtgggaaggaaatatatagggaaataaatagaagaaaagggtggtttagtaaggtttgttatatatatttttttttaggtttttgggttgaaaagaatttagagttatttttagtgatgaagagtttcgatgattaatgaaattatttttgcgaagattatgatagtaagaggagtttaatatgattaattttattttgtttttagttttatagattggttgtttttacgtatttttgggtataggaagttaattatggaagggatttagtttttagtttaatgtggaagtaag

SEQ ID NO: 455 - DNA, 7134 bp, Artificial Sequence
  chemically treated genomic DNA (Homo sapiens)
ggtttttcgaaatttttgttttaaaggtagttaatgattttattattttttatagtttttattcggtatttttgttttttggatgattagagagtaaagttttttgtttgttgattttatttttttttttggtgttgtttttttttatgtttttgtgatattatatttaaggttttaagattttttgttttttgtttttaatgtgattgttgttttatgttttgatattaagttttttattttttagttgtaagagtttttttgaatgagtttattattttagtattatgggtattttaaaaatttttttttttagtttttatttttttttggttttatgtttttatttatatagttattaatgttttaagtttaatatgtttgtagtaagtttgtagtaagagaatattttaaatgtgtttttttttttttttgtatttatttaattttattaattttagaaataggttttggtttaggttaaagagttagatatgggggaaaagattattttagatagatgtagagaataaagggaattgatttttgatttttaagtttatatggatattgatatgggtttaaagtaaaaggttttaaatgtgtattttttaagagagtattttagtttattagaggagatgaatttttaatgatatgaatggaagtagttttatgttttttgagtaagtattattggttgtaagtgtttatgaaagtattatggaggtaggtataggaataatattaaatattttttttattgttgtttgatgaggattattaaatatgtatttaatatttattgttttttgattgttttataggaggaatatttatatatattttaatattttgttattagtatttttttaaatgatttatttttttggttggtttataatatttttaagattttgagaatggatggtaagagtattttatattgaagggatggagtggttaggaagtttttgtatttgggtaaatggaatagttagagagttttagttaaattggtgggaatatttttattaagaattgtttttattaaattgattattttttgttttttttataaatttttgttttgtatttgttagtttttttttttaagttttttatttttgttaattttagatatgtaggtttaaaattttagaattatatttaaaaatttttttttttggtgggtatttatggtattttttgtttattatatttttttttgtttagaaatgatattttatatgatatttttaatttttttattttaaaatattaacgggagagtttatgtttttatatgattttatttttttatttatggttattttttattggttggttttatggtaggtatttgaattaaggtgggaaatagtttatattagaaaggtttaagttgtaataaaatatttggtagatagttttttaaattatttttttttatataataagaagtttaaaggttagtggtttagtgttggtgtatttgtttatggatgttattaggattaaggttttttttttttgattgttttgtaaatttttatatgggatttttagagttttagttataaaatggttgttgtaattttagatattatattaatattattatagggaagaattagggagaagttatagggattgaaaggataggtattatgagttagttttttttataaaatttttttgaaatggtatttatatttttgtgaaaaaataattttaaaattatattagttaaagaaaaagtaagttgataatattaaattgtattggatatttagattataaatataaatagttttaagaattaattattttaataatttatgtaagtatttgttattatagatttaaaagtttaaaatataaattttaggagaaaaaaatgaattaatattttaaaaattttatttttttggtaattttattattttttttttattattttattaaaatttttgatgagttgggtagaaggatgttaaggtaaatatagatttttagtaatattttgttattaattagtttgagtttttgtatttatttgaaagtaatagaattgagtgaatttggtaatatattttttaattttggtttttagaattttataattgttgaaaatagtatagtttagtaaaaatagtgagaattttaggtgtgtgtgtgtgtgtgtgtgtgtgtgttgttagaaggtagtaaagttattagagggataaatattagaattttttttaatatgtattagtaggtttaaaataagttatgtttaatagggttttaggaaaaagttcgtaaggattttgagaagtatgtggagtttgaaaaatgatgtttatgtattaatatttataaggttaggtagaattatttttgtaatagggttatataaaaaatagttggaaagtaatgtaagaaattaagttaaaaaatagataagaatttttattttatattttattttttataatttattagaaattttttatttgttttaattagttttttgatgtaagaaattatttagataggtgatgtttttttttttttttttatatcgataaatataatttaaatataagtattttatttgggaataatttgaatttttagaaaggtgatttaaatttatattaataaagttattgaagttttttttaagtattgaataatagtttgttagtagggagggtgttaggaattagaggaagaaaggagtgaggtttttcgtatagagaggttaaggatgagagggatggaaatttggaatttagtatgtaatttgtttaggattagtttttgtgatcgggtaaatgtttaaaatagtttgtttttatttagttttaattaattttatgggttttattaattttatgggtatttttagtagaattagagtaataatgagggggttttttataaataaacgtattagggaggtttttttttatttgatgaggtttatttattattattaggtttagtttaattttattataggtatttagtagaggttattaattttttttataatgataatttttatttttttttttttatttttaatttggttttttggtaggttgtattatgattaaaagttaattgttttttttttttaaaagtcgtttagttattttttaatttaagtttttattttttatagatttttagtggtgaggtttcggtaagtatatttattttgttaatattatgttttagtgagagttgttaggtatagttgtgtgtggataagatgttaattgatttgatttaaaagttattgaagttttattagtgtattttgttataaagaaaatatttgtgggaaaagttattagtggtttaaattattatttattattagaaattaaaattatttcggagatttatgggataaattagtttatgataatagtttttatatttttacgtttaggaattatggagttgtggtatggttataggggagataaagatttgtttgttaaatttattagtttttttttttatttttttaaagggtgggggaagggagatagagtaggaggaagtgtggatatttgttttgtttagtttgtagtagttgttgtaagtattaaacgtgagtaatatttgggagtattttatagtagtagaataattattttttaaatttttatttgttaattattaaaatatattaagttaggaattttttattggttaattaaaatagttacgttgttttttttttttttaaaataattaagtaggtattatagaagtaaggtttggggaaattttttttttttttttttttttttgagatagagttttattttgttatttaggttggagtgtagtggtgcgatttcggtttattataatttttgtttttcgggtttaagcgatttttttgttttagtttttcgagtagttgagtttataggtgtacgtcgttacgttcggttatttttttgtagttttagtagagatagggttttattatgttggttggtttcgaatttttgattttatgtgatttaatcgtttcggttttttaaaatgttagtattataggtttgagttatcgcgttcggttttagtttggggaaattttaaggatagaattgtgatgtggattcgattatagaaagtttttttttcgattttttttcgagtttattattagttttttttattttttttagaaaattattttttagtaaagagttttttagtttgtttattttttttaaaaattttagaggattaggatttagggcgaagggcgggtttatatagattttgagttaggttttgtattcgtaaattttgtttgaaaatgtaagcgggattgggatttttgttatattttcgttttagttcgtttttagttttttagttttattttattttttttttttggttgagtaaatagtcgattcgaggttgtacgtgataagaaagttttttttatttttttcgttttttttatagtatcgttttcgttttattttttttttttcggattagtttttttgggcgcgtcggatttttatttttcgtttcgcgtagggacgtcgtaggcggcgataggattcggattatagtttttagcgcgttttagttttcgttttcgttttcggagttcgacgttgtagcggtttttttcgaaaggtttttttcgtttgtgtagttcgtcggtttaatatttcgggggtttgggtggggggtttaaacgtagggttttgggacgtaggtattgttttaggtgatagtgcgggaatatggttttgtagttgggtaggttgagttcgggtttttgttggttcgtggcgcggggcggttgcggagggtttcgcgtttggttttagtgcggcggcggagggtttcgagtttggttttagcgtagcgtagtcggacgcgtttgtcggttttttggttcggttggtacggagtagagtcgcgggttggggtacggttcgacgtcgagaggcggtttttgggtggggatagggttggtcgcggcgttggcggggttggtggggttggttatcgtcgttttcgggtatgtgtagcgggcggagatgttgtttaagatttcggggacgcgggttatttcgttggggaggtcggaggaggaggaggatgagttggtttatcgttgtagtagttttatggtttcgtttgtgatcgatttgggcgagttgcgaaggaggtcgggcgatatgaagattaagatggagttgttgattttggagatttaggtttaggtgtgttaggttttggtataggtagacgggggcgttaatttttttgtggatcggtgggagaggaaggaaggtaaggaggtcggtttttggcgggagttggagatagggaaaaagggttaggttttaggttgtagatagaaaatataatagtttataatatgggatggggtaggtagggggtatttatagagaggtcgtttggttagaggtcgttgataaaaagatggatacgaaagggttattagttttttgtttgtaggtatggattcggattagttgttattgtagtattgtattttaaaatttttgtaatttcgtagtagtatttttttgtagaatttttaaggggtatttgtagttaataagtttagatgtttaaagttcgttattgaatataaattttaatagattatggaatatattttttttttttttttgggtgaatttgtttttttttttttttaggagatggaaagaatttattttttgtgcgttaagtgtcggttaaatttttttagttaggatgttattgtgttagaatttttttatttttttttattgttatataagatatatttgattcgttttttagtagtattattaaatgtacgtattagattttttgttaggaaaatttttttttttaatattaaaatatttgagtattaaaatttagttttcgtagaggcgtatatttatgattatgttgttgtttatatagtgaaattttatattttgagtggaaatttgaaagatttttgattttttttagttggaaatataatagtagttttttatcggtagattttgagttgtgatattgatatatttatattaaatgaagtttagtttagttttttattttatgtttttaagtaaagattattgaattaggatataattttaagtattagattagttgtgtgatttttagaagttatttttttatggttgtttttttatttatgaaatatatatgtattttattttttttaatttttatattatatatatatatatatatatttatatatatatatatatatatatatggatggaatatatgtgaagtgtttagaatattgtttgaagtatagatagtatttagataaattgttgtagttatttgttagtagtttgattttggataagatgttttgtttttttggtttttagtttttttatttggaatatatgagggttgtattggattattttatgttttatttagttttaaatgtttttagaaataaaataagttaaatatgaatttttatgaaatattgtttttgtagtgattttaatattttaagaaaaaaaattagtaaggttgatatacgtgaatattaatgtgcgttttatttattttaaggttttgaatttttttagaatttgattatttattgttttttaattgtttgtaaattaaaaggtaagtagtttattgagaaagaaatttttgaaataatattgattttttaaatttagtaataatagaatattttttaagtttatttatttttatttttaattttagtttttttttatatattataattgatagatgttattttgaatagtagaatttgaagggagaatattttagtgatttattttagatgatggtaggagaatgttgaagaaatatttagtttagtgatatgagaaggtttagtatttgtttaatattaatagtatatgttataaagttaagttagttatttaattgtattgtatataaaatgataaatatattgatataaaagatttgggaaacgggaaaataattatttttatgtaagtgttgtttttagttttgtatatatttttatattttttttttttttatatttttatatatagg

SEQ ID NO: 456 - DNA, 7134 bp, Artificial Sequence
  chemically treated genomic DNA (Homo sapiens)
tttgtgtatagaaatgtaaaaaaggagagaatgtaagagtatgtgtaaaattgaaagtaatatttgtatgaagatggttattttttcgttttttaaattttttatattagtgtatttattattttatgtataatataattagataattagtttagttttatgatatatgttattaatattgggtaaatattggatttttttatattattaaattgaatatttttttaatatttttttgttattatttaaaataaattattggaatattttttttttagattttattgtttagaatggtatttattagttatgatatatgagagaaagttaaggttaaaaataggaatgggtagatttgaagggtgttttattattattgaatttaagagattaatattgttttaaaaattttttttttagtgggttgtttgttttttaatttataagtaattaagaaatagtaggtaattaaattttgaagggatttagaattttagagtgagtgagacgtatattagtatttacgtgtattagttttattaatttttttttttaaggtattagggttattgtaagggtaatgttttatgaaagtttatgtttggtttgttttatttttaagaatatttagagttggatgggatataagatgatttagtataatttttatatattttaaatgagaaaattgaggattagaggggtaaaatattttatttaagattaaattgttgataagtggttgtaataatttgtttaaatgttgtttatgttttagataatattttaagtattttatatatattttatttatatatatatatatatatgtatatggatatatatatatatatatgtagtatgaggattaaaagagatgaaatatatatatattttatagatgggaaaatagttataaaaaagtaatttttgaggattatatagttggtttagtatttgaggttgtgttttggtttagtggtttttgtttgaaaatataagatggaaaattagattgaattttatttaatatagatgtgttagtattatagtttaaaatttgtcggtgagaagttgttgttgtatttttagttaggaaaagttaggaattttttaagtttttatttaagatgtggggttttattgtatgggtaataatatggttatgaatgtacgtttttacgagaattgggttttgatgtttaagtattttgatattggaagagaagatttttttagtaggaaatttgatgcgtgtatttggtagtgttattgagaaacgaattaaatatattttgtgtaatagtaaaaagaagtgggaagattttgatataatgatattttggttggaggagtttagtcgatatttagcgtataggagatgagttttttttattttttaaagaggaaaaagggtaaatttatttagagaaggagagaaaatgtgttttataatttattgaaatttatgtttagtaacgaattttggatatttaagtttgttagttgtaaatattttttaagagttttataaaaaaatgttgttacggaattgtaaagattttgaaatgtagtattatagtgatagttgattcgggtttatatttgtaagtagagggttagtgattttttcgtgtttatttttttattagcggtttttaattaagcggtttttttgtgggtattttttatttattttattttatattgtgaattattatattttttgtttgtaatttggaatttgattttttttttttgtttttaattttcgttaggggtcggtttttttattttttttttttttttatcggtttatagaaaagttggcgttttcgtttatttgtgttagagtttggtatatttgggtttgggtttttagaattagtagttttattttggtttttatgtcgttcggtttttttcgtagttcgtttaggtcggttataggcggggttatgaagttgttgtagcggtgggttagtttattttttttttttttcggtttttttagcgaagtggttcgcgttttcgaggttttaggtaatattttcgttcgttgtatatgttcgaaggcggcggtggttagttttattaatttcgttagcgtcgcggttagttttgtttttatttaggggtcgtttttcgacgtcgagtcgtgttttagttcgcggttttgtttcgtgttagtcgggttagggggtcggtagacgcgttcggttgcgttgcgttgggattaggttcggagtttttcgtcgtcgtattgggattaggcgcggggtttttcgtagtcgtttcgcgttacgagttagtaggggttcgagtttagtttgtttagttgtaaggttatgttttcgtattattatttggagtagtgtttgcgttttagagttttgcgtttgagttttttatttagattttcggagtattgagtcggcgagttgtataggcggaaagaatttttcgagaagagtcgttgtagcgtcgggtttcggaggcgggggcgggaattggggcgcgttgggagttgtagttcggattttatcgtcgtttgcggcgtttttgcgcggggcgggagataagaattcgacgcgtttagaagggttggttcgaagggaagagagtggggcggggacggtgttgtggaagggacgggagagataaaagaggtttttttgttacgtataatttcgggtcggttgtttatttagttaaggagagaagatagagtagggttgggaggttgagggcggattggggcggaaatgtggtagagattttagtttcgtttatatttttaaataggatttgcgaatatagagtttggtttaggatttgtatagattcgtttttcgttttgggttttggttttttagagtttttagaggggatgggtaggttgggaaattttttgttgaaggatggttttttaaagagagtgggagaagttagtaatggattcggaagagagtcgaggagaagattttttgtgatcgagtttatattatagttttgtttttaagatttttttaggttggggtcgggcgcggtggtttaagtttgtaatgttagtattttggaaagtcgaggcggttggattatatgaggttaggagttcgagattagttaatatggtgaaattttgtttttattaaaattataaaaaaatagtcgggcgtggcggcgtgtatttgtaggtttagttattcgggaggttgaggtaggagaatcgtttgaattcgggaggtagaggttgtagtgagtcgagatcgtattattgtattttagtttgggtgatagagtgagattttgttttagaaaaaaaaaaaaaaaaaaaaggtttttttaggttttgtttttatagtgtttatttgattattttagaaaaaggaaaagtaacgtgattgttttggttaattagtagaaaatttttgatttggtgtgttttggtgattaataaataagaatttaaaaaatagttattttattattgtagggtgtttttaaatattgtttacgtttaatatttataataattgttataaattaggtaaggtaaatatttatatttttttttattttgtttttttttttttattttttaaagaaatgaggaaagaagttaatagatttgataggtaggtttttgttttttttgtaattatattatagttttatggtttttggacgtaaaagtgtgagaattattgttatgggttaatttgttttataagttttcgggatgattttaatttttagtagtagataataatttaagttattggtagttttttttataagtgttttttttgtggtaggatgtattgatggaattttaatggtttttgagttagattaattggtattttgtttatatataattgtatttggtagtttttattgggatatgatgttagtaaggtgggtgtgtttgtcgaagttttattattgagaatttgtgaaaagtaaaggtttggattgagaagtgattaagcgatttttagggaagaaaaataattagtttttggttatagtgtaatttgttaggaggttaagttagaagtggaggaagggaaataagaattgttattgtaggaagggttgatggtttttattggatgtttgtgatggggttgggttgggtttggtgatgataaatgaattttattaaatgaaaaggaatttttttggtacgtttatttgtaagaaatttttttattattgttttaattttgttaaaaatatttataaagttagtaaagtttataaagttagttaaagttaagtaagaatagattgttttgaatatttgttcggttataaaggttgattttgagtaaattgtatattagattttaggtttttattttttttatttttagtttttttatacgaagggttttatttttttttttttttggtttttagtattttttttattggtaaattgttatttaatgtttaagaaaggttttaataattttgttagtgtgagtttaaattatttttttggaggtttaaattgtttttaagtgggatatttatatttaagttgtatttgtcggtatgggggaagaaaaaaagatattatttatttaagtaattttttatattagaaaattagttgggataaataaaaagtttttaataagttgtagaaagtaaagtgtaaagtagaagtttttgtttgttttttagtttagttttttgtattgttttttaattattttttatgtgattttattgtaaagatgattttgtttagttttataggtattagtatataaatattattttttaaattttatatgttttttagaatttttacgaatttttttttaaagttttgttgaatataatttattttaggtttgttggtgtatgttagagagagttttaatgtttatttttttggtagttttattgttttttaataatatatatatatatatatatatatatatttagaatttttattatttttattaaattatattatttttaataattataaaattttgaaagttaaagttaagaaatgtattattaaatttatttagttttgttgtttttagatagatatagaaatttaggttaattagtaataaaatattgttgaaaatttgtgtttgttttggtatttttttgtttaatttattagaaattttggtggggtgatgggaggggggtggtaggattattaaggaagtagaatttttaaaatgttaatttattttttttttttagaatttgtattttaaatttttaggtttatagtagtaaatgtttatatagattattaaaataattggtttttaaagttgtttatatttatagtttaaatatttaatgtaatttagtgttgttaatttgttttttttttaattggtgtaattttgaaattatttttttataaaggtatagatattattttagggaggttttatgaaagggattaatttatggtatttatttttttagtttttgtggtttttttttaatttttttttatagtaatattgatgtaatgtttggagttgtagtaattattttgtgattaagattttgaaagttttatgtaaaagtttgtagagtagttagaaagaaggaattttggttttgatgatatttatgagtaaatgtattagtattgggttattaatttttgaattttttgttatatgagaaaaaataatttaaagaattgtttgttaggtgttttgttgtagtttaagtttttttgatatagattgttttttattttggtttaaatatttattatgggattaattaataaaaaatagttatgagtgaaaaaatgggattatgtaagaatatggattttttcgttagtgttttggggtagggaagttggagatattatgtggggtattatttttagataaagggaaatgtgatgagtagaaagtattataaatgtttattagagggagaaatttttgaatatgattttagggttttgagtttatatatttaagattaataaaaatagggaatttagaaagaagaattagtaggtatagagtaggagtttatagggaggataggagataattagtttgatagagataatttttaatagaagtatttttattagtttagttaaagttttttggttgttttatttgtttagatataggagttttttggttattttatttttttagtataaaatgtttttattatttatttttagagttttaaaaatgttatgggttaattaaaaaggtgggttatttgagaagatgttgatgataaagtgttgggatatatataggtgttttttttgtgaggtaattaaagaataatgggtattgggtatatgtttaatggtttttattaggtagtaataagaaagatatttaatattgtttttgtatttgtttttatgatgtttttatgggtatttgtaattagtagtatttgtttaagaaatataaagttatttttatttatgttattgagagtttattttttttggtggattggaatatttttttgaaaaatatatatttaagattttttattttagatttatattaatatttatgtaaatttaggagttaaaaattaattttttttgttttttgtatttatttagagtgatttttttttttatgtttaattttttagtttgggttaggatttatttttagaattaatgaggttgaatgaatgtaggaggagggaaaagtatatttgaaatatttttttattgtagatttattgtagatatgttgaatttgagatattagtagttatataaatggaaatatgaggttagaaagggatgagggttggagagagagatttttgagatatttatagtgttgggatgatgagtttatttagaagaatttttataattaaaagataaagggtttgatgttagaatatgggataatagttatattagggataaaaagtaagaagttttggggttttgagtgtgatgttatagaaatatggagggagatagtattaaagaggagagtggggttagtaggtagaaagttttattttttgattatttagagaatagaagtatcgagtagaggttatgggaaataatgaagttattggttgtttttgaaataagagtttcggaaaatt

SEQ ID NO: 457 - DNA, 6244 bp, Artificial Sequence
  chemically treated genomic DNA (Homo sapiens)
taatatgtgaaattaattttataaggttttttttttagttttattttttatttttttttgtattattttaaattttatgttattaaatgttagattgataagtatatttattataatttgatttttattttttattttttaaaatgttaattggattttaatgaataggttttatttgattggatttttaaggatatttggttagtttgaatttttattatttaataatatgatatttgtttgttatttttaatttttgatatattgggaaggtttttaaataattttaagttttttttttggttaaattttgaggaatttttttattagtttgttttagtttttgtgataggagaaaatgtgtgttttttatatgggtataatttatattatttttttttagagatgttttttttatttatatttttaattgtgatcgtgttttttgttatgatattaaggttaataaaaattatagaattgaatttaattatttttattttttatattttatttttatatatttttggttaaatataaaatagtagaattttttttagggagttattgtatttttttttattttgaatttgtttgttttttagttatattttattttttgttttaatgtatttttttaaaaatagattttatagaattattgattgttaggtttttttttttatgatttttaagtatttttatttttttttatgtttaattgatgtaattttatttgtttttgtttaaataattattattgattaggtaggaattaagtatatagtaatttatttatttagttatttttttagaagtattttttgtatgtttgttatgttagagattttttgatagatgtattaattttttagagttgtttttgatttattatttaggaatattttaagagggtagttggaagtttttgtatttttaaaggaattattaatatttttattttttttttattttaaaatttaagatttttattttttaagatattttgtttttatttttttttttaatttgtagtaggtttttttttgtttatgttagtggattgtttaaatgaagagtggattgtttgagaagtggattgtttaaattagtatagatataggttgttagtgtttttttatgttttttttaaagatattttcgtaatgattaatataaatgagttaatggaaataaaaatgtaaatagtagttgataaaagaatagtattaattaaaaatatattgtgaagtatttaattttattagtgatttaaaatagaaatgaaagtaaaataatattttttatagcggagtaaataaaatgaaagataatatataatgttggtgaggatatttttaaagggatatttatatattgtattggtatgtaggtgagtatattttttttggagagaaatttgtaaatagtaattaaatatggtaatattgatatgtattgtagtagtaatgaaaatggaatattttgtaattatttaaagtaatgttttaaaagaattttgtaataatattaaaatatatttaatataatattgtttttaaaaagtattatgtaagttaatggtaatttttaaaattatgttttgagtattgatataaatgttagaagataatattttagtgttaatagagattatgtttgtgtggtgggttattatttattattttgtatttttatatttttttaaatattaaatgaaagtgaatataatttagtatttgatattttaatatttttaatattagatatgttaataaggaatttataaaataaagtgttttgagggattttataggttaaatgtttttattttttaaaatgtattaatagaaaagaagattaaatttaaaaaaaaaaatttattttattagagagtgatttataagtttagaaaatttttgatgatttggtttataaagaatgtatttttaagtatatagggtttttagtttgatgtgtgtgtttgtatttatgtttgttattttgtttagttgcgtgtagatagtttatatgaaggaggattgtgtatatgtggttagagaagaaaaaaatgtttattttttaaaatgttttgaaaaataatttgttttaaaagtgtaatatttttattaaatttttttatgtttgattttaatattttttattaattaatttttatagttttaatttttttgatttattttaatgtaaatttttttattaatgtgtaatatatttttttttagtttggttatagattttagtttagtttgaatatttaagtatgaaattagttattattttatttattggttgttttaatttttattgtggaattataattgatggattttttaagtttttaatttagaatatttaattaaattttttaaaatttttgttttttttttttttattttgatgattaaagatatggattataaaatatatatatatatatatatatatatgtatatgtatgtatatatatatatatatatgtatgtatatatatatatatatatatatgtatatatatatatatatatatatatgtatgtatatatatatatatatatatatatatgtatgtatatatatatatatatatatatatatgtatgtatatatatatatatatatatatatatgtatgtatatatatatatatatatatcgtagtttgtaagtttgtatttgggattttttattgataaaaatgaaagtttattaaaatttttatgtttatatttttttttagattttagagtaggagaattttattttagaattgttgattgttgatatttttatggaaaaatatgtttaatttattatgttttgtagttaattgttataaatggtgatgaagttttttttttggttaagttttggattttttagtatttttattgttatatttgattaaaatataagtgatgaagggaggaaatatattatagtatttattgtatgggtattttagggtaatgggattatgattgatttaaatttattttgtattttaaaaagtttttattagtgggtgtagtatattagtatggtatatgtatatatatgtaattaatttgtataatgtgtatatgtattttaaaatttaaagtataataataaaagaaaaaaaaatttaaaaagaaaagtttttataatgaggattgagtttatatcgtttttttaattaaggaaagataatttttattatatatatatatatatatatatatatatatataaaaagataagaggtgagattaaggcgtaaattagtattggattaagttagtaagtattgttttttagtttttagttttttaggttgggagttttttttttgttatttttatttttttttaatttattttttaatgatttttaatataaatttcgtttttattttttgtttaaaatatttttatgattattatgaatattatttatggatgaaggttgaatattttaaggtatattaagttttttatgatatggtatttttttatttttttattttatattttgtatttaggtttttaaaaaatatattatatgattttatgtttttaggttattgtttatgttacggtattttttttgggtttttttttttttttatttatttggtgaatttgtattttttagtataatatagtttaatataattttatgtttaaattttattgaaaatgtataaggaatttgattttttttttttattttttttattttatttatttttttattgtatttgggtaatttttatggtattagttattttattaattatttgtataaattagtatgagtttattttgtttagttttttattattaggagttatgaagtattttgaaattaaatattgtttgtatttgaatatattaagtaagcgtgaggatttaaattaaattttgtttttttttaaaaaaatttttattttaattttagtattgattttatgttattgaagtttataatttttatgttattttttgttattttttttgttatgagaagatttaggtatgagtttattgtttttattttttggttttttttgtaagggtattaaagaatattgttgtagtattttttgttttatatagttatgtgatttaagtaagagtatttgttagttagtgaggttttttgagagtttggttaaatatgggattgaagggttaagtgaattattttttatttatgttgaaatatgaatgttgaagtttggaaaattttatatataatattttaataattaaaaaaatttgatttaggaatagtgtttatattaaaattagtgtttgttattgttttatgaagtttttataaatttaagaggtttaagagggatataatagtttattttgttttagttgtgttttatttgatattattgattgttttaattttgaaatatagaataatgttatagtaagaatgtagtatattattttattaatttaaaatataatatagataggtttattgtatatttgtggagaaaagtttattttaacgttttttttataaatagtaaaaatgttatttgtaggatgttttgatttttattttttgtaaaaagaatattgtttttttattttaatagaaaatggtaagcgtttagttttttttgggaatttaaaattttttatgaggtatattaggtattatatgtgatataagtaaaagtttgtgatttttagtatgttggaaagttgttattttttaggataaggttgtttatgatgtttaggttattttatttagttgtataaataatttttttgatggatggttggttttttataattttagtattattttagtaggagaaggtagtatttgatgtgttgtaatttgtgttatatgtttatggaatatttttggatattattttaggaggaggggttaagagaaggaggagttgtggttgaagatatttaatggtagaatgaatggaaatttaaagatcgttgtgtagttagttttaaatattgattgtattttttttagattttttttatattaattaaaaagttttattatataattttataaaatttatgtaattttatttaattttagttataaattattaaaatgacgaggattttgatagtttttaaagtggtgaggatattgaagattggttttggttttattaatgtgattgtatattaaaaatggaaatttttaagatttggtattaggtttttttttgttaaggtaatatttatattgattgtttttgataaaatattatggggtatagtttagtagtgaagtaaaggtgttttttataaggtaaatatagttttgaatgtagttttgaagtattaatgtattaatgttttttttattgtggaatttattgatttagtaaatgttaatttttattttatttgagtaatatgatagtaatttttatttaatataaagaatgatgataatttttgtgaatatgtaaaatgtaagtatattgtttgaaaaagaaatatttttttttttatagatagttttttgtgattagatattattgtttatagtttggatttaaaaaatggagttgtttatatgtgtgtgagttatattatggtatatagtgtgttaaggtttgttttataaatagggtttattgaaaagtttttttttgaaatattatttaaatattttaaaaatataattagaaaatatgtgtttttgagatttgtaggttattatgtagatattgttttagttttttttttttttttttggttgtttttttgggtaggttaaatttattatttttattttgtagagtaatatatagaggtagatagtagttgataattttgtttttttataggtatttataattgagagggtaagtttaggaaagaaatattaattgtttttttttttgttttttagtattgaattatgaaatttttgtaggaatttttgtttttttttgtaattttatgaagacgtttattattagagaagtttgaagttattttataggaattttgttaatgaaaataatttttagtgattataagtttaagtaattatattagttttagatatattgtttttttagtagtaaaagttgtaaaatttgaaatagaaaaaataaaagaaaatttttgtttgttgatgtgaaaatgggaatttatagtttggagtgttttgtttatattttgtatgtttattgagttgattaagtttttattgttttagt

SEQ ID NO: 458 - DNA, 6244 bp, Artificial Sequence
  chemically treated genomic DNA (Homo sapiens)
attgaaataatagaagtttagttaatttaatgagtatgtaaagtataagtagaatattttaaattgtgagtttttatttttatattaatagatagaggtttttttttgttttttttattttaaattttatagtttttgttgttaaagaagtaatatatttaaagttaatataattatttaaatttatagttattaaagattatttttattggtaaagtttttatggagtaattttaggtttttttgataatgaacgtttttataaagttgtaggaaggagtagaggtttttataggaattttataatttaatgttggggggtaggaagaagggtaattaatgttttttttttgggtttgtttttttaattatagatatttgtggagggatagaattattagttgttatttgtttttatgtattattttataaaatgaaaataataagtttagtttgtttaaaaaaatagttagaaggaaaaggaaaaagttaaagtagtgtttatatgatgatttgtaaattttaaaaatatatattttttaattatgtttttaaaatgtttaaatgatattttaaaagagaattttttagtaagttttatttatagaatagattttaatatattgtgtattataatgtggtttatatatatataagtagttttattttttaaatttaaattgtaagtaatagtatttagttatagaaagttatttatgaaagaaaagatgttttttttttaagtagtgtatttatattttatatgtttataagaattgttattattttttatgttgggtaaaaattattgttatgttatttagataagataaaaattagtatttgttaagttagtaggttttatagtaaaggaaatattaatatattagtattttagagttatatttaaaattgtatttgttttgtaagggatatttttgttttattgttaaattatattttatagtattttattagaaataattaatatgggtattattttgatagaaaggagtttgatgttaggttttgaaaatttttatttttggtgtgtagttatattggtaaagttaaaattagtttttagtgtttttattattttgaaagttgttaaaattttcgttattttgatgatttgtggttaaaattaaatgaaattatataaattttatgagattgtgtgataagattttttagttaatgtaaaagaaatttgggaggggtgtagttagtgtttaaggttgattgtatagcgatttttgaatttttatttattttgttattaaatgtttttagttatagttttttttttttttaatttttttttttgaggtaatgtttagagatgttttatgggtatgtaatataaattgtaatatattaaatattatttttttttgttaaaataatgttggggttgtagaaaattagttatttattaaaggaattgtttatgtagttgaatggaatgatttagatattatggataattttattttaaagagtagtaattttttaatatgttaaggattataggtttttgtttatgttatatgtgatatttaatatgttttataagagattttggatttttaaagaaagttgaacgtttgttattttttgttggggtaaaaagataatgttttttttataaaaagtaaaaattagagtattttataaatagtatttttattatttgtaaaaagaacgttagaataaatttttttttataaatatataataaatttatttatattatgttttgggttaatagagtagtatattatatttttattatagtattgttttgtgttttaaagttaaagtaattagtaatattaagtaaaatataattaaagtaaagtggattattatattttttttaagttttttagatttgtaaaaattttatgaaataatgataaatattgattttaatataagtattatttttaagttaagtttttttagttattaaaatgttatatataaaattttttaaattttagtatttatattttaatatgaataaaaagtgatttatttaattttttagttttatgtttaattaggtttttaaggggttttattggttggtagatgtttttgtttaagttatatgattatgtagaataggaagtattgtagtagtgttttttgatatttttgtaaagaaggttaaggaataaaggtaatagatttatatttaggtttttttataatagaaaagatgatagaaaatgatataaagattgtaagttttaataatatagaattagtgttagagttggggtaaggatttttttaaagaggaataaagtttaatttaagtttttacgtttatttaatatatttaagtataaatagtatttgattttaaagtgttttatggtttttggtgatagaaagttaaataaaataggtttatattagtttatataaataattaataaaataattggtgttatgaaagttgtttaaatgtaatgggaaaataaataaaatggggaaaataagaaagaaagattaagttttttgtgtatttttagtaaagtttaagtatagaattatgttgagttgtgttatattgaaggatgtaaatttattaagtagataaagaggggaaaaaatttagaagggatgtcgtggtatgagtaatagtttagaggtatgaagttatgtggtatattttttaaaagtttagatgtagggtatagaatgggaaaatgaaaaggtattatattatgggagatttagtatgttttaaaatgtttagtttttatttataaatagtatttataatagttatggaagtattttgaataagaaataaaggcgaaatttgtgttgaagattattgaaaaatgaattggaggagaatgaaaatagtaaaaggaaaatttttaatttagagaattgaggattgagaagtagtatttattggtttagtttaatattagtttacgttttgattttattttttgtttttttatgtgtgtgtgtgtgtgtgtgtgtgtgtgtgtagtgagggttgtttttttttaattaagaaaacgatataaatttaatttttattatggaaatttttttttttaagttttttttttttttattattatattttaagttttagggtatatgtgtatattgtgtaggttagttatatatgtatatatgtgttatgttggtgtgttgtatttattaatggaaattttttaggatgtaaaataaatttaaattagttatagttttattattttaaggtatttatgtaatgaatattataatatattttttttttttattatttatgttttaattaaatatgatagtggaagtattgaggagtttagagtttgattaaggaaaagattttattattatttatagtagttgattataaagtatgatgaattaaatatgtttttttatagaaatgttaataattaataattttaggatagaatttttttattttaaagtttagagagaaatgtgggtatgagagttttaatgggtttttatttttattagtaaagggttttagatgtagatttgtaaattacggtgtgtgtgtgtatatatatatatatatatatatatgtgtgtgtatatatatatatatatatatatatgtgtgtgtatatatatatatatatatatatatgtgtgtgtgtatatatatatatatatgtatatgtgtgtgtatatatatatatatatatgtatgtatatatatatatatatatatatgtgtatatatatatatatatatatgtatgtatatatgtatatatattttatggtttatgtttttagttattagaatgaaggaggagaaggtagaaattttggaaaatttgattaaatattttgaattagagatttggaaaatttattaattataattttataatggaggttggaatagttaataaataaaatagtggttagttttatatttgagtgtttaggttagattgaaatttataattaaattggaaaaaaatatattatatattagtgagggagtttatattaggatagattaaaggagttgaggttataagagttggttggtagggaatgttaaagttagatatgaaaaaatttagtggaaatgttatatttttaggatagattattttttaaaatattttaaaaaataagtattttttttttttttgattatatgtatatagtttttttttatataagttgtttgtacgtagttgagtagagtgataggtatgaatgtaggtatatatattaggttggggattttgtgtatttggaagtatattttttgtgagttaggttattaaaggttttttaaatttatgagttattttttgataaaatgaatttttttttttagatttagtttttttttttattaatatattttaaaaaatagaagtatttagtttgtgaaattttttagggtattttattttatgaattttttattgatatatttggtattgaaaatgttaaaatgttaagtattaggttgtatttatttttatttgatatttaaagaaatgtggaaatatagaataatagataataatttattatataaatataatttttgttaatattaaagtattattttttagtatttatgttaatgtttagaatatagttttgaaaattgttattgatttgtataatgttttttggaggtaatattatgttaaatgtattttgatgttattataaagtttttttaaaatattattttaaatgattataaaatattttatttttattgttgttataatgtatgttaatattgttatatttgattattatttataaatttttttttaaagagagtgtatttatttatatattagtgtaatatatgggtgtttttttaaaaatgtttttattaatattatgtattattttttattttatttgtttcgttgtagaaaatattattttgtttttatttttattttaaattattggtgaagttgaatattttatagtatgtttttaattgatattatttttttattaattattgtttatatttttgtttttattaatttatttatattaattattacgaaaatgtttttaaaggaaatataaagaaatattgatagtttgtgtttatattgatttaaatagtttattttttaaatagtttattttttatttaaatagtttattgatataagtaagggaagatttgttatagattgaaaaaaaaaatgagaataggatgttttagagaataaaggttttaggttttggaatgaagagaaaataagggtgttagtaatttttttgaaggtatagagatttttaattgtttttttgaaatgtttttaagtaatgaattagaaataattttaagaagttggtgtatttattaaaaagtttttaatatagtaagtatgtaagagatgtttttggaaaaatgattgaatgaatggattgttgtgtgtttaatttttgtttgattagtgatgattatttaagtaggaataaataaaattatattagttaagtatgagaggaaataaggatgtttaggagttatgaaaaaaaaaatttggtaattaataattttataaagtttatttttgaagagatatattaaagtaaggagtaaggtatgattggagagtaaataaatttagagtaaaaggaggtgtaataattttttgaagaaagttttattgttttgtgtttgattagaaatgtgtgaaaatagaatataaaaggtagaagtaattgggtttagttttatgatttttattagttttagtattataataaggaatacggttataattaaagatatggatgaagaaggtatttttgagggaaagtggtgtggattgtatttatgtaaaaggtatatatttttttttattatagaaattaggataagttggtaggaggattttttaaagtttggttaggaagaagatttaaagttgtttgaaaatttttttaatatgttaaggattgaaaatgatagatagatattatgttgttagatgatgagggtttaaattaattagatatttttggaaatttaattaagtaaaatttatttattaagatttaattggtattttgaggaatagaaagtgaggattaaattatgatgaatatgtttattaatttaatatttgataatataaagtttggagtgatataaaagaaggtgaaaaatgaagttggaaaagagattttgtaaaattggttttatatatta

SEQ ID NO: 459 - DNA, 17183 bp, Artificial Sequence
  chemically treated genomic DNA (Homo sapiens)
gtagtgagttatgatagtgatattgtattttagtttgggtaatatagtaagatattgtttttaataaaataatataaaaaaattgaaggatggtttttttgaagaagaatgtgttttttttagttagaagttagaggattataatagtattcggtttaatttaagtattttaagttaaattgtttattttgtgtaattttttgtatataaagtttagttaattgtagtaaaaattaatataggataattttttttgtgtatatttataaattattgttttaattttagttttatttattttttttttaaaattgtttttattggtattaatatgtatgtattttggattttgtttattataaataattataaaatttttttgatgtatgtttaatgttttaagtatattataggatgaaaattttgtgtagaatttttatttttttatgagatttgtgtatttatttatttaaaaaatttttatgaagtgtttattatggattaggtaatatttatggaattagggggttcgaatatagagaaatagatagataaaaaaataaaatattttttttatggattttatattgtaagagagataaatataaatgaggttattgtaaaatatataatgtgtttaatggagttaagtagtaagagaagaaaaatagattaaagaaggggatatgaatggaaagggaggtaaaagtgtaagaggatatttaggaaagattttattgagaaggtattttcgagtaaagattagaatgaaatgagggagttggttattggggttatttaggagaaaaataatttggatagagtaaataagatttttcgagggtaaaggattttagttagagtgtaaagaatattagagtagtaaaggttattgtggttagagggagaaaagaaggagaaaagggttaaagatgaatttagagaagttaaaggaaagtagattatattggattgaatggattatagttatgatattgttttttattttgaatgagataggaaattattggagggtttggagtagaaggtagtgatttttttttttttgataaatatgtaaataggattattgtaagatattagatattaatatatttatttatagaggagttgagtttttgtgttgttgagaagtgtttattaataaaaatgtatttgggaaatttatgagggtagataagaataagtatgaaaagaattatgaatttaattgtaaaataaatgaaataatatacgtgtaagaagaaaatatggatgaattattgtgtaatttggagaatggtttttaaaattatggtttttaatttagatgtaataaaagaaaagatttattaatttgattgtattaaaatagataatgtttataaggtaaaacgatgttataaataaagttaaaagataattgataaattgggaggaaatatttgtaaaatatatttagaataataattttaatatatataaataagttttaaatattgagagaggaaaaggtaaatatatatgataaaaatatattttataaatgtttagcgttatttatagggaatgtaaattaaagttatattgagataaaatgttttatttattagattgattaaaatttaaaattatgatgatagtatattagattaatgaggtgtttttatatagttttgtaggaatatatgtggtataatttttattaaggaaatttggtaatatttaataaatttatatatgtgtttattatttgatttagtaattttatttttaggaatttgaattgaagatatgtttttaatagtagaaaaataaatatttataaagttattttttagagtattaaaaataattaaattgtttatatatagggagatggttgaataaattatggtatatttatatagtgaagtattgtatgtaattgtaaaaatgaatgaggaatatttgaatttgtaggaaatagtggattttagtatatttgttaagttaaaaaagaaatgtgtaaaagaatatttatagtatgtttttaaaatgtaataaaaaaggagaattaagaagataaatgtgtagtagtttatttgagtaaaattaaggataaattagaaattattgaaattgagtatttatggtggagaggatagaggtgatggagagaagtgatattttttttttattgtgtttttttatattaatttgatatttgggattatgttaatgttttatttaagtaaaaaaaaaattaaaaagattgaggggaaattaaaatagaatataaagagaaataaattaatagtattttgaatgaataataattatattgaagagggggaataatttgagtaattttggaatataataatgttgtttttatattttcgggttataaataaaataaaattttaaaaacgagtagatttgatttttattatagtatagaaatagtaattttaaatttttttttgtgtattttaggattaagtaaataagtaaatatattgtggatttaggtgttttattgttgaagaagggagttatatatgtagaaagagggaaggatagaatgaattttatgttaacggattgaaattggaagaattattgtgaatttatgatatatataaatatagatatgggaatggatatatatatatatatataatatatatttttgttttgtttgttgagagggtgcggaaataatgatattttaataaaaatgaatatatttagtatttaattttggtatttaaatgttattttttgttagaaagaattagtattttttggagaaatagtaaattttagtgttaggtttagaggtgagtttggagtatttttttgtgtgtgtgtgttagaaagtaaggaagtgtttaaagaataataagaataagttaaaatgatataggaattattttgagggtttttattggttcgattagggagaatttaagtattaaaataaataatggtagttatgaattatgatttattgagtaaataaataaaatttatattgatatagtttatgttgatatagataaatgaataaataaatagagaagggaaaatttttatttatagtaaaatgttaatagatgaatatagaagtaattattaaattaggaaaaaatattttttgataattattatagtaaaaattgatttaagaaaggattattaatagacgttaaaatttgtgggtaaaaatttgatgaaaaaatgaggaatttatatagttttaaagtatttttttataaaatatttattaattataaagggaaaaatattgagtttatattaagaaatatggtaggtattattttaattaagtgattaaagttattattattagtaataggataaatagataatatatgttttttcgtaaggataagatattttttttggtatttttgttaaataattagatttaataatttgaatttattatgaagaaatgatagataaatttaaattgtggggtgtgattttgttttttgatattattatttacgtatattgtttttttatattgaaaagggttgatttgtataattaattggatattttggagttaatatattgtgatttttgaggataggttataaaggatattatggtttttttttttttgtttttagagacgttagttggtatgttacgaggatatttaatatataagtagcgagttttatggtaaaatttacgtggtgaagaatgaagtttttagttaaaggttggtaagtgagttattttagatgtggattcgtttattttagttaattttttagatgattgtatttttagttggtgttttaattgtaattttttgagcgattttaagttagaattatttgatcgatttatagaaattgtgagattataaatgtttatttttgttttatattattatttttagggtaatttgttattataatagataacggatttaaaagttattttttaaaaataattgtggtgtattcgttaaaaatgtaaaggttatgtaatattaaaaatgttgaggatatttttttagaataaagaattgggggtggggggaaggtataatgattaaatataatatatgattttgaaatgattttggattaggaaaaataaaggttggtttttattgttgttattgtttttattataatataggttattgagatgattgttaaaatttaaatatagatggtagtttatagttttgtgttaatgttaagtttttatttttgattattgtattttagttatggaatagaaagtttttagtgaattatttagaataggaataaatgttagatggttttaaagtaataattatataattataattatataattatatatatgtatatatatgtttatagagaaagaatagagaatggtaaagaaaatatagtaaaatgttaatatgtagagaatttgggtgataagtatatgggaattttttgtagtatttttgaaatttttttgtagagattattttaaaataaagaatagagtagaagtggttgttgtttttaaattttttaagtaaatttatattgtttttttaaattgggagatgaatttattaataggttttgaaatgagtttggtggatttttaataagaataggatagtttagtttagtttagtataatatagtatggtatagaggacgaatattgtagattattaagggtgagtattaatttgtgaaagttttgtttaagttttagtaagagaaataagtgagtgtagtgggttgcgtggttaaaaaagtggggaagttatcgtaacgaggggtgagtttgagttaaagagtggtttagagtttttcgtttatttcgtgtcgggtcgtttttttcgtttgttttatttttatcggcgtcgcgttagtttttaggtcgtttgtaggtgtgcgtttagaattagtacgtgtgtcggatattatttaagggttcgttttttttggtttatagttgtttgttgttttagttttgtttttttagagttgtcggacgttcgcgggtttcggaacgtatttcgtcgcgggggtttcggtcgtggtatgggcgtcgcgggtttgttcggggtttttttggttttcgtcgtatcgggggttttcggtgagttgggagggggagtacggaggtggggacgcgtttcgggtagggaaagtttttgtgtcgcgatgtaaagtagggggttaaaagcgagacggtgggggtagtgttcgacgcgtgttcgtttttcgttagttttgagggattattgtaataaatcgtttggttttgattgtttttattggttttttcgggagttgggatttttagaattggaggttgcgttatagaggggcgttgtttggtcggttcggtgtggttggcggcgtgcgggtgttcgcggttttttgtcgggtttttcgtttttaggattttgtaggtgtttatcgttttttggtcggcggttagcgttatcgttcgttacgggaaatttatttattgtatgaggtattagttagttacgtgaggttgtttttgtatattcgaatcgcgtttttgtttagtaaaagcggtagaatttcggtttttttttttaaataagagtaagatttggtttttaagtatgggttttagattttttgaattttaatgtgatattggtagagattttaaatattaattattcgtagttatttttgagatatggattaaaattattgttttttttttgttattaatttattgtaatggtgtggacgttcgtaaaggttttatttatcgtttattatattttttttttttttagattggtttgattttaaagaaagattataattaagattagcgttttttggttataggatgggtttaagtttttaattatttttacggtatcgtgtatttttagtttataagacgtttattgtgtgtagattttaataattgggtgatttttggtaagttatttagttttttgatttttagtttttttatttgtaaaatgaaattagtgattaattggttttttattttattgagttgttttgagtatagatgaaattaagtaaagaaagttggatgttagtcgttattattaaatattagtaataagttttttgtatagatttgattttatggagttagtatttaagttaataagttgggtgtttaattgtttttatggatatttagtttattgaggtgtttggaatatagtatatattagtttattataattttttgtttttttgatattttattgttttttgatttttaaatttttttttagattattatttttattttttttttttttttgtatattaattttttttgaataaatgtatatttatattttttttaagagtagagtacgtttttgattttttatttatttttaaattttaaagaggatattattaattgaaaattaaattttttattagttttgttaatttagggttatagtagtagtattatgtaggttatttaattggagttttatgaaatattaggtttatttattagttatttaagttattgtgtttttgttgtttgtttattttttatttttgtattagtatttttattttaagtattataattatttgtgtaataattttattttttttaagagattttggtttttatgattggaaaggttaaagagtgatttataggttattttttaattatgaaaataaaaaattaagaaatatatatatttttattattttattttattgtttaaaaatttaaaaggtttttagtggaagaaaatttggtgtttttagtttttttagttttttggaatggaattttatcgaagtttatattttttgatttttttagttgtttgttttgtatgcgttgtttatggttttttttatttgttttttatggtttatgttttgtttattttttattgttaatttttattgttattgtatgttttttatatattattttttggttagtttttgtatttgagtgtgtttaataaattattaaagtatttttataaaatgtaggtttttggttttatttttttttttagaggtttataggtttggagttagtataggaaagttgaggtttaataattattttagaagattttgtaataagtatttatagggtatattgttataagtaaagttaatggaagtaaattttttttttagtgtttttttatttttttttttgtttatttgtataaatagttttaaattttttatatttttagattttatttaagtttttagtggttatttaattttattttatgttgagaaaataaaattatgaaataagaatgtttttattttttaattagttataaatttattaatttataaatttatttttatttagaattagattttgttttttattgtagaaaatttgttgaggttttttcgttatattagaataaaatttatattttttattttttagtttgaggttttttgtttttttttgaaattttttgtattttatttattttttttgttttagttatattggttttttttttattttttgagtataattgtattaggtatttttttttttgaaatgttttttttataaattattttttgtttgtttttttgatatttaaggtttagttttttgttgtgtttttttgatttttgtttgaagtatttatattttagggtattttttaatataaaattgtgttttattttttatagattatttattattatttaaaatttttttgtttatttatgtatttgttgtgttgtttgtttttttattggaatataagttttatgagtgtaagattttaatttgttttattttttgatttgagtttttattaatagtttgtaatttggaatttaataaatatgaattgaaattttggtatgtttttttttataataatgaaagaagtatttattttgttgataaatttagtttttttttttgtatttatgattatgttttatatttttttgtttttgtaaggattttatttttgtagatattttttattttgtattattaatgtatttttttttgtatgattatttttattagtatttaagtatattttaggaaattttttatggatttttttatgatttattggaattttatttttttgtttttttttttgttttttttagtaaaattttttattgattatttatttaaatttcgttatttttttttttattttagataggttttttttttatagttttttgaagttgttttttgtaatgtcgttattgatttttatgttgataaatttaatggttatttttttatgttaattttttttagttttttagtaaaaattgatgattttttttattttgaaattattattatttttattttttaaattaagatatttttatttgttttttttatatttttttgttgttttttagttttttttgttttatttttaaatattagagggttttggggtttagttttgagttttttttttttttattttttttttttaaaaaattttaatttattttgttttatggttttgaatattatttatatgttgatgatttatatttattatttatagttttgtttttttttttgagttgtaaattgtttatttggtattttgatgtggatgtttagtgtgttagatatattaagtttgaatggaaatgattttgaatataattttttattttaaggttataatatatatatatatatatatatatatatatatatatatatatatatattttttttttaggttttttatttttagaatagggtaattttattaattgtgtagtttaagttagaagtttagaagttaggaatttttttatttttttagttttatatgtaaaataataaaaaattttgttaattttatttttaaaatatatttattgtttaattttttgttaagttttattttttttttttggttttaaattgtattttttgtttttaaaagtaagtagttcgatttattttttatttaattgttagaatatttttttaaaaatgtaagttaggttttgtgatttttttgtttgaattttttaatgatttttatttaggataatatttatatatttgtggtttaaaaagttttttatgattttttttgttgagttttttgatttgatcgtggattattttgttttgtttattgtattttagttatatttgttttttgtttgtttttggagtatattaaatttattttttttgttaggtttttgtttaaaatatttgtatttagtaatttgtttggttgtttttttttttttttttgttttttagttataatttaaatgttgtttttttataggttttttttaattattataattgaagttgtatgttattttgttttttttttttttagtgtattatattgtgatatattattttattttatattttatgtttagtatttttttatttattttttggtatttatttatagtttgtttttttttgttggattataaattttatgagggtgggaattttgtttttgatgtttatagatatattttttgtgtttaggattgaattttggttaatatgtataattgttgttaaattaaataataaatagggaaagattttaaaaaaaaaagatatttgtttgggaatagaatattgtaatgggaatatgtgtgtgattatgaattgtgtgtatatttaaggaagtaaaagaagataaaggtttttaaaggaaaaatatgaggattatataattgttttagaataattatttttggttataaagattaataataagggtgatgttagtttgaggttatataggtagatgtcggaaggatgtttttgtagggttgtagtggtttttgtgtacggttgtggttttttagttttttatgatagtttgggttaataggtatataagtatgagaattttatttttatggttttttttggttttttgaaggtgttttttgttgttttttttttttattatattagtgattttattttgattttgataatttttatattattatttaaaatttgtttattaaataggtaggaaatttagtattaaggtatttgattatatgaattattagttttaataatgatttttttttttatttgttttttgattaaaattttagttttatttttattattttatatgtttgttttttatttattttaaatggatttttaagttattttaggtaaagtttttgggtttaagtaattaaatatatttttgtttatttaatttagaaattgtttcgtttgttagttttaaatatggttggaaggatatgtgtttgaatgttaagttattatttttgatttttaatttagttatgattttttttgagttttatttttggttatagaaagatgtgaagagggtttagtgatttttaagaaaatttgtattatttgatggtttatggtttaatttttttttttttgatatgatttgttttgtgatttgggattttggttttcgttattaatgaggattgatgtttttaaaggaagatagtttttaagtttttttattggaaatgagatttttttattttttattatttagaaagtgtgattcgtatttttttttattatggaaagttatgttgtgaagtatttttttgtttttgttatttttggatttttattttattttcgtttatgttattgttattgattaaatcgtgtaaatttaaattggttttttagtttgtggaggataatttgatattgtttttatttatatttgataattatagattaagttatttgattagagttattagtataagtagtattaggattatgaagtttgtttttattgaggttaaattttgatattttttatagaattttgttattttgtatagagtaagtatttggagatttttgtagttgttaatggagaaaattaaagaaattgaggaaataaatagaaggggatttatagtgatatttggtttttaataatgatgtttatttttagaattagtttttgtgatttttttagtagtagtttggggttatagttaaggtttggttgtgttttgggagttttgtgtgtgattttgtgttagtttatttatgtttatattttgatttttattcgtatttgttttagatttgtttgaaaaaggagattataaatttgatatttaaatatattgttattttaggagggttttataattgagtattttttttttttgtttggattattatttgatttggaagaagagttaattttttgttttttgtttgttagtttagggcgttgaaatttgagttcgtttttatatatagaaaaatgatttttttagttatatttttaagtgtattattgttatagttttttatttattttttagaataatttttgttttattattaataataatattgttattttaagttataggaatttgtgttgaaatgattgtttttttatttagtttttattagaaagtatttattgagttttttttggtggtatattattttattagattaatagaataaaataatgaagaataattaatatatttttttttttttaggtattaacggtttaatagttaagatagttatgtaaatttattaaagtaatttttaggattatatgtgtattgagtttttataagattttttatatattttagttttttatgttattttgggaaagtttgtatttaaagatttttatttttttgttttataaatttataaatagcgtatattagttatgtgtagtttttttgtgtataaataagattttattgaagttgggaaaaatattaatattcgttttttttattatttttataaaaaaaaattaaaatatatgtaattattttttaaggtttttgttatatgttttttttgttttttttagattttgattttattgtgaaaaaataagtaaataaattaaaattattaatttttatttgtaagggtgaaggagatggaataattttgaggattttttgaaattttatgaaaaattattttttttatttttgaagtttattttaaaaattttttgaatttttgagtttatttttgtgtatatttatttttattgtaatgatatgtattttttattttataaaatattgttttattttagatttttattttaaagattaaagtttttaggataattggtaataaggtagaagtagagaagaggttttagttttttttggtttttatgtttttgtagtttttgttttaggtttttaggttagggtaagtttttgttaaggtttttttttgttaagtttaaaatttagagtaattaattttaagtttgttgttgagatattttgtaaatataaatgtttttttgggtatattaagaggtattttttattatttttttagagatttttaagtggttagatgtttagtagttttgtaaaggtgagtaattttgtaatagaggtatatttgggtttgtcgttgtatttggatgagataatatgttatgtttaagataaaagattagtaaatttatatgttattttaagtgaagagggtttttgagtgttttatgtttttttttatttttaggggtattgggtatgagggttaagttatgatagttggttaaatttatttattttgtgatttttatgattttgatttatggtatttatattgtgttagggtgaggttagaagttagagataagagatgttaatattattttatttttattttatttaatttaaaaaatatttttaagtaattattagatattaagttttagattagatagtggggtttgggagtgatataaaaatgaatttgatagtttttgtttttgagaaatttttatattagttgtaaaggtcgatttttaaatatatattgtattatgaggtagtttttttatttaagaagtgttatgaggttatagagaaataaattataaatgttatttagaagaattagagaattataggttttttgagtagaggaaatagtatttgtaaaagtataagtgtgtaagaatatgatgtttttggaaaaaattagtgttgttggagtataggttatatagtgaggaatggtagttgattaaatggattggagtttatttgtaaaaaaatatatgtattttttttttataaatagtggtaagttatagtaagtttttaaatgtgtagagtggtatgattatatttgtgttttagaaagataaatgtgtagtagtatagaaggtgtattagtttaagggagaataattagaaaagtaaattatgttatttagtgatttaatgagagattattgtaatgataaaatagttggtttggagagagatttttggagtttagttattaaattttagtaagtaattgaatgaagagaagagagtagaggatgagttagaggatgagttataaaaaggaaatgattattgtgagatttttaaggtagaagatttggtagatgatattatagattaatagaatatgtataaaaatggaaaatgaagattataagttataattgattataaataaagttggtatttatgtatagaaatgtagattgtgtgtattaaataagtagtgttttagagttgattgattcgttggaaagttttgtaaatgtaagaatttttgtgagtaaatataagtaggtttgttagtaagtttagttaggttgagatttaatataaaatataaaaagtttttaaaaagttttttgaattttagttttaaattttgtttgggttgatttggtttttttttgtagataaattatgtgtgagttatagagaatttttttaggattttgtgattatatatatgggtattgtatttgggttgataatgatatatttttgtaataaagggtgagttggtaggagatagtttttgggtatatggatattagaatagtagttttaattagaaattattatttttttaaaagagatttgagtaattgttatatattttttaaaataaataagtaaaaaggaattatttttttgatttattttagagatattgttttaagattattagttagagaggatttttagaagagaaggaagttttggttgtttttttttagttttaagtttttagtgttattgattaggagtttgaattttatttggttttaaattgtatgagtttttaatttgttatttttgtttgttataaatgatattttattttttgttatttttttagtagagaaagaattaagtttttttaaaatgtaagtttagttgggagatgattattttttatttttatttttattttaagttttggggtatatgtgtaggatgtgtagttttgttatagggtaaacgtgtgtcgcgagattttttatttttttgtttttagatatttattttttggtgatttatttgttatatgtattattttagataatattgtaatttgggataatgatatgttttttaatgaatgtaagtaaaataatttttttattgtattttatttaattttttttgtttttttttagagggaaattgagtatttgtatattaaagtgagtagttaggagggtttatatttggtttgagtagttttaggtatatagttatgatttatttattttttttatggtttttaattttattatacgtttttttgtttattgttttttgattataagttattttatagtgagtaaatgtttatatttaaaatattttaggagattatatattgttaattttattttatgtaaaaagtaagttattttaggttttttttataataatttatttgtggtttggggcggggattggtgattagtttatagtttttcggtttttattagttagttttatatattttttgattttgttattttttatttagaattatttttgagattaggatatagaattttaataaaataggtaaattgtaggttgagttgtagtttggattgtaagaatgaagagaaaatttttagaaagtataatattttttttttttttatttattttttaaaaaggattttttgtaagttatttttagttattttttatgggattttgatagtagtagtagggagaggggtttgttatgaaattattagtgttatattggatgtaatagggaaaagttgtttgattttttggatgagaagttaatgtattgtattagtaaagataattaagttgatgtttggagttttggagtaatttttttttttagtgtattatttttatttgaatgtttaattatagaagttgaaaatggagttgtggaatttggattatgtttatttttttaaaatgatatatgatatttaagtgtaagtttggttttattttgaaaggtagtaatgtaatatggtgttaattaaatagtaaatagaattttttattgttaaagtgttttaggggtgagttgggttgaaattttaggatttagaaataaaataaggtttttttgggaaatagatatatggtatttatggaaagagtagaaggaagatagtatatgtggttgagttttttagttaaagagttttttattgttattgtttgttttgtgtttttgtttttgtttttttgagatggagtttcgtttagtcgtttaggttggagtgtaatggcgtgattttggtttattgtaatttttattttttgggtttaagcgatttttttgttttagtttttcgagtagttgggattataggtatttaatattatgtttggttaatttttgtatttttgtagagatggggttttattatgttgattaggttggttttgaatttttgattttaggtgatttatttgttttagttttttaaagtgttgggattatagacgtgaattattatattttgtttagttaaagagtttaaaagtaaattttgaaagtaatatttaaatgttgtagatgtaggattttttttttttttgtattttggggtagtgttagatttgtgttattgtaggggaaattaaaagatgtttttttaaaaaagtagatagtattaaagttaatgattagagatttttttatatatatatatatataattattatattttatttataggtgtgttttgaatatatatatgttatttttttttgttttttggaatgtagattaaagatgttaaattgatttagttgagtatatattatattgtagattttatatgtataaagataatagttttcgaaagttatttttattgaaattaagtatagtattgatgtgatgaaatagtttggttgtatttttttatgttagtttttattgaagatttttttttggagttaaagggaagttaattgaaagttttagaggttggtaattttttttttattttgagatttttttagaaaaggcgtgtataataaagtaaatgtaaataatattttttatggttattaggataagtaaatgaagaatatgaggttattatttaaaatttttgtttattttttgtggtttttttaaagtgttttagttttaagttaggataaattatttgtattgaggttttagtatttttagtagtaggattaaaagtggttattttagtttgtatttttagttgtgtgtttgaagtagttattgaataattagtatgttttaggtattgtattttttttgtttatgtatttttagtattggatttttattatattttatgaagtagtttgcgttatattatagattaagaaattgaagtttaaagagagtaagatttgtttgaggttatatagttattgaatgatcgtggggagttgaaattaggtttattgagtttaaatttttttaatttatggtatttttttatatgtaattattatgttattaatatgttatttttatgtgttgaatttgttttttgttttattattaaaattgattagatttagaatttttggatatattttttttattattattgtttggttaagatgatttatgttgatttgtttgttgaggatgaagaaaaaggtaagaatttaggagtttgggagtaagtagggaataaataaattatatatatttttaagtttgtttttgaaaaagttatgtgatttatatttggatattttatttatatttgaatatttttttattatgattagtatgtttattaagttttttttttattttttagg

SEQ ID NO: 460 - DNA, 17183 bp, Artificial Sequence
  chemically treated genomic DNA (Homo sapiens)
tttgaaaagtagaaaaggaatttggtaggtatattgattatggtgagaaaatatttaaatgtaggtaaaatatttaaatatagattatataatttttttagaaatagatttagaaatatgtatagtttatttattttttgtttatttttaaatttttaaatttttatttttttttttatttttagtaaatagattaatataaattattttgattaaataataataatgaaaagaatatatttaaaagttttgagtttaattaattttaataatgaaataaaaggtaaatttagtatatgaaaataatatattagtggtatgatagttatatgtggggaggtattatggattagggaaatttgagtttagtggatttagttttaattttttacggttatttaatagttgtgtgattttaggtaagttttattttttttaagttttagttttttagtttatagtataacgtaaattattttataaggtatagtgagaatttagtgttaaaagtatatgaatagagaaagtataatatttggaatatattaattatttaatggttgttttaaatatataattgggggtataggttgagatgattatttttggttttgttgttgaagatgttagagttttagtataggtgatttgttttgatttgaggttggaatattttgaaaaagttataggaagtgaatagaggttttgaataatggttttatattttttatttatttgttttaataattatgaaggatattgtttatatttattttgttatgtacgttttttttgagggagttttagaataaagggaaaattgttaatttttagaatttttagttaatttttttttggttttaagaggaggtttttagtgaaaattgatataagaagatatagttaaattgttttattatattagtgttatatttggttttagtaagggtaattttcgagaattgttgtttttatatatatagaatttgtagtataatatatatttaattgaattaatttaatatttttggtttgtattttagaagatagagaagagtggtatatatatgtttaaagtatatttatggataagatgtgataattatatatatatatgtatgaaaaaatttttaattattgattttggtgttatttgtttttttaaaaaagtattttttaattttttttataataatatagatttagtattgttttaaaatataaaagaagaaaaagttttatatttgtaatatttagatattatttttaaagtttatttttaaattttttaattaggtagggtgtggtggtttacgtttgtaattttagtattttgggaggttgaggtaggtggattatttgaggttaggagtttaagattagtttggttaatatggtgaaattttatttttataaaaatataaaaattagttaggtatgatgttggatgtttgtaattttagttattcgggaggttgagataggagaatcgtttgaatttaggaggtggaggttgtagtgagttaagattacgttattgtattttagtttgggcgattgagcgagattttattttaaaaaaataaaaatagaaatataaaataaataataataataaaaaattttttaattagaaaatttaattatatatattattttttttttgttttttttataggtattatatatttattttttagaaaaattttgttttatttttagattttgaagttttagtttaatttatttttgaagtattttggtagtagaggattttgtttgttgtttagttgatattatattatattgttgttttttagggtaaaattaagtttatatttaaatattatgtattattttaaaaaaatgaatataatttagattttataattttatttttaatttttataattgagtatttaagtaagagtaatatattgaagaggagggttgttttagagttttagatattaatttgattatttttgttggtgtaatgtattgattttttatttaagaggttaaatagtttttttttattatatttaatatggtattgatgattttatagtaaatttttttttttgttgttgttgttaaagttttatgggggatggttgggagtgatttataaggaattttttttaaggagtaggtggggaaagagagaatattatattttttgagaattttttttttatttttgtaatttaaattgtaatttagtttataatttatttattttgttgaaattttgtattttgattttaaagatgattttaaataggaagtagtaaggttaaaagatatatggaattggttgataaaaatcgaaaagttatgagttggttattagttttcgttttagattatagataaattgttatagaagggatttagggtggtttattttttgtatggaataaagttggtagtgtgtaattttttggaatgttttagatgtaagtatttatttattatgaaataatttataattaaaggatagtaaataaaggaacgtgtggtaggattgggggttatgaggaagatgggtaagttatagttgtgtgtttagagttatttaaattaagtgtaaatttttttggttatttattttggtgtgtagatgtttaatttttttttggaaggggataagaggaattaaatagggtgtaataaagagattgttttatttatatttattaaaaggtatgttattattttaggttataatattgtttgagataatatatgtagtagatgagttattaaagagtagatatttaaagataaagagataagaaatttcgcggtatacgtttattttgtaataaaattgtatattttgtatatgtattttagaatttaaaataaaaataaaaataaagagtgattattttttagttagatttatattttagaaaaatttagttttttttttattgaaagaatagtagagaatagaatattatttatgataagtaggggtgatagattaaggatttatataatttaaagttaaatgaaatttaagtttttggttagtagtattggagatttaaaattggaagagagtagttaaaattttttttttttttagggattttttttagttggtaattttgaagtagtgtttttggagtggattagggaggtgatttttttttgtttatttattttaaaaagtatgtggtaattatttagattttttttggaagagtgatggtttttggttggaattgttgttttggtatttatgtatttaggaattgttttttgttaatttattttttattataagaatatgttattgttaatttaaatgtaatatttatgtgtgtaattatagagttttaaaggagttttttatgatttatatatgatttatttataaaagaaaattaaattaatttaaatagaatttgaggttgggatttaggagattttttggagattttttgtgttttatattaaattttaatttgattggatttgttgataggtttgtttatgtttatttatagaaatttttatatttataaaattttttaacggattagttaattttagaatattatttgtttaatgtatatagtttgtatttttgtgtatggatgttaattttatttgtggttagttataatttatagtttttattttttatttttatatatattttgttaatttatgatattatttattaagttttttgttttaaaaattttatagtgattattttttttttgtaatttattttttaatttattttttatttttttttttttatttaattatttattgaagtttagtgattggattttagaaatttttttttaaattaattattttgttattgtagtagttttttattggattattgaatgatataatttatttttttaattgtttttttttgggttggtatattttttatattattgtatatttatttttttaaaatataaatgtggttatgttattttgtatatttaaaaatttattatgatttattattgtttatagggaaaaaatgtatatatttttttataagtaagttttaatttatttaattaattattattttttattatgtagtttatattttaataatattgattttttttagagatattatgtttttgtatatttatgtttttgtaaatgttgttttttttgtttagagggtttatagttttttaatttttttaggtagtatttatgatttatttttttatgattttatagtattttttaaataagagaattattttatagtataatatatatttaagagtcggtttttataattagtgtaggagttttttaaaggtaaagattattagatttatttttatgttatttttaggttttattgtttggtttagagtttagtatttagtagttatttaaaagtattttttgaattgaatgggatgaggatgaggtaatattaatattttttgtttttaatttttaattttattttaatatagtatggatattatagattaaagttataaagattataggatgaataggtttggttagttattatgatttaatttttatatttagtgtttttaggagtaaaaggaagtatggagtatttaggagttttttttatttgagatgatatgtgaatttattggttttttattttaaatataatatgttattttatttagatatagcgatagatttaaatatgtttttattataggattatttatttttatagaattgttgagtatttgattatttgaagatttttagggaggtgataaagaatgttttttgatatatttaagaaagtatttgtatttgtaagatattttaatagtaaatttaagattggttattttgaattttaggtttagtaaaaggaaattttggtagaaatttattttgatttgaggatttgagataaaggttatagaaatataaaaattaagagaggttaaaattttttttttgtttttgttttgttattaattattttgaaaattttgatttttagaatgaaagtttaaaatagggtaatattttatggaatgaagaatgtatattattgtagtaagggtgaatatatatagaaataagtttagaggtttagagaatttttagggtagattttagagatggagaaagtaattttttataaaattttagaaaatttttagaattgttttattttttttatttttataagtaaaaattagtggttttagtttgtttgtttgtttttttatagtgaggttagagtttggggaaaataggaaaggtatgtggtaagggttttgaaggatgattatatatgttttgatttttttttataagggtggtagggggagcggatattaatattttttttagttttaatgaggttttatttatatataaaaaaattgtatataattaatgtacgttatttgtgaatttgtgggataaaaaggtaaaaatttttaaatataaatttttttaggatagtataagaaattaaagtatataagagattttgtaaaagtttagtatatatatgattttgaaaattattttaatgaatttatataattattttagttattaaatcgttaatgtttagagaggagaaaatatgttgattattttttattattttattttgttaatttagtagagtaatatgttattaaagagaatttagtaaatattttttgatgggaattagataaagggatagttattttaatatagatttttgtgatttaaagtaataatattattattaataatggaatagaagttattttaggagataggtaagaaattatagtaatgatatatttagggatatagttggaaaagttatttttttatgtatgagaacgagtttaagttttaacgttttaaattgataagtagaaaataagaagttaattttttttttagattagatggtagtttaggtaaaaaaagaaagtatttagttgtaaggtttttttagaatagtagtgtatttaaatattaaatttataatttttttttttaaataggtttgagataggtacgggtgaaagttaaagtataaatatggatgaattgatataaggttatatataaagtttttaaaatatagttagattttagttgtgattttaaattattattggagaagttataaagattggttttaagaataggtattattattgggagttagatattattataggtttttttttatttatttttttagtttttttagttttttttattaataattataaaagtttttaagtgtttattttgtgtaaaatagtaagattttataaggaatattagggtttgattttaatgaagataaattttatgattttgatattatttgtattagtgattttagttaagtgatttaatttgtaattattaaatgtaaataaggataatattaaattattttttataagttggaaaattaatttaaatttatacgatttaattagtggtaatgatatggacgaagatggaatgaagatttagaaatagtaaaagtagaagggtgttttatagtataattttttatgatgaaaggagatacggattatattttttggatgataaaaaatgggagggttttatttttaataaggagatttaagggttatttttttttgggaatattaatttttattagtaacgaaagttagaattttaagttataaggtagattatattagaaaagggaaggttaagttatgggttattaagtaatataaatttttttgagggttattggattttttttatatttttttgtagttaggagtaaaatttagaggagattatgattggattgaagattaaagatggtgatttgatatttagatatatatttttttaattatgtttaaaattaataggcgaagtagtttttgagttaaatgaatagagatatatttaattatttgggtttagggattttatttggaatggtttggaaatttatttgaaatggatgaaaaataaatatataggataataaaaataaaattgaaattttagttagaaagtaggtaggagggaaaattattattgagattgataatttatataattaaatattttaatattgggttttttgtttatttgataagtaagttttgaatgatgatgtgaaagttgttagaattaaaatagagttattaatgtaataaaaaaaaaaaataataaaaaatatttttagaaagttagggaaggttatgaaaatagggtttttatgtttgtatatttgttaatttaaattattataaaagattgaaaaattataatcgtgtataaaagttattgtaattttataagaatattttttcggtatttgtttgtataattttaaattggtattatttttgttattggtttttgtagttaaggataattattttaaaataattatgtaatttttatattttttttttaaaaatttttgtttttttttatttttttgaatatatatataatttataattatatatatatttttattgtaatgttttatttttaaataaatattttttttttttagggtttttttttgtttgttatttagtttaataatagttatgtatattaattaaagtttagttttaagtataggagatgtatttgtgaatattagagataaggtttttatttttatagaatttataatttaatagaaagagatagattgtaaatagatattaggaaataaataagaaggtgttgaatatgaaatatgaaatagagtgatatgttataatgtaatgtattggaaggagaagggatagggtggtatgtaattttagttatgatggttaaggaaggtttgtgaaaaggtaatatttaagttgtgattgaaggataagaaggaagaaggaagtagttaggtaaattgttgggtataagtattttaggtagaggtttaataggaggaatggatttggtatgttttagggatagatagaaggtaagtgtggttgggatgtaatgagtaaagtagaatggtttacgattaagttagaaaatttagtaggagggattatgaagggttttttagattatagatatgtgaatgttattttgaatagaagttattggagagtttaagtaggagaattataaggtttgatttatatttttaaaggaatattttggtaattgggtagagagtggatcgaattgtttatttttagaagtaaagagtatagtttagggttaaaaaaaaaaaatgaagtttggtaaaggattgagtagtggatatattttagaaatagaattggtaagattttttgttgttttatatgtggggttgaggaaatgggaggatttttgatttttagatttttgatttgggttatataattgatagaattattttgttttgaggatggaaagtttgaaaaaggagtgtgtgtgtgtgtgtgtgtgtgtgtgtgtgtgtgtgtgtgtgtgtgttgtggttttgaggtagggaattgtgtttagaattatttttatttagatttggtatatttaatatattaggtatttatattaagatgttaagtaggtagtttgtagtttaggagagaggatagaattatagataataaatatgagttattaatatataaatagtatttaaagttatgagataagatgagttgaggttttttaggaagaagaaatgaagaaagaagaggtttagggttgagttttaagattttttaatatttagagatagaataaaaaagattaagagataatagggaagtatggaaaaaataggtaagagtgttttggtttggaagatgagaatgataatggttttaaggtaaaggaagttattagtttttgttgaaagattgagaaagattaatatagaaaaatgattattggatttattagtataagggttagtagcgatattgtaagaaatagttttaggagattgtggggaagaagtttgtttgaagtggagaaggagataacgaaatttgagtaagtagttaatgaaaagttttgttgagaagaataagaagagggataggaaaatggagttttagtgggttatgagaaggtttataaaggattttttggggtatatttaaatgttggtggggatgattatatagaaagaggtatattgatgatgtaaggtaggagatatttgtagaagtaaagtttttgtaaaggtaagagggtatggaatatgattatgaatataggaaaaggagttgaatttgttagtagaatggatattttttttattgttataggaggaaatatattaagattttaatttatatttattgaattttaaattataggttattgataggaatttaaattaggaaataaggtagattaaggttttgtatttatggaatttgtattttagtgagggaataaataatataataggtatataaataagtaagaaggttttagatggtgataggtggtttgtagaaaatagaatatagttttgtattggagagtattttggaatatggatattttagataagagttagagaagtataatagagggttgagttttgaatgttaaggagataggtaaagaataatttgtaggaagagtattttaaaagagagaatatttagtgtaattgtgtttaaagaataaagagaaggttagtgtggttggggtagagagagtgagtggggtatagagaattttagggagaggtagaaggttttagattggagaataaggggtatgggttttattttaatgtgacgggaaggttttagtaggttttttgtagtggagaataaaatttgattttagatggaggtaagtttgtaagttggtaggtttgtagttgattagaaaatgggagtatttttgttttatggttttgtttttttagtataggataaagttaggtggttattgaaggtttgagtaaaatttagaagtgtaggaaatttgaaattgtttatgtaaatagataaaaggaaaaataggaaaatattaaaaaggaaatttgtttttattgattttgtttatagtagtgtgttttatagatatttgttgtagaattttttagagtgattgttaaattttagtttttttgtgttaattttaaatttatgaatttttggagggggaggtggaattaggaatttatattttataaaggtattttagtagtttattaagtatatttaagtgtaggaattggttaagagatgatgtgtggagagtatgtagtagtagtaaaagttagtagtggagagtgggtaaagtatgagttatgggagataggtggggaagattatgagtagcgtatataagataggtagttggagaaattagggggtgtgagtttcggtgagattttattttaaagggttagaaaggttgaagatattagatttttttttattggaggttttttagatttttgaataatggagtgaaataatgaaaatatatgtattttttaattttttgtttttataattggaaagtgatttataggttattttttaatttttttaattataagaattaaaattttttaaaagagatgaggttgttatataggtaattataatgtttaggatgggaatattggtataaaaatgagaaatggataaataatagaagtatagtagtttgaatggttgataggtagatttggtattttatggggttttagttaagtgatttatatgatgttgttgttgtggttttgaattggtaggattggtgaagaatttgatttttagttgataatattttttttgaaatttagaaataggtgagaagttagggacgtattttgtttttagaaaaagtgtgaatatatatttgtttaaagggagttaatatgtagaaaaagaaaagagatgaagataatggtttggagaaaggtttaagggttaggagatagtaaaatgttaggaaagtaaaaagttgtaataaattaatatgtgttgtattttagatattttaataagttggatgtttatagaaataattggatatttagtttgttagtttaaatgttggttttataaaattaagtttgtataggaggtttattattgatatttagtagtaacgattaatatttaattttttttgtttagttttatttgtgtttagggtagtttagtgaggtggaaggttagttaattattagttttattttatagatgaagaaattgaagattagggagttaaatgatttgttaaaagttatttagttattgaggtttgtatatagtaaacgttttataaattaggaatgtacggtatcgtggagataattagaaatttagatttattttgtagttaagagacgttaattttaattataatttttttttaaaattaagttaatttggaggaaaaaaagatataataaacggtgaatgagatttttgcggacgtttatattattatagtaggttaataataagaagaaaataatagttttaatttatgttttaaaaataattacggatggttaatgtttaggatttttattaatattatattagagtttagaaaatttgagatttatgtttgggaattaggttttatttttatttagggaagggagtcgaggttttgtcgtttttgttgggtaagagcgcggttcgggtgtatagaaatagttttacgtggttagttggtgttttatgtagtgggtaggtttttcgtggcgagcggtagcgttgatcgtcggttagagagcgatgagtatttgtagaattttgggggcggggagttcggtaggagatcgcgagtattcgtacgtcgttagttatatcgggtcgattagatagcgtttttttgtggcgtagtttttaattttggaggttttagttttcggaggggttagtggggataattaggattaggcggtttattgtagtggttttttaaagttagcgggaggcggatacgcgtcgagtattgtttttatcgtttcgtttttggttttttgttttgtatcgcggtatagaaattttttttgttcgggacgcgtttttattttcgtgtttttttttttagtttatcgaggattttcggtgcgacgagagttaagaaaatttcgagtaggttcgcggcgtttatgttacggtcgaagttttcgcggcgggatgcgtttcgagattcgcgagcgttcggtagttttgggagggtaaggttggagtagtaagtagttgtgagttaggagaggcgggtttttaaatagtgttcggtatacgtgttagttttgagcgtatatttgtaggcggtttgggggttgacgcggcgtcggtgagggtgggataagcgggagggacggttcggtacgaggtgggcggggagttttgagttattttttggtttagatttatttttcgttgcggtggtttttttatttttttgattacgtaatttattatatttatttgttttttttattagaatttaaataaaatttttataagttagtatttatttttagtaatttataatgttcgttttttgtgttatgttgtgttatgttagattaggttaggttattttatttttattagaaatttattaaatttattttaaaatttattagtggatttattttttagtttgaaaaagtagtgtaagtttatttagggaatttaggaatagtagttatttttgttttgttttttattttgaagtaatttttatagaaaagttttaagagtattgtagagaatttttatatatttgttatttagattttttgtatgttaatattttgttgtattttttttattattttttattttttttttatagatatatatgtatatatatgtgattatataattataattatataattattattttggaattatttagtatttatttttattttaaatggtttattaaggattttttgttttataattagagtgtaatgattaaaaataagaatttaatattgatataagattataagttattatttgtatttaaattttgataattattttaataatttgtgttatggtaaaaataataataataatagaaattaatttttgttttttttggtttagaattattttaggattatgtattgtgtttgattattatgttttttttttatttttagttttttattttggaaaaatgtttttagtatttttggtattgtatgatttttatatttttgacgaatatattataattatttttggagaatgatttttaagttcgttatttattataataataaattattttgaaggtagtggtgtaaagtaagaataaatatttatgattttatagtttttgtgggtcggttaggtggttttggtttgggatcgtttaggagattgtagttaagatattagttggaggtgtagttatttgaagggttaattgggataggcgaatttatatttaagatggtttatttattagtttttggttggaagttttattttttattacgtggattttgttatagggttcgttgtttgtgtgttgagtgttttcgtgatatgttagttagcgtttttgagaataagaaagaagaagttataatgttttttgtgatttgtttttagaaattataatatgttaattttagaatatttaattgattgtatagattagttttttttagtgtaggagggtagtatacgtggatggtaatgttaggagataggattatattttataatttggatttgtttattatttttttatgatagatttaggttattgaatttaattatttgataggaatattagaaaggatgttttatttttacggggaggtatatgttgtttatttgttttattattggtggtggtaattttgattatttagttaagatggtgtttgttatgttttttagtgtagatttagtatttttttttttgtaattaataagtattttatagggagatattttaaaattatgtaaattttttatttttttattaaatttttatttataaattttagcgtttattgatgatttttttttgaattaatttttattatgatggttgttaaagggtgtttttttttaatttaataattatttttatatttatttgttggtattttattgtaaataaaagtttttttttttttatttatttatttatttatttatattagtataaattatattaatatgaattttatttatttatttaatgggttataatttatggttattattatttattttgatgtttaaattttttttgatcgggttagtgggagtttttaaaatagtttttatgttattttgatttgtttttattgttttttgagtatttttttattttttggtatatatatataaaaaaatgttttagatttatttttagatttgatattggaatttgttgtttttttaaggaatgttggttttttttggtagagaatggtatttagatgttagaattggatgttaagtgtgtttatttttattggagtattattgttttcgtatttttttagtagatagagtaaggatatgtattatatatatatatgtatatttatttttatatttatatttatatatgttatgaatttatagtgatttttttaattttagttcgttagtatagagtttattttgtttttttttttttttgtatgtgtaatttttttttttaatagtgagatatttagatttataatatatttatttatttgtttaattttagaatatatagaaagaagtttaaaattgttatttttatattatgatggaaattaaatttattcgtttttaaagttttattttgtttatagttcgaaaatataaaaatagtattgttgtgttttaaagttatttagattattttttttttttagtgtgattgttatttatttaaaatattgttaatttgtttttttttgtattttattttagtttttttttaatttttttgattttttttttgtttaaataaaatattaatatagttttaaatgttagattgatataaaaagatataataaaagggaaatgttatttttttttattatttttattttttttattataggtatttaattttagtagtttttggtttgtttttagttttgtttaaatgagttgttatatatttgtttttttagttttttttttttattatattttaaaagtatgttataggtatttttttgtatattttttttttaatttaataaatatgttggaatttattattttttataaatttaaatattttttatttatttttatagttgtatgtaatattttattgtgtggatatgttatagtttatttaattatttttttatgtatggatagtttggttgtttttaatgttttaaagagtaattttgtgaatatttatttttttgttgttagaagtatgtttttagtttaaatttttagaagtgggattgttgggttaaatggtaaatatatatgtaggtttgttagatattgttaaatttttttaataagagttgtattatatatatttttataaaattgtgtgagagtattttattaatttaatgtgttgttattatggttttaaattttagttagtttaataaatgagatattttattttagtgtagttttaatttgtattttttatgagtaacgttgaatatttataaaatatatttttattatgtatatttgttttttttttttttaatgtttgagatttatttatatatattaggattgttattttggatgtgttttgtaaatgtttttttttagtttgttagttgttttttgattttgtttatggtatcgttttgttttgtaagtattgtttgttttaatgtagttaagttgataaatttttttttttattgtatttggattaggagttatggttttaaaaattattttttaggttatataataatttatttatgttttttttttgtacgtgtattgttttatttattttatagttagatttatgattttttttatgtttatttttgtttgtttttataaattttttaaatatatttttattaataaatattttttagtaatataaaaatttaatttttttgtagatgagtgtgttggtgtttagtattttgtagtgattttgtttatatgtttgttaggaaaaaagaaattattgttttttgttttaaattttttaataattttttattttatttaaagtagaaggtaatgttataattatgatttatttagtttaatgtgatttgtttttttttaatttttttgagtttatttttgattttttttttttttttttttttttttggttataatggtttttgttgttttagtattttttgtattttgattggggttttttgttttcggagggttttgtttgttttgtttagattgttttttttttgaatagttttagtggttagtttttttattttattttagtttttattcgaagatatttttttagtgagattttttttagatatttttttatatttttatttttttttttatttatatttttttttttggtttatttttttttttttattatttagttttattgaatatattatatattttataatgattttatttgtgtttgttttttttataatgtaagatttatgaaggaaatattttgtttttttgtttgtttgtttttttatgttcgagttttttagttttatgaatattgtttgatttatggtagatattttatagaaattttttgaatgaataaatatataaattttatgagaaaatggggattttgtatagagtttttattttgtaatatgtttaagatattagatatatattaaaaggattttgtagttgtttataataaataaaatttagagtatatatatgttggtgttaatggggataattttgaaaaaaaggtaaatggaattaaaattggagtagtgatttgtaggtgtatataaaggaggttgttttgtgttaatttttattataattgattaagttttatatgtagggagttgtataaggtaggtaatttgatttaagatatttgaattaagtcgagtgttgttgtggttttttggtttttaattgaaggaaatatatttttttttagaggaattattttttagtttttttgtattgttttgttagagatagtattttgttgtgttgtttaggttggagtgtagtattattattatagtttattgt

SEQ ID NO: 461 - DNA, 6112 bp, Artificial Sequence
  chemically treated genomic DNA (Homo sapiens)
tatttatttagtaatggggatatttgggttatttatatttttttagttattataaatagagggatattgaggattttaattaattttttatttagaagtatttatttattgttatttattatattaagattataggaaattttattaaataagaaagaaatttataatatatttttttttttgttttaaggtattaattttatttataaggggtttattttttaagtagagaagttgaaaatgttaggatatttgagaggaaagataatttgttttatttataatttttttagtttttagaagaatgtttggtataaaggaggtgttttatagatatttttagaataaatgaaataggttattatggttttggggttaggtaggaaagtaaattataggaggtgatgaattagggtaggtagggtttatggaatttgagtttatagtgagggtgaaaattatattcgatagtagaaatgagtaaaaaataataggaagaggaagttgtgattatagaaaagtttttaaatattattttttttttgaagttttttataattattttatgggattttttttttattttggattttttttaagatattttttttatattttattaagttatatttatgtgtgttttttttttatttttttgatattgattatattttgtaattggaaaattgagttaaaaatgggggattatttgtagttttagttatttaggaggttgagggtaagagagttatttgagtttaggggtgtggggttgttatatgcgatgatcgtttttgtgtatagttattgtattttagtttgagtaatatagcgagagattgattttggaaaaaattttttttaaaatgtaggtggtttttaaattttagagataaaatttggatgttgaaaggagaaatgttagatagtgagattgaaaatgttagagtatattcgaagagagaatatttaagagagaaatgttaaagtagagaggttgaaaatttagagtatatttaaaatgttagtagtaaaataatttgtattggaatgaatggatgattgaataaatgaatgaataaagttaggtgggaacggaggttatttgagtagaagttaagaagaatatatgttttaataattgtttgaggtttattggtttgatagtaagggtttaaatgaatagggaaagttagtttttagttagaagatatttaggaagttagtaaaataattaatgataatagagtttaaatgaaggttagtgtatataaaaaggaagaatgaatatgaggatatttttaaataaaaatttattatatttggtgggtgataattataggttatgagtaaataattttaaagttttttgatattatgtatagagttacggtaagaagagtaggaagatgaatttaattttgaaaacgtatttgatacgaggataagttatttaagtaaaagttagtaataggtaatattttttttaatattgttttaagtatattttatatgtattatgttacgtaattattataataatattatgaggtgttattattatttttattttatagatgggaaaattgaggtataagagtgaataatttgtttaaagttattagttaataagtggttgagttagtgtaatgaatttatttttatttttgttttttgtaaattcgtatttttgaaatttttatttttaatgtgatggtattaggagatgaggtttttgggaggtaaattttttgtgaatgggattagtgttttataaaagtaattcgagagtttttgttttttttttgtattgtgaggtaaagggaaaaaatagttatttataattttgaagagggtttttattagaatttgattatgttggtagtttgattttagatatttagtttttagagttatgagaaatatatttttgttgtttataagttattagtttatatggtattttattacggtaatttgaatttattgagagttaggatttgaatttaaatgttgagaaaattttgttcgggattatttagaaatttattatttattcgataaatatttaataagtattattatattttagatattgtgttgttgttagggagaggaaaagttggtagtgaataagatagacgtggtttttatttgtataattatatggatattaaataaataatgagaagtaggaattggaaaagaaagtgataagttatagttaagtaggaggaatgggtgatagaaaaaaattttaggggaagggaagggtatgtgtaaatgttttgaagtgagagtttatagtagggaataaaaagaggagagtttggaaaaaattaaaatattatggtaggagtgtaggtagttagggggatagatggagaggttggagagaaagataagtatagataatggagtttagataatgtgtggtaagtaaagggagattattggaggaatttaagtaggttaatgattagatttatatttaaaaaattattttggtagtagtatggtaaatgtattggaacgaggtaagagtagttttggaggatttgaatgggttattgtgggattttaagtaagaggtaatagtggtttagattagaatgggaatgaaaaaatggttatgggaatagagagaggttataaatttaattttttagggagtagatagatgtaggtgattttgttgtgtgttggaggtgtgttaggtttttggtatgaattgggtagatgttaagatattttttattgaattagggattatgggaggagcgttttgaaggaattatgatatacgggttgagtttgaaatgttttaagttatttaaatgaaagtgtattaaaggtagtatgttgggaattatgaatgtaggattttagagtaagatttaggtttgagttatggattgaagagtttttgatagagggtatttgatgttgttgggagagtataagattatttaggaaagtgtatggggagatttagtaagagggttagggtttagtttagtatgattttaatgtgtaagaggtagattaaggaggagttggttgttaaagagtaaatttaggtagggaggaaatttgggatataagattagagggaagagggtatttggaagtaattgtggttaatcgcgttaaatattgggatgagggtttgtaaaatgaggattgaaaatgattcgttgtatttatagttatgaagtttgtttgtggataatttagagttattttaggtgagcggtggggatattggagagggttgggaggtgggatatgaaagattgtttatggggtaagagatagttgtagttgttggagagtaatttagggagaagagaaatttttttaaagaattgaaagatttaagtatgtttaaatattagtaagaaagagtcggtagagaaggaaaggttgagagtaatagaaggaaaggagattcgttaagggtaaagtttataagaaaatagtagggtatttggagtattaggaaggataattttttttttataagagaagtgagttatgggcggagtttagaatcgaattttttttgttttttaaagatacgttttttttaaaggatagaaaaagaatgattaagatttgaggtcgggcgcggtggtttatacgtgtaattttattattttaggaggtcgaggcgggtggattatttgaggttaggagttttatattagtttggttaatatggtgaaatttcgtttttattaataatataaaaattagttaggtgtggtggtaggtgtttgtaattttagttattagggaggttgaggtaggagaatcgttcgaaatcgggaggcggaggttgtagtgagtcgagatcgtgttattgtattttagtttgggcgataagggttagatttcgttttattaaaaaaaaaaaaaaaaaaaaaaagatttgaaattttaaggagagggttgtagagtttattattaaggagaatggggatttagtggtgtcgttttgagagatttttgaaagaataatttagtagtttttagttacggaagtttttttgttgggtttagggtgtagtgggtgcgaatttttgttgtagaaaataggttgaggaaagaaagcgatataggatgttgtttggagaaaggcggggaggtaggatggggtatatttttaggggttcgggtaggttgtgtggtttggaggttttcgagggtcgtcgacgttagttatggttcgggtagagtttcgtaaggtgttatagtatcggggttagcgtttttcggaaaagtatgtttcgttggcggtcgttaggttttttcgcggagtttcggaaaggaaaattcgtttttacgggggttttacgacgttttcgggttttaggtttcgggacgttggtagaggcgtagtagatttttttttttagttcgtacggttttagcggttcggtcgcgttttagttcgggttgttcgtttttcgtttttcggcggcgtcggaaagttttcggggttggcggcggttaagagtagagttagggtagtcgtagtcgttttttagttcgtcgtttatcgtcgtaggggtaggtttgagcgggggtttttattaagtcgtcgatatttttcgggaatttttttattgggttatatataaatttcgtttttttttttaaattttcgttgtcggttttatcgatgcgaaagtcgcggtggagtttagattatttttttcggcgtcgggtttagttcgttttcgtttttttttttttcgcggaattttttttcgtcgttcgaagaaattcgaaggttttcggtaagtttcgtttttagcgcgggggcggggtcgttcgagttgtttcgggtttagttcggttgttttcgtgcgcggtcgttgcgtattcggtattgggcggcgttggttggttttttggttgcggttttttagtcggcggcggttgttgttgtttgtggttcgggcggttgggagaagcggagtgttggtgagtgacgcggcggaggtgtagtttgacgcggtgtgttacgtgggggagagaataaaattttagcgagattcgggtcgtgaacgaaagtagtgacggaggagtttgtattatcggtaagaggagtaggaggaggaggtaggagttagagagagtcggggggacggaggggggacggggaggcgtcggatattcgcgtttggggtttttttttcgtaggaggggtcgcggtaaagatggagttttcgttcgagttttataatatcgtcgtcgttcgtagcgaataaagaataatggcggcggattggagttagcggcggtcggggcggtagcgattttgtttgtagttagcggcggcgtttatggcggggggcggcgggcggcgggcggcgggcggggtgggagtcggcggtcgggggtgtgtgcgggcggtcggtcgcggcgagttggcgttcgcgttttcgtcgtcgtcgtcgggtcgggcgcggagtcgggaattcggagtcgtttcgggggaggtcgttcgttcggttcggcgttgtttttcgcgtcgttcgttcgttcggttttcgtcgttcgtttcgttttcggttcgattcggtcgggttttcggggtagtcgtcgtttaggtgtcggtgggggatggaggaggaagaaggcgatagttgagggtagaggaggtgaaggtgtttgttgttttttcggtggtttcggtgtttgttatgttcgtttcgtaaggggaagagttgtaacgtttgatttatttttttttttattttttgtgtaataaagttcgaaatttaaggttttttttcgtgttgtattttattcgtgttttttttttttcgtttttatatcgttgaggaaatgttgttttttgttttgtgttgtttagttgagagatgagagtttgtgtttttggggggaatttttgatttttttatttttttgttttttttttttttttaaagttagttatggaaatgtatgttttttgggagaaagggtgttaagaaaaatatttataataattttttaaattgttgggattttataaaagggaagttggtgtttgaaaatagtttcggttttaattttttttaataaggtaattattatt

SEQ ID NO: 462 - DNA, 6112 bp, Artificial Sequence
  chemically treated genomic DNA (Homo sapiens)
agtgatgattattttattaaaaagggttaaaatcgaaattgtttttaaatattagttttttttttataagattttaatagtttaaaaagttattataaatgttttttttagtatttttttttttaaaaagtatgtatttttatgattgattttaaaaaaaaaaaaaaagtaaaggggtgagggagttaaaaattttttttaaaagtataagtttttattttttaattaagtaatatagggtagaaagtagtatttttttaacggtgtaggagcgggggggaaagggtacgaataaaatatagtacgagaggaaattttgggtttcgaattttattgtataaagagtggagagaagagtaggttagacgttgtagtttttttttttgcgaagcgggtatggtaggtatcgaagttatcgggaaggtagtaggtatttttattttttttgtttttaattgtcgtttttttttttttttattttttatcggtatttaggcggcggttgtttcggaggttcggtcgggtcgggtcgggggcgaggcgggcggcgggggtcggacgagcgagcggcgcggggggtagcgtcgggtcgagcgggcggtttttttcggggcggtttcgggttttcggtttcgcgttcggttcggcggcggcggcgggaacgcgggcgttagttcgtcgcggtcggtcgttcgtatatattttcggtcgtcggtttttatttcgttcgtcgttcgtcgttcgtcgtttttcgttatgagcgtcgtcgttggttgtaggtagagtcgttgtcgtttcggtcgtcgttggttttagttcgtcgttattattttttgttcgttgcgagcggcggcgatgttgtggggttcgggcggaggttttatttttatcgcggttttttttgcgaggggaaggttttaagcgcgggtgttcggcgttttttcgtttttttttcgttttttcggttttttttggtttttgttttttttttttgttttttttatcggtggtataagttttttcgttattgttttcgtttacggttcggatttcgttggagttttatttttttttttacgtaatatatcgcgttaaattatattttcgtcgcgttatttattaatatttcgttttttttagtcgttcgggttataggtagtagtagtcgtcgtcgattgaggagtcgtagttagggagttagttagcgtcgtttagtgtcgagtgcgtagcggtcgcgtacggaaatagtcgagttaggttcggagtagttcgagcggtttcgttttcgcgttggggacggaatttgtcgaagattttcgggttttttcgggcgacgagaaggggtttcgcggggagagggaaggcgaaggcgggttgagttcggcgtcgggaggagtggtttaaattttatcgcggttttcgtatcggtaaagtcggtagcggaaatttgaaggaggaagcggggtttgtgtgtggtttagtgggggaattttcgaggggtgtcggcgatttggtggaaattttcgtttaggtttgtttttgcggcggtgagcggcgggttagaaggcggttgcggttgttttggttttgtttttgatcgtcgttagtttcgggaatttttcgacgtcgtcgggagacgggggacgggtagttcgggttgggacgcggtcggatcgttggagtcgtgcgggttggggaagaaggtttgttgcgtttttgttaacgtttcggggtttgggattcgggggcgtcgtgggattttcgtggggacgggttttttttttcgagatttcgcggagaaatttggcggtcgttagcggagtatgttttttcggggggcgttggtttcgatattgtggtattttgcggggttttgttcggattatggttgacgtcgacggttttcggaggtttttaagttatataatttgttcggatttttggaaatatgttttattttattttttcgtttttttttagataatattttgtgtcgttttttttttttagtttgttttttatagtagggattcgtatttattgtattttaaatttagtagggggattttcgtggttggaaattattgaattgtttttttagaggttttttaggacggtattattaggtttttattttttttgatagtgaattttgtagttttttttttggggttttaagtttttttttttttttttttttttttaatgagacggagtttagtttttgtcgtttaggttggagtgtagtggtacgatttcggtttattgtaattttcgtttttcggtttcgagcgatttttttgttttagtttttttagtagttgggattataggtatttgttattatatttggttaatttttgtgttgttagtagagacggggttttattatgttggttaggttggtatggaatttttgattttaggtaatttattcgtttcggttttttaaagtggtggggttatacgtatgagttatcgcgttcggttttaagttttaattattttttttttgttttttaaaggagacgtgtttttaggaagtagagagggttcgattttggatttcgtttatgatttattttttttgtaaagaaagagttgttttttttggtattttaggtattttattgtttttttatggattttgtttttaacgagttttttttttttttgttatttttaatttttttttttttatcggtttttttttattggtatttaaatatgtttaagttttttaattttttaaaaagattttttttttttttaaattgttttttaataattgtagttgttttttattttatggatagttttttatgttttattttttagttttttttagtgtttttatcgtttatttgaagtggttttgaattgtttatagataagttttatgattgtaaatgtagcggattatttttagtttttattttataagtttttattttagtatttgacgcgattgattatagttgtttttaaatatttttttttttttggttttatgttttaggttttttttttatttgagtttgttttttaataattagtttttttttgatttattttttatatattggaattatgttgagttgaattttggtttttttattgagtttttttatatatttttttaggtggttttatgtttttttagtagtattaaatattttttgttaaagattttttaatttataatttaagtttagattttgttttggaattttatatttatagtttttagtatattgtttttggtatatttttatttggatgatttagggtattttaaatttaattcgtatattataatttttttaaaacgttttttttatagtttttggtttagtaaagggtattttaatatttatttagtttatgttagaaatttagtatatttttaatatatagtagaattatttatatttgtttgttttttggaaaattggatttgtgatttttttttgtttttatgattatttttttatttttattttagtttaaattattgttgttttttgtttgaagttttatagtaatttatttaggttttttaaaattgtttttgtttcgttttaatatatttgttatattgttgttagagtaattttttaaatataaatttgattattgatttgtttaaatttttttagtggtttttttttgtttattatatattgtttaagttttattatttgtatttgtttttttttttagtttttttatttgtttttttagttgtttgtatttttgttatagtattttaattttttttaggtttttttttttttattttttattgtaggtttttattttagggtatttatatatgtttttttttttttttggaatttttttttgttatttattttttttatttaattgtaatttattatttttttttttaatttttattttttattatttgtttagtgtttatgtaattgtgtaggtaaggattacgtttgttttgtttattattagttttttttttttttagtaatagtataatgtttagaatatagtggtatttgttaggtatttatcgaataaatagtgaatttttgagtggtttcgggtaaagtttttttaatatttgaatttaaattttggtttttagtgagtttaggttgtcgtagtaaagtattatatagattggtggtttataaataatagaaatgtattttttatagttttggaggttggatatttgaaattaggttgttaatatggttaggttttggtgaaggttttttttagggttgtagatggttgttttttttttttattttataatgtagaaagagagtaagagttttcgggttgtttttataaggtattaattttatttataaggggtttattttttaaaggttttattttttaatattattatattgagggtgaagattttaaaaatacgaatttgtaggagataggggtgggggtgaatttattgtattggtttagttatttattagttaatgattttgggtaaattgtttatttttgtgttttagtttttttatttgtaaaataaagatgataatagtattttatagtgttattgtaatgattacgtgatataatatatgtgaagtatatttggaataatgttaggaaaaatgttgtttattattagtttttatttggatagtttattttcgtgttaaatacgtttttaaaattgagtttatttttttgttttttttatcgtggttttatatatgatattaaaaaattttggaattatttatttataatttataattattatttattaaatatggtgagtttttatttaaaaatgtttttatatttattttttttttttatatatattaatttttatttagattttattattattgattattttgttaattttttaggtgttttttaattggaggttagttttttttatttatttgggtttttattgttagattagtgggttttaaataattattaaaatatatattttttttgatttttgtttaaatgattttcgtttttatttaattttgtttatttatttatttaattatttatttattttaatgtaagttattttattattaatattttgggtatattttagatttttagtttttttattttgatattttttttttggatatttttttttcggatatattttagtatttttaattttattatttgatatttttttttttagtatttaagttttgtttttgggatttggaagttatttgtattttaaaagaaattttttttaggattagtttttcgttgtgttgtttaggttgaagtgtagtggttgtatataggagcggttatcgtatgtgatagttttatatttttgggtttaagtgatttttttgtttttagttttttgagtagttgggattataggtgattttttatttttgatttagttttttaattgtaaaatgtggttaatattagggagatgaaagaggagtatatatggatgtaatttgatagagtataagaaaagtattttgaaagaggtttagaatagggggaaggttttataagatgattataaaaggttttaaagagaaagtagtatttgagagtttttttataattataattttttttttttgttattttttgtttatttttgttgtcgaatataatttttatttttattgtgagtttaagttttatgaattttgtttgttttagtttattattttttgtgatttgtttttttatttaattttaagattatggtgatttattttatttattttaaaaatatttgtggagtattttttttgtgttaggtatttttttagagattggggaaattatgaataaaatagattgtttttttttttaaatgttttaatatttttaatttttttatttgggaggtaaattttttgtgaatgggattagtgttttaaagtaaggagggggatatattatgggttttttttttatttggtaagattttttatagttttaatataatagatagtaataaataaatatttttgggtgaggaattaattgaaatttttagtatttttttatttataatggttaaaaaaatgtgaatgatttaaatgtttttattattgaatagata

SEQ ID NO: 463 - DNA, 5504 bp, Artificial Sequence
  chemically treated genomic DNA (Homo sapiens)
ttttggtttattgtaattttcgttttttgggtttaagcgatttttttgttttagttttttaagtagttgggattataggcgtgtgttattacgttaggttaatttttgaatttttaatagagacggagttttattatattgattttgtgattcgttcgtttcggttttcgtgtagtggcgcgattttagtttattgtaattttcgttttttaggtttaagcgatttttttgttttagttttttgagtagttgggattataggtatgcgttatattagttaatttttgtatttttagtagagacggggttttattatgttggttaggttggttttaaatttttgatttaaagtgattcgtttgttttggcgtcgtggtttacgtttgtaattttaatattttgggaagtcgaggtgggtagattatttttggtcgggagtttgagattagtttggttgatatggtgaaattttatttttattaaaaatataaaaattagttaggtatggtggtaggtgtttgttattttcgttatttgggaggttgaggtaggataatcgtttgaatttgggaggtagaggttgtaatgagtcgagatttcgttagtgtattttagtttgcgtgatagagtgatatttcgttttaaaaaaaataaaaaataaaaaaataaaaataaataaataaaattagggagagaattgttttgatataagtttttggttaatgatgaaatcgtttttttttttggttgttttggtatggtttttatagtttgaggtataatggtgagagtaaatttaagagggagttaaagtgaggtatttaagagagggattttttttttttggagaattgtggtagtttaggttgtgtaggtagttggataagtaagattgaattataataggtttttatattttttattaggaggagaatttgtaatatttagtggagtaggttatattagttatatatgtaaaatgtaggataaattaaaggggtatagagttaggggagaagataatgggatgagattgttttagaattttattttattggtttattgttgggtgtggtggtttatatttataattttagtattttgggaggttgagatgggatgatggtttgaggttaggagtttgagattagtttggtaaatatagtagattttatttttttaaaaaaaaaaaaaaaaaaagaaaaatatacggtttatgaattagtagtatttgtattaattagtttattgaaatgtagaattataggttttataatagattttttaaattataatttgtaatttaataagttttttaggtgatatgtatgtatatttatgtttgaaaagtattaagattttttgatgaaggaggatttgaaaggtaatgatggatgtgaaaggaaaggtaaagagaagttttaggtagttatttaagggatagggtcggttggagagagagtttcgaggttttattttggagaatattttgtattgaatgagttttgaatataaagatagttagtataggagggtttgaagtttttagataaaaggttgttgttattattatttattacgatttttgttattttttattttattgttattcgtttttagtttttattttaggatttttttatattttgattttttgtttgtttgtttgtttgtttgagacggagttttgcgttgtcgtttaggttggagcgtagtggtacgattttggtttatcgtaagtttcgtttttcgggtttatgttatttttttgttttagtttttcgggtagttgggattataggtgttcgttattacgtttagttaattttttgtatttttagtagagacggggttttattatgttgtttaggttggtttcgaatttttgattttaagtgattttttcgtcgtttcgttttttttttttcgtttcgttttttttcgtcgtttcggttttttaaattgttgggattataggcgtgcgcgatgttcggttttttatttatttatttatttatttttgaggcgggaattttgttttgtcgttaggttggattgtagtggtattatttcggtttattgtaattttcgattttttggtttaagcgatttttttattttagttttttaagtagttgggattataggtatacgttattatgtttagttaattttttgtatttttagtagagacgagattttattatgttgttaggatggtttcgattatttgatttcgtgattcgtttattttagttttttagagttttagttgttaaagttggagtgtaatggcgcgatttcggtttattgtaattttcgttttttaggtaagttatttttttgttttagttttttgggtagttgggatataggcgttcgttattacgtcgagttatttttgtatttttagtagagacggggttttattatgttggttaggttggttttgaatttttgattttaattttttaaagtgttgggattataggcgtgagttatcgcgttcggtttatttttttttttttttttttttttttttttgtttgagacggagtttttagtttcgttttgtcgtttaggttggagtgtaatggtgtgatttcggtttattgtaacgtttgtttttcgggtttaagcgatttttttgttttagtttttcgagtagttgggattataggcgcgcgttattatgatttattaatttttgtatttttagtagagatagggttttattatgttggtttattttgatttttgagtagtttggttagttcgatcgcgttaaattttgttcgattttgtttagttcggttgttttggtttagtttagttgttaaggtttggagttttatggttgcggaggaaatgatgttacgtttaataggcgggttaattagattttttttttttttcgattggttgttaggaatttgattagattcggagtttcgcgggttttagggttagttgttagtattttttttagttgtttcgttttttattttcgtttttcgtatcgcgttttttttcggttgtttttttcgcgtggggtaaggtttcgagggtagtatttagtagttatttagttttggaaggagaggtgattcgaatggttcggttttttttgttattatgttaggtattttggtcgcgtaggtatttattgattcgatcgggtgttcgtagttggcgcggttattttaatcgtagggaattgtggaatttatagttttaaattatatgtgggtggaacggggaagttggagtagatttttggaggaaagtaaaattggggatttttaggattaggggtttgggttttagaagaatgggaaaggacgagaaaggagtttaaataagaattttgttattagtattgtttggttttttttttaggtgttgatttgaatttggtttatttttttttgattaaaattgtttatttatcgtggaagggattaagtatttatatggagacgttattagttaatataattggagaaaaggatattttttagtcgtaataagagtgggaaaagaattttcgggagaattttgatttagttatttagattaggtagtagtttcgagatttttttatcgaaacgtttgagttggaagtaagtttagatttagttagttaaattttagagtatatttaaggagttgaaaaattggttgttgaatttgaaggagatttttataagttttatggattaattagttagatgttagaggttttttaagtttttgatttttggtattgtttcgatgggagttttgttaagaagatcgtaattcgtggttatggtttggataaatttaaattaggtttttgttgtcgggtattggttttggggttttttttcggattagggtcgttagagggttggatagagttaattatgggcgtagggttatggagggaggaaatttggggggagtttatagagaaatgtttggagtttatgtgttaaggtgaggaagtagagttttagttgtttgggtattttggattttttgttaggtttatattggtattttttatttaaggtcgagatttttgggagttggagattagcgagaaggaagttttggttagggaagaacgtgtaaggggtatagaattatttcgagttgggaattttgaaggagttgttcgatgttatggacgggtttttcggttgtttttgattttatttttatttggttttttagaacgaattgttttttatgttaatttggttgtttgttagttgttgttagggtagttttagttggtagtttagagttgtgatcgggtgttggagcgggagtttggttatttaaaggttttatatcgaaggggggttgtttaggttgtttttgggaatttggaaaaagtaattgttgattttaagaaggtgttggcgatagattttaaaaatcgggtagtttaggaggaattggggaaggtggttatttaggggaagaattaggatgtagggttggtttagggtttgcgtaagatgtttggttgattaaaagttaaattttaaaagagataggaatttgtgaattgtggtttgtgttgtgagatttgggggtggggggttagagggaaggttttagtttatattttatttttagtttttggttttttaggggaggtagtagtggttatagtgcgttttttttgaggggtttatttattttcgaggatatatagaagttgtttaaattaaatttagtagtggttgggggagatggtggattttaatattgggtattatattttttaggcgttttattattggagtttgtttggcgtatgcgtttggcggtatggtattgtttggaagttattttttgttgttgtgtttttattgggttcgtttatatagttattcgtatttgttgatttacgtgtttagtatttaggttttttattggtcggtagagttttcgggacgtttttttttttgaaagagttaattgattagttggtgatggggagaggcgggttttgggaatcgttttttggttggggggtgggggggaaagatggcggagttgatgttgtttagcgagattgttgattcgacgcgtttttttatcgataatttgtttagttcggaggattggggtttgtagagtgaggtatcggggaggggagagggttgtggtaaattgtttttgaggtacgcgggaaagaagcgggggtttaaagaggaagtttgggtaaatacggaattcgttatttgaaggagagcggagtagggggttcgttgtgtattaagggggatataaaagttagggaagaattttgttttttgttggaacgtcgagttgtttcggggtcggggaaggaggggttgaagcgttttggttgtattattttttaagtgggcgggcggtgggtttggtcgagcggagttaatgagggatggggcgggggtttgtgtgcgatttgtaggttggggttatcgaacgatttttcgacgtttagtattttttgtaga

SEQ ID NO: 464 - DNA, 5504 bp, Artificial Sequence
  chemically treated genomic DNA (Homo sapiens)
tttgtaagaaatgttgagcgtcggggggtcgttcggtggttttagtttatagatcgtatataagttttcgttttattttttattggtttcgttcggttagatttatcgttcgtttatttgaaaagtgatataattagggcgttttagttttttttttttcgatttcggaataattcgacgttttagtagggagtagagtttttttttgatttttgtattttttttaatgtataacgagttttttgtttcgtttttttttagatggcggatttcgtatttgtttagattttttttttaggttttcgtttttttttcgcgtgttttagggatagtttgttatagttttttttttttttcggtgttttattttgtagattttagtttttcgggttaagtaggttgtcggtgaagaaacgcgtcgggttagtaatttcgttgagtagtattagtttcgttattttttttttttattttttaattaggagacggtttttaaggttcgtttttttttattattaattaattagttgatttttttaaaaaagggggcgtttcggaagttttatcgattagtaagagatttgggtgttgagtacgtgaattaatagatgcggatgattgtgtaggcgggtttaatgggagtatagtagtaggaagtaatttttagatagtgttatatcgttaagcgtatgcgttaaataggttttagtgataaagcgtttgggagatgtagtatttagtattaaggtttattattttttttagttattattaagtttagtttagatagtttttatgtgttttcggagatagataagttttttaaaaggggcgtattgtgattattgttattttttttaggaagttaaaagttgagaatgggatatgggttgaaattttttttttggttttttatttttaaattttatagtatagattataatttataagtttttgttttttttaaggtttaatttttaattagttaaatattttgcgtagattttgagttagttttgtattttggttttttttttgaatgattattttttttagttttttttgggttgttcggtttttgggatttatcgttagtatttttttgaggttagtagttgttttttttaggtttttaagggtagtttgggtaattttttttcggtataaggtttttaaatggttaggttttcgttttaatattcggttatagttttgggttgttaattgaggttgttttagtaataattgataggtagttagattggtatgaaggatagttcgttttggagggttaggtgggggtaaagttaggagtagtcgaagagttcgtttatagtatcgggtagtttttttagggtttttagttcgaaatagttttgtgttttttgtacgtttttttttggttagggtttttttttcgttagtttttagtttttaggagtttcggttttgagtgaaggatgttagtgtgagtttgataggaggtttagagtgtttaggtagttgaagttttgtttttttattttgatatatggattttaagtatttttttatgagttttttttaagttttttttttttatggttttacgtttatagttagttttgtttagttttttggcggttttgattcgaaaggaaattttaaagttagtattcggtagtaggagtttagtttgggtttgtttaagttatggttacggattacgatttttttgataaagtttttatcggggtagtattagagattagaagtttgaagggtttttggtatttgattggttgatttatgagatttatgagagttttttttaagtttagtaattagttttttagttttttgagtatgttttagaatttggttggttggatttgggtttatttttagtttaagcgtttcggtaggagggtttcggggttgttgtttaatttgaataattgaattaaggttttttcgaaggttttttttttatttttgttgcggttgagaggtgtttttttttttaattgtattgattggtggcgtttttatatggatgtttagttttttttacggtgagtgaatagttttggttagaaagggatgaattaggtttaggttagtatttgaaaagaaaattaaataatgttaatagtagggtttttatttagatttttttttcgtttttttttatttttttgagatttaggtttttagttttgaaagtttttagttttgtttttttttaaaaatttgttttagttttttcgttttatttatatataatttagaattataaattttataattttttgcggttaaggtagtcgcgttaattacggatattcggtcgggttaataagtatttgcgcggttaaagtgtttggtatggtgataggaggagtcgggttattcgaattatttttttttttaaagttaaatggttattgaatgttgttttcggagttttgttttacgcggagagggtagtcggagaggggcgcggtgcgggaggcgggggtagggggcggaataattgggaaagatattgataattaattttggagttcgcgagatttcgaatttagttaaatttttggtagttaatcgggagaagggaggaatttggttagttcgtttattgaacgtgatattatttttttcgtaattatgaagttttaggttttagtaattgaattaggttagagtaatcgaattaggtagaatcgaatagaatttggcgcggtcgggttggttaggttgtttaagagttaaagtgggttaatatggtgagattttgtttttattaaaaatataaaaattagtaggttatggtggcgcgcgtttgtaattttaattattcggaaggttgaaataggagaatcgtttgaattcgggagatagacgttgtagtgagtcgagattatattattgtattttagtttgggcgatagagcgagattagagatttcgttttaaataaaaaaaaaaaaaaaaaaaaaagaaaaggtgggtcgggcgcggtggtttacgtttgtaattttagtattttgggaggttgaggttaggagtttaagattagtttggttaatatggtgaaatttcgtttttattaaaaatgtaaaaatagttcggcgtgatggcgggcgtttatattttagttatttaggaggttgaggtaggagaatggtttatttgggaagcggaggttgtagtgagtcgagatcgcgttattgtattttagttttggtaattgagattttgggaggttgaggtgggcggattacgaggttaggtgatcgagattattttggtaatatggtgaaatttcgtttttattaaaaatataaaaagttagttgggtatggtggcgtgtgtttgtaattttagttatttgggaggttgaggtgggagaatcgtttgaattagggagtcggaggttgtagtgagtcgagatggtgttattgtaatttagtttggcgatagagtaagattttcgttttaaaaataaataaataaataaataaaaagtcgggtatcgcgtacgtttgtaattttagtaatttgggaggtcgaggcggcgggggggggcggggcgggggggagggggcggggcggcggggggattatttgaggttaggggttcgagattagtttggataatatggtgaaatttcgtttttattaaaaatataaaaaattagttgggcgtggtggcgggtatttatagttttagttattcgggaggttgaggtaggagaatggtatgaattcggaaggcggagtttgcggtgagttaagatcgtgttattgcgttttagtttgggcgatagcgtaagatttcgttttaaataaataaataaataaataaaaagttaaagtgtagagaagttttggaatggagattgggggcggatgataatagagtggagaatggtagaggtcgtggtaaatgatagtggtagtagttttttatttggagattttaggtttttttatgttaattatttttatgtttagagtttatttagtatagggtgttttttaggataaaatttcgggattttttttttaatcggttttgttttttgggtgattatttgaggtttttttttatttttttttttatatttattattgttttttaagtttttttttattaagaaattttagtgttttttaaatataagtgtgtatatatattatttagggaatttgttaagttgtagattatgatttaggaagtttgttgtggggtttgtgattttgtattttaataagttggttaatgtagatgttgttggtttataaatcgtatgtttttttttttttttttttttttttagagagatggggtttgttgtgtttattaggttggttttaaatttttggttttaagttattattttattttagttttttaaagtgttgggattataggtgtgagttattatatttagtaatgaattaatgggatgagattttagaatagttttattttattgtttttttttttggttttgtgtttttttagtttattttatattttatatgtataattggtgtgatttgttttattggatgttgtaggttttttttttaatagaagatgtagagatttattgtgatttagttttgtttgtttagttatttatatagtttgggttattatagttttttaggaaagaaggattttttttttgagtattttattttggtttttttttaagtttgtttttattattgtgttttagattataaaaattatgttaggatagttaggaagggagacggttttattattagttaaagatttgtgttaaaataattttttttttggttttgtttgtttgtttttgtttttttgttttttgttttttttgagacggagtattattttgttacgtaggttggagtgtattggcgagatttcggtttattataatttttgttttttaggtttaagcgattattttgttttagttttttaagtagcggggatgataggtatttgttattatgtttggttaatttttgtatttttagtgaagatggggttttattatgttagttaggttggttttaaattttcgattagaagtgatttgtttatttcggttttttaaagtgttgggattataggcgtgagttacggcgttaaggtaggcggattattttaggttaggagtttgagattagtttggttaatatggtgaaatttcgtttttattaaaaatataaaaattagttggtgtggcgtatgtttgtagttttagttatttaggagattgaggtaggagaatcgtttgaatttgggaggcggaggttgtagtgagttgagatcgcgttattgtacggaggtcgaggcgagcggattataaggttaatatggtgaaatttcgtttttattaaaaatttaaaaattagtttggcgtggtggtatacgtttatagttttagttatttgggaggttgagatagaagaatcgtttgaatttaggaggcggaggttgtagtgagttaaga

SEQ ID NO: 465 - DNA, 6120 bp, Artificial Sequence
  chemically treated genomic DNA (Homo sapiens)
agtgtgttggaataataagtgtgatgggagtggttaagggagagggtaagatgggaggataggatgttgtaggtagagtggaatgttggaattaatttttttagagttggattaatttgtatattggtaatgtttagggtgtggttagatattttagtagatagttgaagtggtataaagtaagttattgatttgaggtatttgggtaagggataggtttttttttgagtgttgaatatagatagaatggtgaagaggaaagtttttatattaggggttagagtttttagtttatattttggaggtgagtagatgattattttatggatgggtttaggatggtatatttgatgattttgagttttagttgaataagggtttttacgagggagtaaaggaggtataggtgggaagtaatagtggggaataaagtagatggttagttaatatgttgattttgattgggtgtgggaagatgagtagtatttttttgagaggatagtagagaggttttgggagttttagatagtatattgttggaatttggaaggagaataggagtgagggattgtattatggagggaaaggaagtattagttatgagagtgaagatgaaatatggaaggagtttatattttagtgatttgagtgtgattttggtatgggtgtaggggtattgaagtttagttgtggtttaggaaaaggtttattgtttgtgatttattgtttttagagtggatagtagtaattgtgtggaatagtagtttaattgttttgtttagtgtggtgatgggaggttatagtggatagtgtttagtgttaaattatggtaaggaggaggagttgggatggttgttgattttttatttttgtttttttttttaaggtttaacgttttatggtattttgattgatgtttagttttgtggggttgttttttgtggttgattttattttgattgattatatatagatatacgattttagttttggagtttgaatggatgatgatatttttgattaaaagaagaaataaaagagaggggttaggtgtttatgaaaattttaggttgagatgtttagtaggagggaggtgtgtgtaaatatagatttgggagttatttgtatataggattgaagaaattatagtatttatagtattggaaaattttgtagtattgataaagggaaaagggtaaaggattgaattttttgggaaatgtttttagagaaaaatggattagttaagatgattgtatgagatggtacgttattaagatatttttatgtataaaatattttgaaatttgttttttattatattttaaaaattgaggtttgaatagtttatttttttaattattaaaattttttttttttttgatgggagattttttggattttatagtgtgtatttttttgtttttaaagtatattgaatataattagttttttttttatgatttaggatagttattataaatattagttattgagttgtaatttttaggttgggtatggtggttatgtttgtaattttagtattttgggagattgaagcgggttgattatttgaggttaggagttggagattagtttggttatatggttaaatttcgtgtttattaaaaataaaaaaattaatcgggtgtggtggcgcgtgtttgtaattttagatatttgagaggttgaggcgggagaatcgtttgaatttaggaggcggaggttgtagtgagtttagatcgcgttattgtattttagtttgggtgatagagtaagatattgttttaaaaaaaaaaaaaaaaaaaaggtattatttttaatttaattttatgtagtttttttagttttatttgtattagttttattttgttttttttttattaaatttaattattttttttttttttatttagattttttattttaattatttattttgttttttagatattttttgtattttttttttttttatagtcgatttgttttttttatttggtgaaattttatttattttttaatatacgatttatatgattatattttttggtagatttggttatttttttatgttttttagagtattttatggattatatatattatatgatttaagaaattacggttagttgtaatggtttacgtttagtaattttagtattttgggaggttaaggtaggtagattatttgaggttaggagttgaagattagcgtggttaatatggcgaaatttcgttttttttaaaaatataaaatagttgggtatgggggtatgcgttagtaattttagttacgtgggaggttaaggttagagaattgttggaatttgggaggtagaggttgtagtgagtcgagatgtttttgtattttagtttgggttgatagagtgagattttgttttaaaaaaaaaaaaaaaaaaaaaaagaaattattttatttgtgatttattttaattattgatttgttaataaattgtgttttttaaattttagtatatattggaattgtttgtatataagaagttaaatttttaagaaagtttgatttattaggtttggggttgagtttaagtttttgtattttttataataaatatttttcgttaattttgatgcgagttgtttaaggattataatttgagaaattaataattatgtagttaatggattttattagggtaagggttatgatttatttgtttttgtatttttagggtttgttatgtagattatgttaaatgaatgtttttagaatgaaatatagtttattggggaaggtttttcggtatataatttttgagttgagatttaagttgttgtagaattttaagaaaggttttgttttttaaaggtgtaaaaaatagtataagataatattttttaggtggtttttaaaatatttttgttagggtatgttttgtgggaaaagggtttgtttggtagttagatatttttagaaaatgttgtttgttggatttgtgttttttattttttttaagatatattagtagattgaagtttttgagatgttttgtgggaaagaaatttttttaatttttaaaacgttttgataaagtattttttttattttttttttttagataatgtttttttagaatttgtagaattaatgttttgaggtattttttttggaaattgtttatataattaaaagtataatagtaggaattaatattttatgtgtgatgatgatttataattatttagaattggagaggttattttgggaagttataagaaaagagataaaggattaggtaatattaagggaaagatatttttttatggtaggttcgacgtttgtattttggtataattgttttaaattgttttggttagttataagtattaaaataattgtagtatagatgatagtagataggtttgagtatggaaggattggatttgggtaacggttattggaatgtaaaaggtagtaggaagttaaagatagtagatgaaggatttgtagaatttggtaattaattaaatttggaaaaataatttggatgttttaatttaaagatttaagtggtttatatattttttggatgtatagttagattaaggtgaaaaagaaatattgtattattgatagttgaaaagatgtgtaatagtagggagtagtttttataagttttttgggtttttttttttttttttttttttttttaagacggagtttcgttttgtcgtttaggttggagtttattggcgtaatttcggtttattgtaagttttgttttttgggtttacgttatttttttgttttagtttttcgagtagttgggattataggcgtttattacggtggcgttcggttaatttttcgtatttttagtagagacggggttttatcgtgttagttaggatggtttcgattttttgatttggtgattcgttcgttttagttttttaaagtgttgggattatagacgtgagttatcgtgttcggtttttataggtttttaaattttagttttgtttattttgtttatattttaataggataaaatttattataatatagtttgttttttaaaaagagtttatatagaaattattaatttaaattgaatttatatataaattttaaattatattagaagttttttttggaaaaattaggttttttttttttaataattggggtttgtttattagaaacgatttagtgataataaagtaagatatatttttgtattattatatatttaatttagacgatggggaaatttttttatattattttataatataaagtaggtttattaggttttaagaattatagaatatttatattttttatgtaaaatagaaaatttaattttttagttatttatgttaaatagtagggttaaagtaatgattaggaagattttatacgttttaaaataaggtagtttttatgagatattttgtagtgtttttttggtaatgtttatatttagtgagtagaaaagaaaagatgagagagttaggattttattattgaatttgttttttgaagaaaataaaaattagatagtataattggatgttagaaatgattattagaaagttaggtaaaaatagtataggttgagtattttttatttgaaatgtttgggattagaattgttttagaatttggaattttttggattttagaatattcgtatatatatatgagttattttggggatgagagttaggtttagatacgagatttatttatgttttatatatattttatagtttaaaggtaattttatataatatttttaatgattttgtataggatataaagttttgagttatagtatgaggttatatgtggaattttttttttgtggtattatgtaaatgtttagaaagttttagattttggagtattttagattttggatttttggattagggatgtttaatttgtatttttaaatatttaagatagggttttaatttgtttttttttttattgtttttttagataaatgattatggaaatagttgaattttagtatgatggaagtataatagtttttttgatagagagtaagtttgtttatgtgtagatttagattggttaaaatttaatttttgttttagtttaggtaggtaataggtaggtatcgttgaaagttaaaatatatggaaatgagaattaggtgtagattttgtttttttgttattgattttaaattttttatgttttttggttattagttatttttgtttatttgattgtgaagaaaagatacgtgttgtaattagttttgtattttaatagatatttagtagtgttttatttttattgttattattattatggaaggaaaaataaaaattttttttgaatatgtaatttttaaagtatgatttgagagggttgttaattcgaaattgatatagttttgatgtttttagttgttaagatgatagaaattttattatttttttcgtatatatttgttttaattattattttttttttagttaggtttcgaattttgaattggttttatttagaggttattagtattagttagtatttgtttttagattttaaaatttatttttgagatatttattaaaaatatagtaaaaataaatatatttgttagtttattaaatatttattgaatgtttgttgtgtttaattatttcggatgtatgtggatatgtagttttaggatttaaatattttatggtttggtagggtagatagatattttagtaataattttagtagggtaagaagtgttgtaagatattatgtagaaaatgaataaggtttatagaagagggagtagttagttgattaggagtgttttatatattttttttgagttaggtataaaggatgagtaggagtttgttaggttgataaggtgaggaagtatattttaggtagagcgaagagtgtgtatagaggtatagagttagagtatgggatgtttagggaattatgggtattgagtttaattggagttaggtgtttgggttgggtagtttagttggtaaaggtaagtagaggatcgtatatattttagggtttagagtatattgtattttaaatagtattgaaatatttttaggtgtttatcgtatttt

SEQ ID NO: 466 - DNA, 6120 bp, Artificial Sequence
  chemically treated genomic DNA (Homo sapiens)
aaaatacggtgggtatttgaaaatattttaatattatttagagtatagtgtattttaaattttgaaatgtatacgattttttatttatttttattagttggattgtttagtttagatatttggttttagttaaatttaatatttatagttttttgaatattttatgttttggttttgtgtttttgtgtatatttttcgttttgtttagaatatgtttttttattttattaatttggtagatttttatttattttttgtgtttagtttaaaggagatatataaagtatttttagttagttggttgtttttttttttgtaggttttatttattttttatatagtattttatagtattttttattttattggaattattgttaaaatatttgtttattttattaaattatgggatatttaagttttgaaattatatatttatatgtattcggaataattagatatagtagatatttaataaatatttgatgaattaataaatgtgtttatttttattatatttttaatagatattttagaaataaattttaggatttagaaataggtattaattgatattggtgatttttgaatgaaattaatttaaagttcgagatttaattgaaaagaaagtaatgattaagataaatatatacggggaaaatggtaagatttttgttattttaatagttaaggatattagaattgtattaatttcgaattagtaatttttttaaattatattttgaggattatatatttaggaagggtttttgtttttttttttatagtggtggtggtaatggagatggggtattgttgaatgtttgttaaaatgtaaggttaattataatacgtattttttttttataattaaataagtaagaatggttgataattagggaatatggaaaatttaagattaatggtaagaaaatagaatttgtatttaatttttatttttatatattttgatttttaacggtgtttgtttattgtttatttgagttaaagtagggattgaattttggttagtttgagtttgtatatgagtagatttgttttttgttaaagaagttgttatatttttattatgttgggatttaattgtttttatggttatttgtttgaaaagataataaaaaggaagataaattaaggttttattttaagtatttggaaatataggttgaatatttttaatttaaaaatttaaaatttgaaatgttttaaaatttgaaattttttgagtatttatatgatgttataaaaggaaaattttatatgtgattttatgttatggtttaaaattttgtattttgtataaaattattaaaaatattgtataaaattatttttagattataaggtgtatatgaaatataaatgaatttcgtgtttagatttggtttttatttttaaggtaatttatatgtatatgcgaatattttaaaatttaaaaaattttaaattttgaaataattttggttttaagtattttagataagggatatttaatttgtattgtttttatttagttttttaataattatttttgatatttaattgtattatttggtttttgttttttttaagaaataggtttaatagtagagttttaatttttttatttttttttttttgtttattgaatatgaatattattaagggagtattgtaaaatgttttatgaaaattattttattttaaaacgtataaagtttttttgattattattttaattttgttgtttagtatgaatggttggaaaattaggttttttattttatatgaaaagtataaatattttatgatttttaaggtttaataaatttgttttatgttatgaggtagtgtgaaggaatttttttatcgtttaaattaaatgtataataatataaaaatgtgttttgttttgttattattaagtcgtttttgataaataagttttaattattgaaaaaagaggatttaatttttttaggaaaaatttttgatgtgatttgaagtttgtgtatgaatttagtttaagttagtgatttttatatggattttttttagaaggtaaattatattataataaattttattttgttaaaatataaataaaataaataaaattaaaatttaaaaatttatagaggtcgggtacggtggtttacgtttgtaattttagtattttgggaggttgaggcgggcggattattaggttaggagatcgagattattttggttaatacggtgaaatttcgtttttattaaaaatacgaaaaattagtcgggcgttatcgtggtaggcgtttgtagttttagttattcgggaggttgaggtaggagaatggcgtgaatttaggaggtagagtttgtagtgagtcgagattgcgttagtggattttagtttgggcgatagagcgagatttcgttttaaaaaaaaaaaaaaaaaaaaaaaaaaatttaaaaaatttatagaaattattttttgttgttatatatttttttagttgttaataatataatgttttttttttattttagtttaattatatatttaaaaagtatatagattatttagatttttgaattaaaatatttaagttgtttttttagatttaattagttattagattttatagattttttatttattgtttttgattttttattgttttttgtattttagtagtcgttatttaaatttaatttttttatgtttaaatttgtttgttattatttatattatagttattttaatatttataattgattaggataatttagagtaattatattaaaatataaacgtcgagtttattatagaaaaatgttttttttttaatattgtttaattttttatttttttttttataattttttagagtggtttttttaattttaggtaattataggttattattatatatgaagtgttaatttttattgttatatttttggttatgtgagtagtttttaaagaaaatattttaggatattagttttgtaggttttaaaaaggtattatttggggaaaaagggtagggaaaatgttttgttaaaacgttttaaagattaaaagggttttttttttatagaatattttaaaagttttaatttgttagtgtgttttgagaagggtgaagggtataggtttaatagatagtattttttaaaagtatttgattattaaataaattttttttttataaagtatgttttagtaggagtattttggaaattatttgggaaatgttgttttgtgttattttttatatttttgaaaggtaaaattttttttaagattttgtaataatttgggttttaatttaaaaattatatgtcgaaaggttttttttagtaaattatattttattttagaaatatttatttagtatagtttatatggtaggttttgaaaatataaaagtagataagttatggtttttgttttgatggaatttattaattatatggttgttggttttttaaattatggtttttggataattcgtattagaattaacgagaagtatttgttgtaaaaaatgtagaagtttaggtttaattttaaatttagtgaattaaatttttttgagaatttaattttttatatgtaaataattttaatatgtattaaaatttgagaaatatagtttattggtaggttagtaattaaagtaaattataagtaaagtaatttttttttttttttttttttttttttgaggtagagttttattttgttaatttaggttggagtgtagaggtatttcggtttattgtaatttttgttttttaggttttagtagttttttggttttagttttttacgtagttgggattattgacgtatgtttttatgtttagttattttgtatttttagaagagacggggtttcgttatgttggttacgttggtttttaatttttgattttaggtgatttgtttgttttggttttttaaagtgttgggattattaggcgtgagttattgtaattggtcgtaattttttgaattatgtgatatatgtgatttatgaaatgttttggaaaatataagagaatgattaagtttgttagagaatgtggttatatgagtcgtatattgaagggtgagtaggattttattaggtagaaaggataggtcgattatgagagggaggaaagtatagaggatatttgggaaatagaataggtgattggagtagaaaatttgggtgagggaaagggggataattagatttagtggggaagagatagagtaggattggtataaatagggttggaaaggttgtatggaattaaattaggaataatattttttttttttttttttttttgagatagtgttttgttttgttatttaggttggagtgtagtggcgcgatttggatttattgtaattttcgttttttgggtttaagcgattttttcgttttagttttttaagtatttgggattataggtacgcgttattatattcggttaatttttttatttttagtagatacggggtttaattatgtggttaggttggtttttaatttttggttttaagtgattagttcgttttagttttttaaagtgttaggattataggtatggttattatgtttagtttggaagttataatttaataattgatatttataataattattttgagttatgaaaaaaaggttaattatgtttagtatattttaaggatagaggggtatatattgtagaatttaagaagttttttattaaaaaaaaaaaaagttttaatgattaaaaagataaattatttaggttttaatttttgagatatgataaaagatagattttaaaatgttttatatatgaaaatgttttgataacgtattattttatgtaattattttaattggtttatttttttttgggggtattttttagagagtttagttttttgtttttttttttttgttaatattatagaattttttaatattatgaatattatggtttttttaattttatatgtagatggtttttaaatttgtatttatatatattttttttttattgagtattttaatttggggtttttatggatatttgattttttttttttatttttttttttagttaagagtattattatttatttaggttttaaagttagaatcgtgtgtttatatataattagttagaatgagattaattataaaaagtaattttataaagttaaatattagttaggatattatgaggcgttgagttttagggagaaaggtagagatggaaggttagtagttattttaattttttttttttattataatttagtattgggtattgtttattgtaattttttattattatattggataaagtagttgagttgttgttttatatagttgttgttatttattttgaagataataaattatagataatgggtttttttttaagttataattaaattttaatgtttttgtatttatgttagaattatatttaaattattaagatataagttttttttatattttatttttatttttataattagtgttttttttttttttataatataattttttatttttgttttttttttaaattttagtaatatgttatttggaatttttaaagtttttttgttgtttttttaagagagtattgtttatttttttatatttaattaaggttagtatgttgattggttatttgttttgttttttattgttgttttttatttgtattttttttattttttcgtaaaaatttttgtttaattgaggtttaaggttattaggtgtattattttgaatttatttataagataattatttatttatttttaggatgtaaattgaagattttggtttttgatgtaaaagtttttttttttattattttgtttatgtttaatatttaaaagaagatttattttttatttagatgttttagattaatgatttattttatgttattttagttatttattggagtgtttggttatattttggatattgttaatgtgtaaattggtttagttttgaaaaaattaattttaatattttattttgtttataatattttatttttttattttatttttttttttgattatttttattatatttgttattttaatatatt

SEQ ID NO: 467 - DNA, 6800 bp, Artificial Sequence
  chemically treated genomic DNA (Homo sapiens)
gttttagtttttggagtagttgggattataggcgtttattattacgtttgtttaattttgtatttttagtagagatagggttttgttatgttggttaggttggttttgaatttttgattttaggtgatttatttgtttcggttttttaaagtgttggtattataggcgtgagtaattgtatttggtttatttattgttattattgagataaggtttttttttattgtttaggttggtgtgcggtggtatgtttatagtttattgtagtttttaaattttgggttttagtgatttttttgttttagttttttgagtagttgagattataggtgcggattattatgtttgattaatttttgtatttttttttttgtggagatagcgttttgttatgttatttaggttggtttcgaatttttgggtttaagtaatttgtttattttgattttttaaagtgttgagattataggtgtgagatatagtatttggttatttgtattgttttaaaaattataaatggttgcgaggtatatatattgtttagtattatatttgttttttttgaatatataaatattataattttataatatttataatatataataatataaataataataaatatatatggtttggttatatataatatataaaataatatttataaatatttattgttaaagtgtaattaaatgggaaaaaaagaaaaatatttggttaggtgtggtggtttatgtttgtagttttagtattttgggaggttgaggtgggaagattatttgagtttaggagttggaggttgtagtgagttatggtaacgtcgttgtatttcggtttggatgatagagggagattttgttttttaaaaaattttaaaaaataaatttgattttttgacgtatatataataagtataggttaaagatttatttaagttatgaatgaaggaattagttgttttaaaggagaatttgggtcgggtgtagtggtttacgtttgtaattttagtattttgggaggttgaggtgggtggattacgaggttaagagattgagattattttggttaatatggtgaaatttcgattttattaaaaatataaaaattagttgggcgtggtggcgggtgtttgaggttaggagttcgagattagtttggttaataatggtgaaattttgtttttattaagaatataaaaaattagttgggtgtggtggtttatgtttgtaattttagttatttgggaagttgaggtaggagaataatttgaatttaggaggtggagtttgtagtaagtcgagattgtgttattgtattttagtttgggcgatagaataagattttattaaaaaaaaaaaaaaggagaatttgatgaatagaagttgataggtttagttaggaaagacgggttggagaaaatttgttaggttagatataaaattggttaaagatttataggataatataattgtaatttttgaggttattttttttattagagagaaattatttgtaattaaattttttggggttattatttattttgtcgaagtttagattttaattaataatgaataatagatcgggtgtagtggttgacgtttgtaattttagtattttgggaagtcgaggtaggcggattacgaggttaggagttcgagattagtttggttaatatggtgaaatttcgtttttattaaaaatataaaaattagtcgggtatggtggcgtatgtttgtaattttagttttttaggaggttgaggtaggagaatcgtttgaatttaggaggtagaagttgtagtgagtcgagatcgcgttattgtattttagtttgggcgatagagtaagattttgttttaaaaaaaaaaaaaaaaaaaaagaatagtaaattaaatataggtatagttttttagaatagggtttttaattttcggtttgtagtttgttaggtatggggttgtatagttggtgagtaagtattattgtttgagtttcgttttttgttagattagcggtggttttagatttttataggaacgtgaattttattgtgaattgtacgtgcgagagatttaggttgtatattttttatgaaaatttaaggtattgtttatttttatttatggaaaaattattttttacgaaattagtttttggtgttaaaaaggttgaggattgttgttttggaatatgaagtaaattttgggtgggtttgttagataagatttttagatgatttggaaatggtatgttgttagttttttttgttttattgtcgagtttagaattttttttaatttttattttttttgagatgaagttttgtttttgttttttaggttggagtgtagtggtacgatttgggtttattgtaatttttgtttttcgggtttaagcgatttttttgttttagtttttagagtagttgggattataggcgtttgttattacgttcggataatttttgtattttagttgagacgttttattatgttggttaggttggtttcgaattttcgattttaggtgattcgtttgttttggttttttaaagtgttgggattgtagatgtgagttattatatttggtttttagaataattttttaaaattatataatggagattttttaaaattagtttagagagtagttttatgttttttttttttttttttgagacggagtttcgttttgtcgtttaagttggagtgtagtggtttgattttggtttattgtaatttttgtttttcgggtttaagcgatttttttgttttagtttttcgagtagttgggattataggtacgcgttattatgttcggttaatttttgtattttttgtagagacggggttttattatgttggttaggttggtttcgaatttttgatttttggtgatttgtttgttttggttttttaaagtgttgaaattataggtatgagttattgcgtttaggtttattttaaaaaaaaaattaattttttgtagagataggagagtttcgttatgttgttatttgaatataaatgttatttttttttttttttttttttttttttttgagacggagttcgtagtttaggttggggtgtggtggtattattttggtttattatagttttcgttttttaggtttaagcgatttttttgttttagttttttaagtagttgggattataggcgtgtatttttgtgtttagttaatttttgtatttttagtagagacggggttttattatgttgattaggttaattttaaatttttgattttaagtgatttgtttgttttggttttttaaagtgttgggattataggtgtgagttattgcgtttggtttataaatgcgatttttatttttattttttaataaggcgattgaggtatatattgaaggtgaattattaggataaaagaaagatggtattttattttaataatagtttgttataatttgtattgttatttatttgttatgggagtgtgtttttttttatattgatattagtgttggaagttattaattttttttatttttgttaatttgataggttaaaagtgattatggaagatttatattcgttttttttttttttttttttttgagataggggtttatttttttttttttttttagagatggggggttttattattttttttttttttttttagagatgggggttttattatgttgtttaggttggttttgaatttttgggtttaagtgatttttttgttttgattttttaaagtgttgggattataggtgtgagtcgttttgtttagtttttattgtcgtttttttgtttgtttttgtttttgtttttttgttttgttttgttttgtttttgagatagagtttcgttttgtcgtttaggttggagtgcggtggtgcgattttggtttattgtaatttttgtttttcgggttttagtgatttttttgttttagttttttaagtagttgggattataggtattcgttattatatttggttaatttttgtatttttaatagagatggggttttattatgttggttaggttggttttgaatttttgattttaggtgatttatttattttagttttttaaagtgttgggattataggcgtgagttattttgtttggtttttattgttggtttaatgttatttttttttagggtgattaattaatttagtttgtttgggattattttggttttagtattgaaagttttgtgttttaagaaatatttattttttttttaatttgggtaaagagggacggttggttaatttgtagttttgggttataagtgaggttgagcgtgtttgtttatggttaagaaagaagggattttggatgagggtgtgtaataggattagatttgttttgttttttttttagagttttgttgtgttatttaggttggagtgtaatggtttgaatatagtttattgtagttttaaatttttgggtttaagtgatttttttattttagttttttgggtagttgggattataggtatgtattattatatttagttaattttttaaagaatattttttttttttttttaagagatagggttttgttatgttgtttaggttggttttaaatttttgggtttaagtgattttttcgttttggttttttaaagtgttgggatgatagatgtgagttattgtgtttagttaggacgagatttttagagggtagagtaggaataagagtttgtatttatgaggtatatgatggttttagttgtttgttttgtagagttttaagaaagttttgagaattttaagtagaggttattttatatgtgaggatatagaggtatagagaggtgagataaatggttaaggttatatatttaagaggagaaggaggtaggatttgaatcgtagtttgtacgttattttatggtgagtaattggtaagtgagtgagtattttttttttttttttgtaggttttttgatttgggttttagtgttttcgaagattatgatggcgtatatgaattcggggttttattattttgttaacgttttggttttaagtggttttagtgtggatttgatgtattaggttgtgttttatttaagtgagtatagtcgttttttttggtattttaggttggttttattttttggaggatttttggggtttttttgtttttaggaagaaggtaattataggggcgattttagggttatatattagttttttgggtttatttgaaatgtatgttatttagaaaaatattagtagttttagaaatttaggatagaggttttttttggggtgaggaagaggggatgtaatttggaaggggaattaagaggaatttttatttgttattaaaattttattatttatttattttttagagataaggttttatattttgttatttaggttggagtgtagtggtggtggttacggtttattgtagtttcgaatttttgggtttaagtaatttttttattttagttttttgagtagttgggattgtaggtgtgagttattgtgtttaggttcggggggtattttttttttttaattttatttttgagatagggttttattttgttgtttattttgaagtgtaatggtgtaattatagtttattatagtttcgaatttttgggtttaagcgatttttttgttttggttttttaaatagttaggattataggtgtacgttattatgtttggttaatttttttaagtttttgtagattttgtaggatttggattatataaaatatagaaaaaattattattatttttttttttgtagagattgggtttttttatgttgtttaggttggttttaaatttttgggtttaaataattcgtttgatttagttttttaaagtgttgggattataggtatgagttattgtatttggtttgtaaagttttatttttttttttttttttttttttcgagatatagtttagacggagtttcgtttttgtttaggttggagtgtaatggcgcgattttggttttttgtaatttttgttttttaggtttaagtgatttttttgttttagttttttaagtagttgggattataggcgtatattattatgttcggttaatttttgtaaagttttatttttaagagaagtgagtatttagttatttgtagtattattttttagtttttgttttttttttttttttttttaagatcgagttttgttttgttattaggttggagtgtagtggtataattttggtttattgtaatttttgttttttgggtttaagcgattttttttttttagtttttcgagtagttgggattataggtatgtattattatatttggttaattttttgtatttttagtagagataggggttttttatgttggttaggatagttttaattttttgattttgtgatttgtttgttttagttttttaaagtgttgggattataggcgtgagttatcgtatttagtttagatttgttatttttataggttagaaacggttgaatgttagtaatgttatgttttaattgattatgttttagtgtataagaaagtttagaagagggaaaaacgattcgtatatttttttgttgagttaaagttttggggttaggtatgagttatagagtgttaggtatatagtgaggtgtagaagggtagggaatgtgtattttatttttagtttaggtagatggtaattaggatggaatttttggtattttatttagttttagggttttatattagtttatgtggatgatttgagggttttgttttttattttattttagg

SEQ ID NO: 468 - DNA, 6800 bp, Artificial Sequence
  chemically treated genomic DNA (Homo sapiens)
tttggggtgggatgggaaataggatttttaggttatttatatgggttggtgtgaggttttgaggttgggtgggatgttaagaattttattttggttgttatttgtttaaattaaggatggaatatatattttttgtttttttatattttattgtgtgtttggtattttgtggtttatgtttgattttaaggttttagtttaataaggaggtgtgcgagtcgttttttttttttttaaatttttttatgtattaagatataattagttgaagtatgatattgttgatatttaatcgtttttagtttataaaagtagtaagtttgggttgggtgcggtggtttacgtttataattttagtattttgggaggttgaggtaggtagattataaggttaagaaattgagattattttggttaatatggggaatttttgtttttattaaaaatataaaaaattagttaggtgtggtggtgtatgtttgtagttttagttattcgggaggttgagggaggagaatcgtttgaatttagaaggtagaggttgtagtgagttaagattatgttattgtattttagtttggtaatagaataaggttcggttttgaaaaaaaaaaaaaaaaaaataagagttaaagaataatgttataaataattgagtatttattttttttaaaaataaggttttataaaaattggtcgggtatggtggtgtgcgtttgtaattttagttatttgggaggttgaggtaggagaattatttgaatttgggaggtaaaagttgtaaagagttaagatcgcgttattgtattttagtttgggtaggagcgaaatttcgtttaaattgtgtttcgaaagaaaaaaaaagaaaaagaaataaggttttgtaggttaggtgtagtggtttatgtttgtaattttagtattttgggaggttgagttaggcggattatttggatttaagagtttgagattagtttgggtaatatagggagatttaatttttataaaaaaaaaaataataataattttttttatgttttgtataatttagattttgtaaaatttataaaaatttaaaaaagttagttaggtatggtggcgtgtatttgtaattttagttatttgggaggttaaggtaaaaggatcgtttgagtttaggagttcgaggttgtagtgagttgtgattgtattattgtattttagagtgggtaatagagtgagattttgttttaaaaataaaattaaaaaaaaaaagtgtttttcgggtttaggtataatggtttatatttgtagttttagttatttaggaggttgaggtgggaggattgtttgagtttaggagttcgaggttgtagtgagtcgtgattattattattgtattttagtttgggtgatagagtgtgagattttgtttttgaaaaataaataaataataaagttttggtaatagatgaaaattttttttgattttttttttagattatatttttttttttttattttaaaaggaatttttgttttgaatttttaggattgttaatgtttttttaagtgatatatattttagatgaatttagagggttggtgtatggttttgaagtcgtttttgtgattgttttttttttgggggtaaagggattttagaggttttttaagagatgaggttagtttggggtgttaagagaaacgattgtatttatttgggtagggtatagtttggtgtattagatttatattggggttatttagggttaaggcgttgatagaatagtggggtttcgggtttatatacgttattatgattttcggggatattgaggtttaagttagggggtttgtaagagaagaggagggatgtttatttatttattagttatttattatggggtgacgtgtaggttgcgatttaaattttgtttttttttttttttaggtatgtgattttggttatttattttatttttttgtatttttgtgtttttatatgtaaaatggtttttgtttaaggtttttagagtttttttgagattttgtaaagtagatagttgaagttattatgtgttttataagtgtaagtttttatttttattttattttttaaaaatttcgttttggttaggtataatggtttatatttgttattttagtattttgggaggttaaggcgggaggattatttgagtttaggagtttgagattagtttgagtaatatagtaagattttgttttttaaaaaaaaaaaaaaagtgttttttaaaaagttaattgggtgtggtgatgtatgtttgtaattttagttatttaggaggttgaggtgggaggattatttgagtttaggagtttggggttgtagtgagttgtgtttaggttattgtattttagtttgggtgatatagtaagattttaagaaaaaaataaaataaatttgattttgttatatatttttatttaagatttttttttttttgattatgggtaaatacgtttagttttatttataatttaggattgtaggttgattaatcgtttttttttgtttaggttggaggagaggtgggtgttttttggaatataggatttttagtgttagagttagaatggttttaggtaaattggattggttggttattttaagggagagtggtattaaattaatagtaagggttaggtaaggtggtttacgtttgtaattttagtattttgggaggttgagatggatggattatttaaggttagaagtttaagattagtttggttaatatggtgaaattttatttttattaaaaatataaaaattagttaggtgtggtggcgggtgtttgtaattttagttatttgggaggttgaggtaggagaattattggaattcgggaggtagaggttgtagtgagttaagatcgtattatcgtattttagtttgggcgatagagcgagattttgttttaaaaataaaataaaataaaataaaaaaataaaaataaaaataaataaaaaaacgatagtaagggttaagtaaggcggtttatatttgtaattttagtattttgggaggttaaggtaggagaattatttgagtttagaagtttaaaattagtttaggtaatatagtgagatttttatttttgaaaaaaagaaaaagaaatagtgagattttttatttttgaaaaaagaaaaagaaatagatttttattttaaaaaaaaaaaaaaaaaaaaagcgagtgtggattttttatgattatttttgatttattaggttggtaaagatgaaggaggttgataatttttagtattggtgttagtgtggggaaaggtatatttttatggtagataggtagtagtataggttgtaataaattgttattgaagtaaaatgttattttttttttgttttagtaatttatttttaatgtatattttagtcgttttgttggaaaatgggaatgaaaatcgtatttatgggttaggcgtagtggtttatatttgtaattttagtattttgggagattaaggtaggtagattatttgaggttaggagtttgagattagtttggttaatatggtgaaatttcgtttttattaaaaatataaaaattagttgggtataggggtgtacgtttgtagttttagttatttgggaggttgaggtaggagaatcgtttgaatttgggaggcggaggttgtagtgagttaaaatggtgttattatattttagtttgggttacggatttcgttttaaaaaaaagaaaagaaaagaaaaagaaaatagtatttatgtttaggtggtaatatagcgaaatttttttgtttttataaaaaattaattttttttttaaagtaagtttgggcgtagtggtttatgtttgtaattttagtattttgggaggttaaggtaggtagattattagaggttagaagttcgagattagtttggttaatatggtgaaatttcgtttttgtagaaaatataaaaattagtcgggtatggtggcgcgtgtttgtaattttagttattcgggaggttgaggtaggagaatcgtttgaattcgggaggtagaagttgtaatgagttaagattaagttattgtattttagtttgggcgatagagcgagatttcgttttaaaaaaaaaaaaaaaaaatataaggttgttttttgaattgattttaaaagatttttattatatagttttaaaaaattgttttaggggttaggtgtggtggtttatatttgtaattttagtattttgggaggttaaagtaggcggattatttgaggtcgggagttcgagattagtttggttaatatggtgaaacgttttaattaaaatataaaaattattcgggcgtggtggtaggcgtttgtaattttagttattttggaggttgaggtaggagaatcgtttgagttcgggaggtagaggttgtagtgagtttagatcgtgttattgtattttagtttgggagataagagtaagattttattttaaaaaaaataaaaattaaaaaaagttttaggttcggtaataagataaaaaaagttgatagtatgttatttttaagttatttgggagttttgtttaatagatttatttaaagtttgttttatattttaaggtagtagtttttaatttttttggtattaaaaattggtttcgtagaagataatttttttatggatgggagtgggtagtgttttagatttttataaggagtgtataatttagatttttcgtacgtgtagtttataatagggtttacgtttttgtgagagtttagagttatcgttgatttgataggaggcggggtttaggtagtaatgtttgtttattagttgtgtaattttatgtttaatagattataaatcgggggttggggattttattttaagggattgtatttgtatttgatttattattttttttttttttttttttttttgagatagagttttgttttgtcgtttaggttaaagtgtagtggcgcgatttcggtttattgtaatttttgttttttgggtttaagcgatttttttgttttagttttttgaggagttgggattataggtatgcgttattatgttcggttaatttttgtatttttagtagagacggggttttattatgttggttaggttggtttcgaatttttgatttcgtgattcgtttgtttcggttttttaaagtgttgggattataggcgttagttattatattcggtttgttatttattattgattagagtttagatttcgataaggtaaatggtaattttaggaagtttggttgtaaatgatttttttttggtagaaaaggtaattttaaaggttatagttgtattgttttgtaggtttttaattagttttgtatttaatttggtaaattttttttagttcgttttttttgattaaatttattaatttttgtttattaaattttttttttttttttttttaatggagttttgttttgtcgtttaggttggagtgtagtggtataatttcggtttgttgtaaattttattttttgggtttaagttatttttttgttttagttttttaagtagttgggattataggtatgagttattatatttagttaattttttgtatttttagtaaagataaggttttattattgttagttaagttggtttcgaatttttgattttaggtattcgttattacgtttagttaatttttgtatttttagtagagtcggggttttattatgttggttaggatggttttaattttttgatttcgtgatttatttattttagttttttaaagtgttgggattataggcgtgagttattgtattcggtttaaatttttttttgaaatagttggtttttttatttatgatttaaataaatttttgatttgtgtttattatatatgcgttagagaattagatttgttttttggggttttttaagagataaggtttttttttgttatttaggtcggagtgtagcggcgttgttatagtttattgtagtttttaatttttgggtttaagtgatttttttattttagttttttaaagtgttaggattatagatatgagttattatatttggttaaatgttttttttttttttttatttaattgtattttgataataagtgtttgtgaatgttattttatatattgtatatgattaaattatatatatttattattatttgtgttattatatattataaatattataaaattataatatttatatatttaaaggaaataagtatggtgttgggtagtatgtatatttcgtaattatttgtgatttttaaaataatgtagatggttaggtgttgtgttttatatttataattttagtattttgggaggttaaggtgggtagattgtttgagtttaggagttcgagattagtttgggtaatatggtaaaacgttgtttttataaaaaaaaaaatataaaaattggttaggtatggtggttcgtatttgtagttttagttatttaggaggttgaggtaggaggattattggagtttaggatttggagattgtagtgagttatgagtatgttatcgtatattagtttaggtaatagaggaagattttgttttaataataataataaataggttaggtgtagttgtttacgtttgtaatgttagtattttgggaggtcgaggtagatggattatttgaggttaagagtttaagattagtttggttaatatggtaaaattttgtttttattaaaaatataaaattaggtaggcgtggtggtgggcgtttgtaattttagttattttagaggttgaggt

SEQ ID NO: 469 - DNA, 6201 bp, Artificial Sequence
  chemically treated genomic DNA (Homo sapiens)
gaagttagttttttttttttcgtttttttaaattagtaaagaaggaaattttttaggagatgagagattaggtagataaatagggttggttttggtaagagttggaaatgtattagtaagaaagtaagaaaaagaattcggagtaagttttaaattatttagtttatttttttagttagtgttgtttttttggtattaaatagttaataattacgtagatatacgggcgttattggggattttaggggtttagaaataaatataagaggtttgttttatagtgagggtaggatagttgagttatttattaaatttagtgttttttgttttgtagataaagttttttaaaggatgttaaaggttaaatattttttattttttttgttaattaaaaataaggataaggaagtagggagggaggttatttgttaagaaagggttttgaggggttgtaattagttagttttggttgtggtaatttttatgatttttagaataaaagttttagattggtaaagattttaggaaaaaaaaaagtattgaagaagaggtaagagggtttttggatttaagaatattttattatttgatagattttttttattttttgttgggattagtttgttagataattttagaatagtttttaagttagatatatttttggtatgtagtgtttggttgtttgaggttgtattttgggtttggttatgttagttgtattattttattttttagaattatttatgtgggagaggtgtggtatttttgattaatgttttgggattgaatttggtttagggtgaatttttgttagagggaggtaggggaagtttattagaatgttaaggagattatagagtaaatgatgatggagggaaggtagaggttagggtttttgtatatgggtgatttgttttttttattataggagttgtttattaattttttagaagaaaaagaaaataggtaattttggggttgggggagggaatttgggggaggtaaattagagaagataatagaattttaatttttggaaagggtagaagggtagaaaaggaatgaaaggataaagggagatagtatattaaagagaatttaggttgttgtatttaagattagttttgaatttttggattttattttttttattattttagagtggtagggttggttgtttatttttttatttatttagtaaatatttatttagtatttatattttacgttaggatttgtgtgggttttaaggaggtagagaggtataagaggaaagatatatgattttagttttggaagagttgaaaattaaatttaagagataaatttatataaataaatagttgtaatattattattggtgttgtaatagatgtgtatttatgttgtgggagaattgagagaagatattgatgtcgaaatgttaaagaaataatagtaaagggttaggcgtagtgttttacgtttgtaattttagtattttgggaggttaaggtggggcggattatttgagattaggagtttgggattagtttggttaatatggtgaaattttatttttattaaaaagagaaaaattagttgggtatagtggtatgcgtttgtagtattagttatttgggaggttaaggtacgagaattgtttgaatttaggagatggaggttgtagtgagtcgagatcgcgttattgtattttagtttaggtaagagtgagattttgtttttaaataaataaataaaagtaaagtttataagttagtagaggagggagaaggtgttttaggtagataaattagtttatgaaaaaaaaaaaaagagattgatttgatttaaagtggttgattggtatagttgagtattttttattttgtattgtaagtgtgtttatttatttttatttatttgttttttttagtaggttgtaagttttttgaggtagaggaaatagtttatttatttttttatttttagaatatggtatagagtttggtatataatgggtttttttgttgaatttgttaggggttagtgaaaaatgaggatggaagatattatggttagattgtgaaagggttagattgtaaattttgttaaggagtttggatttagtattagtagatatgaaagaagtgagaatggaggtagggggattagatagaagtttgtcgttaatagtttaatagtgatttgaagaaggtaattttagtagagatagggaagagagaataaatttaagttggattttttttttttaggaagttaaataagacggatattgaagtcgtagttataatagttgtagtagaattttttaaaggtaatgataggtttttgttttttttttggggttgttcggatatgggattttagtagttagtttttttgtattgtaatagatatattttagttatttgtagaatttgttggttttgtttgtttttttttgtttgttttttgtttaaaggagtaaagcgaagggatattagttgatttgtttttgtattggaggtgaggggtaaaattaagttatgaattttttttaatgttatttatttttcgtagggttatgaaataataggatatacgtatgaacgggtgttatagtagtaagggttttaagagaggagtttaggttttatgtcggaagatagtaatttatattatgttgatatttaagtgtgtagtcgtttttatgttcgggaagtgaaatacgtgtatttagaaaacgttatagagtatgcgatttttcgttttttttaggttatatttcgttatgatagtaagaacgggattttggtgtgagcgtttgggaggaaggtttagtttatcgttaattattatatttgtgggggagaatttattgttttggggaattgggtggtaatttagggatgttgtttacgttttaagtttaaagaattttaaagtttttggaattgtgggcgttttatttttttttttggttttttatttgttattgttaggttggagttaatagttggtttagttatgggtggatagttaaatttagttatttatatgaggttaggtggagtgtgtagggaggtaggttttcgattttattattgttgtttttgtttttgtaaagtgtagaaagagtaggtaaaaagttagtttataagtacgtgggttgattttgttggattttaattaatggtatttttttttatatattttaaattttaaaagttgaaggggaggtgtttcggaaaagtattttgagtttttatatttagatattagggttggtttgggttatttttttagtggttgagttaggttttagattttaatagataaatgggggaagggggttgaggcgtggaggaaacgtttttaggattttaagttagtgataatcgatagtatagtgaggtttggaaatttttttcggagggattgttggttttcgtaggtgcggggtcgttaggattaataaacggtttgagaaatatgtttggcgcgttttttggggcggggtttcgaagttttttgcgaggatagcggatttcgtttagttttaagggcggttcgaaagtttagttagtagataggtttttcggttttatttttaggtcgcggttggaggcggagttggaggggggtggggtttaggagaaagggggcgggttattattggtagagggcgtagtttttggggcgggggtttatgtcgggattggttgttgtcggagtttttgggaggcggattcggaacggtagttgggggggatttgggtttaggtggcgcggtttgggtttgtaggaggcgggattcggcgggttagaggcgggattaatggtcggtagggtgttggttttggttggttggaggcgtttaagtaggcgtagcgcgattttttagttgtcggagagttaggttcgataggaggtgggggcggggtcgatattatttaaaatagtgtcgagttttttggggggggaggggttgggagtgggggttttgagtgagagtaatgagggtgtgattagcgtcgttcggatttttagttttttttttcgtatattttttagttgtcgtagggggtttgagaggatagttgagggttttggttgggaacgagttggggagggggagttggtggtgtttggggtatgaagaggtttcgttgagatttttataaacggtttgtacgtttttatattttattttttttttttcggtggtaggtattgtgtatttaatttttaaagtatttttggatttaatgttttgagagttatatagaacgaaagatgtaagaaatttgtttgttttttttttagggggtggggtttttttgtttagatgtgggatttttttttaaatttaggttaatttagggtacgaggtagatggttggtgttgatatgttgattattattgtttttttttaaggatttataaagagttaatgtttttggggtttagtttaggaagattttagtttttgtttaggtttaagatagttgttggtttgatttttttggtatttaggattggaaaggaggaggaggggtatattacgtcggtttttattttttttttatttcgcgtgtttgtttgggatttttgattttgtattagttttagagaataggggtgggggtgggtgttattgggtgtggatagaaagttagtgaaataagattatgataagttattggtcggtttagacgtgtttgtgtttttttttttttagtttagtgagtattgggtatgtgttatattgttaaatttcggattataagtttttatgaattgttggtgagttaggataataaaatttttgatattattattttagaagttttataagattgtatatataaggggttggttgtagttgtagttgaaggagttgattagttagttgattttttatatttatttagttattatggatatcgttatttattatttttggattcgtcgtttttttttttttttttatttttttagtcgtttttttgattagtttttcggagagtatttgttggagtttgattttttttcgacgtttatttttttgagttttttttattttcggttatttttttttttgcgggtatttagttggtttgatattggatttttagaggtgagtttttttatagttaggacgggagagtttttattggaattttttggaaatttttttatttattttttttttttattttgtttaaattattttaggtatatgtgtgtttaaatgtgaagaaaaatgaggaggttgttagtgttttttttttttattatttgtttttatttgatagttttttgtattttatttattatatttttttatgtattgttaagtttatttttcgttttttaatttttttataggatatttttttttggtttggtttatgataatttgtagggaaagagttgtttttaaatttttttgtttattttttttaatattttggatttttgatcgattttattattttaggttttagagttaggagagagttttgttttattttgagttgtttatttttatgggtattttttgtttttttatttttttttttatgattttttgggttttttagggttacgatagggcgttggtttgggtttaattaagttttacgaggaaataatatagggacgtttatttgttttaagagggtggaagaatagggtgaataaataaggttgatagagttgttatagataatattttggtttaaaaatatttaagtgtgagtaaataggagttgagtgggtaagggttttggaaggataagtaggattagtagaatattttagattgggtgggtggaaaattggtaaagagatttgagttagaagaagaggtttttgttttatagataaattataaagttaggtattggagttagagaggtagtagatgttaggtttgtatttatttttgcgattggttttttgggtgatttgtttttttttttgtttttgtaaataaagtttgggtttgattattatgagttttaggtattattgtggtggttttttgaagtagatagttatgtttatttaaaaaggagattttttaagtagagaagagaaggatgaattattcggatagaaagtagttttgtagaataagatagtatttgtgtaattagtatttttgtttttttttttttattttatttttttattttgttatttttaga

SEQ ID NO: 470 - DNA, 6201 bp, Artificial Sequence
  chemically treated genomic DNA (Homo sapiens)
tttagaaatagtaaggtaagggaatgggatgggagaaagagggtaaaaatattgattatataggtgttgttttattttgtagagttgttttttgttcgggtaatttattttttttttttttgtttaaaaaattttttttttaaataaatatagttgtttgttttagggagttattatagtgatatttaaggtttatggtgattagatttaaattttatttatagggatagagaagaagatagattatttaggggattagtcgtaaggatgggtgtaagtttggtatttgttgtttttttgattttaatgtttggttttgtggtttgtttgtgagataaaggtttttttttttggtttaggtttttttgttagttttttatttatttaatttggaatgttttgttggttttgtttgtttttttaaagtttttgtttatttagtttttgtttatttatatttgaatatttttaaattagagtgttatttgtgatagttttgttaattttatttgtttattttgtttttttatttttttaggataaatgggcgtttttatattgttttttcgtagggtttgattggatttaggttagcgttttgtcgtagttttgagaaatttagaaaattatagaagagggaatagaaaggtagaaaatatttatggggatgaatagtttaggatgaggtagggtttttttttggttttgaaatttgagatggtaaaatcggttaagagtttaaggtgttggaagagataagtaaaggagtttgaaggtagttttttttttgtagattgttatgaattaaattagaaaggggtattttgtagagaagttaggggacggaggataaatttgatagtgtatgaaaaaatgtaataaatgggatatagaggattattaaatagaaataggtgatgggggaggaaggtattagtaatttttttatttttttttatatttggatatatatgtgtttaaaatggtttaggtagggtaggaaaggaaaatggatggagaagtttttaggaggttttagtaaggattttttcgttttagttgtggggagatttatttttgagagtttagtgttaaattagttgggtgttcgtaggaaggagggtggtcgaaggtagaagggatttagggaagtagacgtcgggaaaagattagattttaataggtgtttttcgaagaattggttaaagaggcggttgggggagtggaaaggaaagaaggggcggcggatttaggggtggtggatggcgatgtttatggtggttaggtgagtgtgaggggttagttggttggttagtttttttagttgtagttatagttagttttttatatatgtagttttgtgaagtttttggaatggtgatgttaggggttttattattttagtttattagtagtttatggagatttgtgattcgggatttggtaatgtgatatatatttagtatttattgagttaagaaaagagagatataaatacgtttgagtcggttagtgatttgttatggttttgttttattagttttttgtttatatttaatggtatttatttttatttttgttttttgaagttggtatagagttaggaattttaagtaggtacgcggggtggggggaggatgggagtcggcgtagtgtgttttttttttttttttttagttttgaatgttaggggaattaggttagtaattattttgggtttgggtagggattggaatttttttaggttgagttttagggatattaattttttgtgagtttttggaagagagtagtgatggttaatatgttagtattagttatttgtttcgtgttttgggttgatttgggtttaggagaggattttatatttgggtagaaagattttattttttgaaaaaagagtaaatagattttttgtatttttcgttttatgtggtttttagaatattaaatttaggagtgttttaggaattgggtgtatagtgtttgttatcgaagaggagaaaatgaggtgtggaaacgtgtaaatcgtttgtgagggttttagcgaggtttttttatgttttaggtattattagttttttttttttagttcgtttttagttaggatttttagttgtttttttaggttttttgcgatagttgaagagtgtgcgggggaggggattaggggttcgggcggcgttggttatatttttattgtttttatttagggtttttatttttagtttttttttttttaagaggttcggtattattttgggtggtgtcgatttcgtttttattttttatcgagtttggtttttcggtagttggagggtcgcgttgcgtttgtttgggcgtttttagttagttagagttagtattttgtcggttattggtttcgtttttggttcgtcggatttcgttttttgtaggtttagatcgcgttatttggatttagattttttttaattgtcgtttcggattcgttttttaggagtttcgataataattaatttcggtatggattttcgttttaggaattgcgttttttgttaatggtagttcgtttttttttttttaaattttatttttttttagtttcgtttttagtcgcggtttgggggtggggtcggaaggtttgtttattggttggattttcgaatcgtttttaaaattgggcgggattcgttgttttcgtaaggagtttcggggtttcgttttagaaaacgcgttaggtatgttttttaggtcgtttattgattttagcggtttcgtatttgcgagagttaatagttttttcgagggaagtttttaggttttattgtgttgtcggttattattgatttgaggttttgaaagcgttttttttacgttttagttttttttttttatttgtttgttaaggtttggaatttgatttagttattgaggaaatggtttaagttagttttagtgtttgaatgtaaaagtttagaatgttttttcggagtattttttttttagtttttggagtttaaggtgtgtgaaaaaggatattattaattaaagtttaataagattagtttacgtgtttatgggttaattttttatttgttttttttgtattttgtaagagtaggagtaataatggtggggtcgaagatttatttttttgtatattttatttaattttatgtggatagttaagtttagttatttatttatagttaaattaattattaattttaatttaatagtggtaagtaagaggttaggggagaaaatgggacgtttataattttaggggttttggagttttttaagtttaaaacgtggataatatttttgggttgttatttaattttttaaagtagtaggtttttttttataggtgtagtggttaacgatggattgggttttttttttaagcgtttatattagggtttcgtttttgttgttatagcgaggtgtggtttgggggaagcgaagggtcgtatattttgtagcgttttttaaatgtacgtgttttatttttcgggtatggggacggttgtatatttgaatgttagtataatgtaagttgttgtttttcgatatgaggtttggattttttttttgagatttttgttgttgtaatattcgtttatacgtatgttttgttgttttatggttttgcgaggaatggatagtattaagggagatttatggtttggttttgttttttatttttaatgtaggggtaggttaattgatgttttttcgttttgtttttttgagtaaaggatagatagaggaggatagatagagttagtaaattttataggtgattgaaatgtgtttgttgtagtgtaaaagagttgattattgggattttatgttcgagtagttttagagaggggatagagatttgttattatttttgggagattttgttgtagttgttgtggttgcggttttagtgttcgttttgtttggttttttgaggggaagaaatttaatttaagtttatttttttttttttgtttttattgagattgttttttttaaattattattaaattattaacggtaggtttttgtttaatttttttgtttttatttttattttttttatgtttattagtgttaaatttaaattttttagtagggtttataatttggtttttttataatttggttataatattttttatttttattttttattagtttttaataagtttaataagagaatttattgtgtgttaggttttgtgttatgttttgggggtagaaggatgagtaagttgttttttttattttagggggtttatagtttgttaggggagataaataaataaaaataagtaaatatatttataatgtaaggtgggaagtgtttagttatattaattagttattttgaattaggttagttttttttttttttttttatgagttgatttatttgtttaaaatatttttttttttttttgttgatttgtgaattttgtttttatttatttatttagagatagagttttatttttgtttaggttggagtgtagtggcgcgatttcgatttattgtaatttttattttttgggtttaagtaattttcgtgttttggttttttaagtagttggtattataggcgtatattattatgtttagttagtttttttttttttagtagagatggggttttattatgttgattaggttggttttaaatttttgattttaagtgattcgttttattttggttttttaaagtgttgggattatagacgtgaggtattacgtttggttttttgttattatttttttgatatttcgatattagtgtttttttttaatttttttatagtatgagtatatatttattatagtattagtgatgatattataattgtttgtttatatgaatttattttttaaatttgatttttagtttttttagggttgagattatgtgtttttttttttgtgtttttttgtttttttgggatttatataggttttgacgtagaatgtaagtgttgagtaaatatttgttagatgaatgaaagaatgaataattaattttgttattttgaaataatggaaaggataagatttagaggtttagaattagttttgaatgtagtaatttggattttttttggtgtgttgtttttttttatttttttattttttttttatttttttgttttttttaaagattggagttttattgttttttttaatttgttttttttagatttttttttttagttttaaagttatttgtttttttttttttttggaaagttgatgggtagtttttgtaataggaaaaatagattatttatgtgtaagagttttggtttttgttttttttttattattatttgttttgtggtttttttaatattttgatgagttttttttatttttttttaataaagatttattttgagttaggtttagttttaaaatattagttaagggtattatattttttttatatggatggttttggaaggtggagtagtataattgatataattagatttaaaatatagttttaggtaattaggtattatatgttagggatgtatttggtttgagagttattttgggattgtttaataggttaattttagtagagggtgagggaaatttgttaaatgatggaatatttttggatttagagatttttttgttttttttttagtgttttttttttttttggggtttttattaatttgggatttttattttgggagttatggaagttgttataattagggttaattaattatagttttttaaggtttttttttaataagtgatttttttttttgtttttttgtttttgtttttaattaatagagaaagtgagagatgtttaatttttaatattttttagagaattttgtttatagaatagggagtattgaatttggtgagtgatttagttattttgtttttattgtagggtagattttttatatttatttttgagtttttggggtttttaatggcgttcgtgtgtttacgtgattgttaattgtttgatgttagagagataatattgattgaggaaataggttaaatagtttggggtttatttcggatttttttttttgtttttttgttagtatatttttaatttttgttagaattaattttgtttgtttgtttgattttttattttttgggaggtttttttttttgttaatttgagagggcgagagagagaagattgatttt

SEQ ID NO: 471 - DNA, 6478 bp, Artificial Sequence
  chemically treated genomic DNA (Homo sapiens)
agaaattttagtggtttatttttatgtattagtaggatattttttaagaagatgtaatgattagaaatttttattgttgagtaggttttatttagtaagatttattgaattagaaattttgggggttattagtttgttttaagaagttgtttagattgttgggtttttagagattttgatttagtaggttttgttaggtagaaaaaaagtaaagaagttgtttaggtgattttgataaaaattaaagtatgattattattataaatatagtggattattttttatgagttttttagtgttaaatttgggggttttgttaaaatataagtatttttggtttagtttttttattttttatagtatttttatttatttatttatttatttatttatttatttatttatttatttatttatttaattatttatattatttgtgtttagagtgttttaaaagtaaagaataggttagatatggtttagtggtttatgtttgtaattttagtattttggaaggttaaggcggttggattagttgaggttaggagtttaagattagtttggttaatatggtgaaatttcgtttttaataaaaatataaaaattagtcgagtatgatggcgtgtttgtagttttggttatttaggagggtgaggtaggagaatcgtttgaatttaggaggtagaggttgtagtgaatcgagattaaattattgtattttagtttgggcgatagagtaagattttgttttaaaaaaaaaaaaaaaaaaaaaagttaagaataaaaagtttaaatataatttaattttttagttattgatttaaataatatgaaattttgaaagttagtttagttgtaggaatattttttttttgatattgttaatttttttatgttttttataattacggaaaggtaaaatttattttcgaatttttaaaataagtatttgtaattttattagaaataattttatatttgttattatttaggtttttatggagaatgtattgggaatatagaaaaggtataagtaaagagtttggtttttagattttttagttattttggttagtggttagggatgattagtaagatgatagtttttaagcggatgattattggatatataaatataggataattattttttatgtaatgtggatagagtaatatggtgtgttggagagatgtttattattggggtgggggtgttggagaaggttttacggggtttttgatatattaacggtatttgatatgaaaagaaaggggtaaggaggtgggggtggggatttagttatagggaataaaattaataaaagtagtggggtttgaaaggaagaggaacggtcgggtagttaggttttaggaggaaatggatggggtaggcggtggggtgtaggtagtacgttagttttggggtttttgataatatagataggagaatttgaaaggatgtagtttgtaaaacgtatatattgttgttttttgttattgttatttatacggtttttgaaagtagagataatattttagagataagtttttagggacgattattatttatttattttatagatattgattgagtgtttacggcgtgtttggttttgcggtatatttgggtatttgtcggtgacggacgtagttttcgttttgggatttgtagttttcggcgtttaggcgttttttagtagcggtttatttggttttttggcgggggcgggagtgcgggcgttgggattttatacggttttcgtttggttggcggcgttgcggacgcggatatcggcggcggttttcgagtcgttgtggtttagttcgcgggcgtttcgggcgggttgaggagatgagagtgggggaggggacgaggaagaggagtatgagtagttgggttagggagttaggaaagtggtatttgggtcgttttttttatatttgagtcgtgggatttttttggtatttggtaaatttgtatattaaggtttttttttttttcgaggttttgttatttttgatcgagggtttatttggtgttaggtttcgtgttttgaatatatagtagtgtatatgtgttatatgtgtattgtatagacggtaatttattaacgttttcggaagatttaagttttttttaggttagaagaggtaaaaagaaatggaggttaggagggttatttaggtttttaattataggttgtttgttttataaattcggttttttttattgaatgatatttttttgtttagatttgttttggatgtagatatgttatttgtatttattttttttattttttttttattttatttttgtttttagtattgttttttattttattttgtatttttgtttggtttagttatagttttatatttgtttgtttgatgattgtgttaatgtttattttataatgtattttatgtatttttttttgtaaattattttatttttatgagggtaaggatttttattttttttattaattgttttattattagtgtttatagtagtgtggtggatataggaagtatttaattaatttttgttgaatgattgtttttttattgattgtaagttttatatcggtagtaattgtagtttttaattatttttaaattgtaagtgtttgatatttagtaggtatttaatatatattggttgaatgagtgtatgaatatattgtttattttatttttatttttttatttatttttattttattattttaatttgtaggataaaaatgtgtatttttgaggatttttatttttaagttttttttttattttttgtaattatttttttatttttttgatttttttaattttattttttatgtttttataattatgtttttgtttttattttttttttattttttattattttttagaaagttttttattttttttagtttggaatatttttaagtaatatgtttttgtagataagagaattttagtttaagttatattggatttaaaatagttttttatgaattatttatgattatttgttttttggttttatattgttttttttgaagaggattgaggatattgtattatttgaaattatggttattgtttataatttttttaataaatatttatgatatatgttttatgttttagatattgtgttagatgttgggataagatatgtaaagtttgagttttttaaggtgtgtatgatataaaatagaataattacgggaaatgttgagaaatgttttggtttggatttagttatttttaatataagaaattaagagaatgagataggatttgatttttttgtttattgtaataagttttagtataggtataggttgataatggatgtaggtatggggttagaatgttttgtttatttatatttattttgtttggtttttataaatgattttgttagtcgggaatgtagggtaggaattttttcgtagaagttggaattgaggtttaggaaaggttagttgatttgtttaaattcgatgagatttttgttttattttttttattcgaagaggtttgagttaaatgtttaaaattttttttattgatggttttttaggataggagttagttttaaatttttagtgtaacggttttttaaatgttttttaaagggagatattagagatttttttgaattagaattatttaagatgtattataaaaatgtatgtttttgattaagattttttttgatttatttaattagattttttgtgagttttgggaatttgtattttaaatttttagggtgatttttttgtatgtaagtttaattgggagagttttaatgtaaagtttcggtttgtttttgtttttgtttttgtttttgagacggagtttttttttgacgttaggttggagtgtagtggcgcgattttagtttattgtaattttcgttttttggatttatgtaatttttttgttttagtttttcgagaagttgggattatagggtcgtgttattacgtttagttaatttttgtattttttttagtagagacgaggttttattatgttggttaggatggtttttatcgtttgatttcgtgatttattcgtttcggttttttaaagtgttgggataataggtgtgagttattgagtttagtttttggaaagttttagttttgatgtagggttaatatttgtttttgggatatatttcgttagtattttaaagagtaatttatatgtttttgagtagatgggaatgtaatagttttttggtcggaatttgttttttttttttttttttttttttgagacggagtttcgtttttgttgtttaggttggagtgtaatggtacgatttcggtttatcgtaatttcgtttttcgggtttaagcgatttttttgttttagtttttcgaatagttaagattttaggtgcgcgttattacgttcggttaattttgtatttttagtagagacggggtttttttatgttggttaggttggtttcgaattttcgattttaggtgattcgttcgtttcggttttttaaagtgttgggattataggcgtgagttattacgttcggttatttgttttttttttatgtaagtgttttttggaatttgggggtttaggtgagtaggtgttttgttgttggtaattattcgtagttaaagattttttgatttttttttcgatacgttatttgttagtgtcgttttttattatagagttaggtatttgtttcgtcggttacggtgaggcgcgcgaggcgtgtgttgttagtttttttttttttttttcggttcgttttcgcgtttttaaggagatagtttttgggagtttttgtttttggtttttagttattgtttttttttcgcgagaattgttttttttattttttttttttacgaagtttcgttcgcggagaggttttatattgggtaaaatttcggttttcggagagtttcgggagttgttttcgcgagagtattgcgggaggttttcgtttgttggtttttggaatcgcgattattggagttttagcgggcgtagtagttggaacgggagtattgcgacgtagttcggagtcggttttgtaggggcgaaggtgtagggagatcgcggcgggcgtagttttgagcgtcggagcgcgtttttgtttttagcggggtttgttttagtcgtaggggtatatttagtcgttgcggttgatagtagtcgcgcgcgcgggagtttgcggggtcgcggtagtcgtatttgcgcgggcgattagcgtaaggttttcgttcggttgggcgggtagtaagggtcggggagagggtgcgggtgtaggcgggggttttatagggttatttttttgttcggcggttgtcgttggaaaatgttttaggagaggtttacgttttatcggtaggagttgaataagataatttgggaggtgttcgagcgttattagaatttgtttttagtgggttttggcgtttatggttttgtgtggtgagtgtcgttgggtttggggtcgttgtgggtagggtggtttttcgcgttcgagggttaggtttgttttattgtttagcgttgcgttaagtggtaggaatttttttcgggggagggtattgttgttttttcgagttttgttcgttttgtatttttagtatttttcgttttgtatttacgtaggtatgcggtttatcgtgtgtagtatttaggttcgttgcgagaggtaggtggtggtgttggagttcggttttggttagtattttgcgtttttttttttcggagggttgttgttcggtaataggtatcgggggaagggtcgtttttttgggggtttttttgtttatttggagtagaaggattttttttcgtgatgcgtttacgttggggtttcggattttgggttttttgagtagataagttcggggaattgtcgggagaagtagaagggtatagtttaattcgaagattgcggttatttgaataaaattgattaggaagggagtttttttcgggttttttttttttttttttttttttaaaattttgtcgaaattttattttgaaaagcgttttttttgaattcgtatttgaattaatagcgatttatagagtttaaaatatcgattttatttcggtgagtattgtgttagtttgagtggtgtgttttcgattcggttgaaagcgtatttttttttcgtggaggggcggcggtggtagtgtttgtaagaatattgtagtttgagaaattggtaggtttattgattagttatatattattgtttatttaagtattgttcgataaaataatttttttatttggagtaagaaagatttagatttgtaaggcgtttttaagattaaaaagttattaatagtgttgggaggtattgtaaatattttttgagataatttttgcgaatattgtgttttaaaagttttttagagagtttgtagggagttatttagttatttgtatttatggtttgaggtatacgat

SEQ ID NO: 472 - DNA, 6478 bp, Artificial Sequence
  chemically treated genomic DNA (Homo sapiens)
atcgtgtattttaggttataaatgtagataattagataattttttgtaagttttttaagggatttttaaaatatagtattcgtaggaattattttaaaaaatatttataatattttttagtattgttaataattttttgattttgagggcgttttatagatttgaattttttttgttttaaatgagaaaattgttttgtcgaataatatttaaatgagtagtggtatgtgattaattagtgagtttgttagttttttaagttgtagtgtttttgtaggtattattatcgtcgtttttttacggaaaggaaatacgtttttaatcgaatcggaaatatattatttaagttggtatagtgtttatcgagataaagtcggtattttaagttttatggatcgttgttaatttaagtgcgaatttaaaaagaacgttttttaagatgggatttcgatagagttttgaaaaaaaaaaaaaaaaaaaaaggttcggagagagttttttttttggttagttttgtttagatgatcgtagttttcgggttgggttgtgtttttttgtttttttcggtagtttttcgagtttgtttgtttagaggatttagggttcggagttttagcgtgggcgtattacgggagagggtttttttgttttaggtaggtagggagatttttaaggaagcggtttttttttcggtgtttgttgtcgagtagtaatttttcgagaggggaaggcgtagggtgttagttagaatcgagttttagtattattatttatttttcgtagcggatttgagtgttgtatacggtggatcgtatatttgcgtgagtgtagggcgaggggtgttggaggtgtagaacgggtagagttcgaaggggtagtaatgttttttttcgaggaaaatttttgttatttgacgtaacgttgagtagtggagtaggtttggttttcgggcgcgaggggttattttgtttatagcggttttaggtttagcgatatttattatatagagttataggcgttagagtttattggagataggttttggtaacgttcgggtattttttagattgttttgtttagtttttgtcggtagaacgtgggttttttttgagatattttttagcggtagtcgtcgggtaagaaggtggttttgtggggttttcgtttgtattcgtatttttttttcggtttttgttgttcgtttagtcgggcggggattttgcgttggtcgttcgcgtaggtgcggttgtcgcgatttcgtagattttcgcgcgcgcggttgttgttagtcgtagcggttggatgtgtttttgcgattggggtaagtttcgttaagggtagggacgcgtttcggcgtttaagattgcgttcgtcgcgatttttttgtattttcgtttttataaggtcgatttcgggttgcgtcgtagtattttcgttttagttgttgcgttcgttaaggttttagtggtcgcggttttaagagttagtaaacgggagtttttcgtagtattttcgcgagaatagttttcgggatttttcgagagtcgagattttatttaatatggaattttttcgcgggcggggtttcgtgagagaagaggatgggaggagtagttttcgcgagaagagaataataattggagattaaaggtagaaatttttagggattgtttttttaagggcgcgaaggcggatcggggaaggaagagagaagttggtagtatacgtttcgcgcgttttatcgtggtcggcggggtaaatatttggttttgtggtggaaaacgatattgataaatagcgtgtcggggaaagagttaaaagatttttaattgcgagtagttattagtagtagagtatttgtttatttgaatttttaaattttaaaaaatatttgtataaaaaagagataagtggtcgggcgtggtggtttacgtttgtaattttagtattttgggaggtcgaggcgggcggattatttgaggtcgggagttcgagattagtttgattaatatggagaaatttcgtttttattaaaaatgtaaaattaatcgggcgtagtggcgcgtatttggagttttagttattcgggaggttgaggtaggagaatcgtttgaattcgggaggcggagttgcggtgagtcgagatcgtgttattatattttagtttgggtaataagagcgaaatttcgttttaaaagaaagaaagaaagaaagagataggtttcggttagaaggttgttgtatttttatttgtttaaggatatatgggttattttttgagatgttgacgaaatatgttttaaaggtaaatgttaattttgtattaaagttgaggttttttaggggttgggtttagtggtttatatttgttattttagtattttgggaggtcgaggcgggtggattacgaggttaagcgatagagattattttggttaatatggtgaaatttcgtttttattaaaaaaaatataaaaattagttgggcgtggtggtacgattttgtagttttagtttttcgggaggttgaggtaggagaattgtatgaatttaggaggcggaggttgtagtgagttaaaatcgcgttattgtattttagtttggcgttagagggagatttcgttttaaaaataaaaataaaaataaaaataaatcgaagttttatattaaaatttttttagttaaatttatatgtagaaaaattattttgggagtttaagatgtaagtttttagaatttatagggagtttaattgggtaggttagaggaggttttgattaagagtatgtatttttataatatattttaggtgattttgatttaggaaagtttttgatatttttttttgagaagtatttaaaaaatcgttatattgaagatttgaaattgatttttattttgaagagttattagtgaagaggattttaagtatttaatttaggttttttcgagtaaggagaatagggtaggagttttatcgaatttaggtaagttaattgattttttttgaattttagttttagtttttacgagagaatttttgttttgtattttcgattaatagagttatttgtaaaaattaaataagataaatgtgaatgggtaaggtattttaattttatgtttatatttattattaatttatgtttatgttaaagtttgttataatgagtagaagaattagattttgttttatttttttagttttttgtattagaaataattagatttaagttaggatattttttaatatttttcgtgattattttattttgtgttatatatattttggagggtttagattttgtatattttgttttaatatttagtataatgtttagaatataaaatatgtgttataaatatttgttgaaaaaattatgaatagtgattatgattttaagtggtatagtatttttagttttttttaaggaaagtaatataaaattaaaaaatagatagttatgggtgatttatggaaagttgttttggatttaatgtagtttaggttggaatttttttatttataaaaatatgttgtttgagaatgttttaaattagggaggataggaagttttttaagaagtaatggagggtgaaggggaagtaagagtaaaaatatgattgtgaagatatgagggatggggttggggggattaagggaatgagggaatggttataaagggtgaggaggaagtttggaagtaggaatttttagaaatgtatatttttattttataaattgggatgatgaggtgagggtgaatgaaagggtaaagataaagtaagtagtatatttatatatttatttaattaatgtgtattaaatgtttattaggtgttaaatatttgtagtttaaaagtgattaaaaattatagttgttgtcggtgtggagtttataattaatgggagggtaattatttaataaaaattaattgaatattttttatgtttattatattgttgtaggtattgataataaaatagttaatgaaagggataaaagtttttgtttttataggggtaagatgatttataaaaaggaatatataaagtgtattataaggtagatattaatatagttattaaataaataagtgtaaaattgtaattgggttaagtaggaatataaggtggagtgagagatagtgttagggatagggatagggtgggaggagggtaaagggagtgagtgtagatggtatgtttgtatttagagtagatttgggtaggagggtgttatttagtggggagagtcgggtttgtggggtagatagtttatggttggagatttgggtgatttttttagtttttatttttttttattttttttgatttgaggaaggtttaagtttttcggagacgttagtgaattatcgtttgtgtagtatatatgtgatatatgtgtattgttgtatgtttaggatacgaggtttggtattaaataggttttcgattaagaatagtaaaatttcggagagagaaggagttttggtatataggtttattaaatattaaggggattttacgatttaggtatgaggagggcgatttaggtattatttttttggttttttagtttagttgtttatgtttttttttttcgtttttttttttatttttatttttttagttcgttcggaacgttcgcgggttaggttataacggttcgggaatcgtcgtcggtattcgcgttcgtagcgtcgttagttaggcgagagtcgtgtgggattttagcgttcgtattttcgttttcgttaaggagttaggtgagtcgttgttgggagacgtttgggcgtcgggggttgtaggttttagggcgggggttgcgttcgttatcggtaggtatttaggtatgtcgtagagttaggtacgtcgtgggtatttagttagtatttgtggaatgaatgaatgatggtcgtttttgggagtttatttttgaggtattgtttttatttttaaaggtcgtgtggatggtaatgataagagataatagtgtgtgcgttttgtaagttgtatttttttaaatttttttgtttatattgttaaaagttttagaattgacgtgttatttgtattttatcgtttattttatttatttttttttgaggtttgattgttcggtcgttttttttttttttagattttattgtttttgttaattttgttttttgtgattgaatttttatttttatttttttgtttttttttttttatgttaaatgtcgttgatgtgttaggggtttcgtgaagttttttttagtatttttattttaataatgagtatttttttaatatattatgttattttatttatattgtatggaaggtggttgttttatgtttatgtgtttaatggttattcgtttaaggattgttattttattagttatttttagttattagttagagtgattaaaggatttaaaggttaggttttttgtttatattttttttgtatttttaatatattttttataaaaatttaggtagtaataggtgtagggttgtttttgatggaattataaatgtttattttgaaaattcggaagtaaattttgttttttcgtgattatagaaaatataagaaagttaataatattagggggaagatatttttgtaattaaattagtttttaagattttatattatttgggttaatagttaaaaaattggattgtatttaaattttttatttttgatttttttttttttttttttttttgagatagagttttgttttgtcgtttaggttggaatgtagtggtttgatttcggtttattgtaatttttgttttttaggtttaagcgatttttttgttttatttttttgagtagttaggattataggtacgttattatgttcggttaatttttgtatttttattagagacggggttttattatgttggttaggttggttttgaatttttgattttagttgatttaatcgttttggttttttaaagtgttgggattataggtatgagttattgagttatgtttggtttattttttatttttaaagtattttgaatatagataatgtaaataattagataaatggatggatggatggatggatggatggatggatggatggatggataagggtattatggagggtgaaagagttaggttaaaagtgtttgtattttaatagggtttttaaatttagtattgaaaggtttatgaaagataatttattatatttatagtggtagttatattttaatttttattagaattatttggatagtttttttgttttttttttatttagtaagatttattgaattagaatttttgggggtttagtagtttggatagttttttaaaatagattgatggtttttagagtttttgatttagtaggttttgttaagtggggtttatttaatagtaggagtttttggttattgtatttttttgggaagtgttttgttagtatatgaaaatgagttattaggattttt

SEQ ID NO: 473 - DNA, 8342 bp, Artificial Sequence
  chemically treated genomic DNA (Homo sapiens)
gttttttttatttttgtttattttggtttttatatagagtatttaagtattattttggattttttagttggtattgggtaaattaataagagaattaagataaagtataattttaaattatgtaagtggaatagaggagtttgtttttttggttgtatttaggatttgattttttttaatttttaattttttttttattttaggtttttgattttttttaagtgatttttgaagttaagttattttgggtttttggggtattggaatatttttttattgttttatttattgttttttgatgtgtgtgtttttggtagtttgtgaggagggaggttatgtaatttaacgaagtgtgggtaagtataggttaggtatgtagtaggtattaaaaatgtttattgtattaatagatgattatagatagtgtaggtttttattttttgtttttaggtaattttttgtttcgtttattttgaagttatatagggttaggataggaagtgggtttgttgtgatgtttgtgtattagttgatatattatttttttcgtgatttttttttttcgatgaaggttggaaatttttattttagaagggtttttagttgagggattgtgattttagggaggtagagagggtatttgggaagttagaatttattgtggataaatgtttgttagtttttgggttagattttttagttttgaggagtttatgagagtaatttaagaattagttttgttgaggtttaggagatagtgtcgggtttggttgtggcgggaagtttcgggagaggaaagtggataggttgttgatatagttttgtattgtagtagtgtttgttttttaggggtgatataagttttgaagttattatgtatttttgtggttttgggataagggggatagttgatttttttttagttataggatggggtggtttcgataaatattaatagttttaaagtattaaagattggtttttggtagtttgttaaatataaaggttttatagtagttttaggaagttggtaggaagttgttatttttatttaattgataagggtatttagtttaaaatttttttttgttggttgttttattattttttacgttgttttttattttgaaagtgggagaagatatgattgaaagggtaggttgtagtgtaaatgattataggtgcgtggttgggagatgggatgttttggttttgacgttttgtttttaaatttggttagttaggagttttatattttggttttttttgtagtattgggataagaaagtagtattttttttgtagttttagtttttaaggtagttgttgtttatttttagtttattttttaaagagttatagagttatttaggtggaagaaagagagaaaggtgggaaggaaggagaaaaggaagggagaaaggaagagagaaggaatagtaaaaagaaagaaaaggaaagagaaagaaatgaagaatgaaagggagaataaaagaaagaaaaggaaagtaggaaagaaaaaagaagaaagggagggggaagggaggaatgtatgaataaggggagaaagaaagaaaaaagaaaagaaagagaaaggaagaaagtaagttttttatgatagaaggttattttttagaaaagattttaaggggaaattggttgttaaatagttttaaggaaatgatatttggataattagtaaatgagggtttttttttattttttgttatttatttttatttttttttgtttaattttttttttttttttagtggtttatttttttggtaaatagtattttttttatgtttttttttatttttttttggggttagttgagtattgtttttttgatgatgttacgttaggaaattattaaaattttaaattttagttgtttttaatttttttatatttgttttagaatttggtttgggatatgattttattggtagtagggaggttagtagttaagttgtttagggtaagtatgtagagttgagtttttttattttaggatttattttggaggttttgatttttaattttttatttatgtgtgattttggaggaggaggtttatgttgtttgggtttttatttttttatttgaggtaatatgggatggaaaatttatttttgtggtattagtattttttgtcgatggatgggtataaatagtttgtatggatgtgaagagttaagatattacgtgtagacggatattattttgttggtttggttttaagattgtaggtagaatttgttagttataagttttttagttagttaggtagacgtagtggggttggggggtttgcggagggtggagagaagaatattagttttagggtaggagtaagtggaggagatttaggtgagttattttaggttagttattagtttttttagttttaatttttttgtgtttggtgataaaaagtgtttatattaagtagatttataatttttttttttaaggtaatagagaagagatagttgtaagttttattgtggagttacggttattaaggattttgtttatttttttgtaatttcgtgaaggtagagttttttagagttttatagtttatatgtttaaagagtttttataattgaatttttattttgtgttgtgtatggttttagggatttttatatgttagtttatttgattttatgattatttttttggggaaagttttaaaattgttattgtataaatgaggaaagagaggtttaaaaggttaaggggttatatagtaaagttatatagtaaatgaatggtagagttgggattaaaatttggttttgggatttttaagtttattgtattattgtggtgttattgttttagaatttatgtgagtgaatagataataataataatagtatttattgtttttaggttttgtgttaaatattttataggttttattttatttaatatttataatattttggttagagagagaaattaatatttttattttatagatatgggaattgagagaagtttgtttaatgttatatagtaaatgatttggtagagttattaaggttaaattatttgtaagtagtggagttaggtttaaattagggtatgtaaagaattttagtgcggggaatgaggattttaggttttgtattaacgtggagaatgattacgtttttttagaagttgagtaaagtttaaatgttagttttagtgaatttgggttagggttgggttggtgaaggaaggagtaagtaaaattggattttttttttaataagtttgttggtttattttttttaggttattttttttaattttttattagttttaagaattgtggtgttaatatgttatttgaaattattattgtatagtgattatgttattgttgtatttttagggtttagtacggtgtttagtatttggtagtatatatttgttaaaagaataaagtattttttaatggtattatttaatttagttattattaatttggtatttattatgtgttaggtattattgatttagaggtgattgagtatgggtgttatttggaagaagtttcggtttagggtggggatagaatgtaattatcggtattattttaaatatttcgaaaagtattgtggagaatgaatggatggtaaatgatttattagagttagtattgaggaatgagttaagtttaatgggaatataggaaaaggattttttgttttgttaggagagttatagaaggttttgttggtggaggatgagatgtaattttagtttgaaatgatgaggagtttgtttttagttatgtggagaaaggagtattttaggtagagggattagtttgagtaaaggtattcgggtgtaaaattattgtttaggattggagtgaaggatatgtagcgttattgataagagatttttttttaagagtaggttatatattttttattttttagggggtggaaacgggtaattttatagaggaattgaattataatgaattgaagaaagaaaaattttttgaagttggtattataattaataggtttaggtttattttattagtttttatttagatttatttttatgtagaaataaaacgtgattaattattttagtaagtgtaatttttaaaaatatttagggaaatttagggtttaggtgtaggatttttttaatttgagttggattttgtttttaggagagagtatgggtattagttagtatttttattatttaagggttaggtgttttgaagtgtttgttggtatttagggaagagttttttagtttgttgttataggatatagttgttttttttttggttaggtagttggttttttttttagaatgggatttgaagttggtcgggttgtttgggggttgtagaggaagaagggggttgtcggtaaatttgttgatttaggttttacgagggagtaagtaatattggatttttttcggtatttcgagaatggggtgggggcgtttttaaaggatttttttttttttttagtgtttgtttttgttttcggttcgttttttgttaagatttggggatttttaggtttggagggaaagttttttgggacgattatagagcgttagtattgaattagtttggagagcgcggaaggaaagggtcggttcgtagagggcgcggggaaggtagggtggggacgcggtggagttcgcgttcgtttgttgaaggtttggaagtgtagcgtagaagatagagggtgattaggaagacgcgcgagcggggttggtcggtcggcgggtgggggaggggaggcgggggaaggcggttgagtgggtttttggagtgtgtgtgtttgtgttagtgtgtgtgtgtgtgtgtgtatgtgtgtgtttggcgtttggttagggtgattttttataaattatatgttttttagtttttttttaaaaggttgtgtcgagggttggttagtgaggttcggttcggggaaagtgaaagtttgtttgggttttttcggcgttagagtcgtttttcgtattttaggatagcggtgcggttttcggtcggggcgtttatttcgtagtagttagcgagcgagcgagcgagcgagggcggtcgacgcgttcggtcgggatttagttgttcgtatgatcgcgtcgggcgtcgtcgggcgttgtttttttacggtaagcgacggtcgcggcgttgggttcgggacgggttggggcgggggttcggcggttaggcggtcgggagcggtttttcggagtcgatagtttgggcgcgtcggttgtattggttcggcgttttcgtcgcggacgaatcgtttttgcgtacggattgggttttggcgttagggcggaggtcggtggcggttttgtagttgtatcgggattgttaggtttttttgggaaacggagggttgtttattttattgtacggaggggaatattgagttatttgtaggtaggagttttcgtttagttagggtgttttgtttttttttttattcgttattattaaggtacgggcggagtgggttgtgcgttgagtgtgtgtttttttcggtgggtattttttttatcggttatatacgtgtttttaaggttttgttgaggagtgggcgtttttgggtaggggaaagtttagggggttaattagtttatagaacgttagggatttgttggtagagggacggagaggggtaagttattgtttgttttagtttataggtaggagttacggaggatttgggtggttgtttggggggtggggtgggggacgtttatttttcggggttgtttggggttagtttagaattttttttttttgtaaattttggttttatcggttggggagattttgggttttgtggtggtttatggtggtttgtagtgtttgaggaaaatggaaagagggtttggtgttgtagagttgtgtttaggggtagggtttgtttttgattgcgtaagggacgttttgttttaattgtggcggtagtagatgtagttatagaaagtgagggtggtattgtttatgattagttagtgggtttataatagatttgtttttgaggagttttggaagaaaatgagaggggaaatttggggggaaaagagtagaaaattatttgggggtagaggagagcgggttgtaggtgaggtgagagagaaagggaagagtgggtttatagaaagaaagtgttttattgagagagaggagatagagttgagaggggaagggagaagggttagttataggtagaaagtaaagtttcggggttgaaggggagattatgaggaaagaagagaaagataagggggttgtgtttagataggggaagtttaagggttcggttttgttaggtttttttagaggttttgttgagggggaagatgaaatggaataggataggtggtagaggaggttggatagttggattgaggtgttttagtatttttgagtttgtagtagagattttttttgagggttgttttttaggtagaagttagggttaggggtgggaggaagaggtagttagaggagagtttgtttagttagatgtaagttagagtgttaattttttattgtttgtttagatttttttgaggtagaatggaggttttaggtttaggggtattttttttggttagtttcgaagttagttttttatgtagtggttgtattttttttatattgatgttttaaatgttattaaagttagatagtttttggggttaagtattgtttttattttgtttttttttagggaggttgtttttttgagtagttttttttatttatattatttattttagattttgagtggtagttagtttggggtagatatatcgtttagtggtttagttttttttaattatttttgaatttaaagtttttgagtatttgggttattatttttatttagggtaatttttttaatagagtttgaagtttttttagttttcgtgattgtcgttttttttttttatatttttttttttttagattagttaggatttttatagtttttgtgttgagtggtatgaaattattttttggtttttttttttatggtttttattttttttttgttattattttttttttattttttaaggttttattgaggtttttgttttttgtagtttttttggttatttagttagagttgtttttttttttttagaagagttggtaagtatttgggtttttggtgatatgtagattagtatattgttgtgggttgttttatagtttcgttgtgtttttttagtgagtaatttatttgtagtatttgttttaatatttggattattgaggtaaaatttagagtttaggatagtgttaatttttattttattttgttagtatttttttgaatttgggggtattagtcgttaggaggtttgggagtttttaggaggtgattttaagttggagaaagaaagtttaagagtttgtttgtttttggttgaagaaggagagatttagggttaggggtagggatgaggagattttagtgaagagaaggaagagaggaaggaaggggaaagatagggtattaggagttagttttattattttggggttgagtaattattgggttaggtaggtgttgggagagaagaggggttttagaaaatttttttgttatgataagaggtggttggttggaggtaaagtttgatggtgtttaaataggtaggtgttaggtaagggatggtttattattggtattggtgtttttgattaattagttgggttttttttgaaatatatatttagggttttaagatgtttttggtaagggatgagttttagtgaaattgagtttgattttatagtttttttagtggtagagttagatttgtatggaattaggtgggaggaaatgttgggtttaggggagttgtttttggtttgttatttgaaagtcggtgtatgaatatgaatttgagggtagtttaaaaagtgtttggtttagtgttgatgttgtagagatagaaaaaaatgggtagatgtaagttttgttttcgagttttttgtgttattaaaatttaggttggtaggtatattatttgtgttagtattagtttaatgtatagttaggtttggttggtttaatttgggaaggttttttgtagaaggtgatatttgggttgtttttatgggagaataaggttgtgttgtggttgttagaaattttgggaaagttggatttgagggatgttgtattttgaggtaaggggtagagtttgtagtattgtagatatgaggtttttgtttttttgcgttgagtagggtatggggataattggggagagtgagatttggggagaaatgatattttttttgttataga

SEQ ID NO: 474 - DNA, 8342 bp, Artificial Sequence
  chemically treated genomic DNA (Homo sapiens)
tttgtgatagagagggtgttatttttttttaggttttattttttttagttatttttatgttttgtttaacgtagaaaaataaaggttttatatttataatgttataggttttgttttttattttaggatatagtattttttaaatttagtttttttaggatttttagtagttatagtataattttgtttttttatgaaaataatttagatgttattttttataagaagtttttttagattaagttagttaaatttaattatatattgaattaatattgatatagatggtgtgtttattagtttaaattttaatgatataggaaattcgagagtaggatttgtatttatttatttttttttgtttttgtaatattaatattgagttaagtattttttgaattgtttttaagtttatgtttatgtatcggtttttagatggtaagttagagatagtttttttgggtttagtatttttttttatttggttttatgtagatttggttttgttattggaaaaattgtgggattaaatttagttttattggaatttattttttgttagagatattttggagttttgggtgtgtgttttaaaaggagtttagttgattaattagaggtattagtgttagtaatgggttattttttgtttggtatttgtttatttgagtattattaggttttgtttttagttagttattttttattatggtagagaagttttttgagatttttttttttttttagtatttatttggtttagtagttgtttagttttagagtgatgggattggtttttgatgttttgtttttttttttttttttttttttttttttttttattggggtttttttatttttatttttggttttaggtttttttttttttagttaaaagtagatagatttttgggttttttttttttagtttgaggttattttttgagagtttttaagttttttggcggttgatgtttttagatttagggaaatgttggtagggtagggtgaaggttgatattattttggattttgggttttgttttaataatttagatgttgagataaatattgtaaataagttgtttattggaaaaatataacgaggttatgaaatagtttataataatgtgttaatttatatattattaaaagtttaaatgtttgttagtttttttggggaggagaaggtagttttggttgggtgattagggagattgtagagagtagggattttagtgaggttttgaaagatggggagaaggtgatggtaggagaggggtgggagttatggaaggaagagttaaaggatagttttatattatttagtatagggattgtgaggattttggttgatttgagggagggaaagtgtggaagagggggacggtagttacgggggttggggggattttaggttttgttggggaggttgttttgggtgggaataatggtttaggtatttagaaattttaggtttaggaatgattggaggaaattgggttattagacggtgtatttattttagattggttgttatttaaggtttggagtgaatggtatggatgaaagggattgtttaggaagataatttttttggaggagagtaaggtgggagtaatgtttaattttaagggttgtttggttttgatgatatttgaggtattagtgtggggaaagtgtagttattatatgagaggttgatttcgaagttggttaaaggggatatttttggatttggggtttttattttgttttaggaggatttggatagatagtggggggttaatattttggtttgtatttggttgggtaggtttttttttgattgttttttttttttatttttagttttggtttttgtttggggagtagtttttagaaggaatttttgttgtaggtttagagatgttaggatattttagtttagttgtttagttttttttgttatttattttattttattttatttttttttttaataaggtttttggagagatttggtagaatcgggtttttggattttttttgtttaaatatagtttttttgttttttttttttttttttatggttttttttttagtttcgaagttttgttttttgtttatggttaattttttttttttttttttttaattttatttttttttttttagtgaggtattttttttttgtggatttattttttttttttttttttattttatttgtagttcgtttttttttatttttaaataattttttgtttttttttttttaggtttttttttttatttttttttaggattttttagaagtaaatttattatgagtttattgattggttatgaatagtgttatttttattttttatggttgtatttgttatcgttatagttggggtagggcgttttttacgtagttaggagtagattttgtttttggatatagttttgtaatattaaattttttttttattttttttaagtattgtaaattattataaattattataaagtttagaatttttttaatcgatgaaattagaatttgtaagaaaaagagattttgagttagttttaagtagtttcggggggtgggcgttttttattttattttttaaatagttatttaagtttttcgtagtttttgtttgtgggttggaataagtagtggtttgttttttttcgtttttttgttagtaagtttttggcgttttataagttggttgattttttgaatttttttttgtttagaagcgtttattttttagtagggttttggaagtacgtgtgtggtcgatgaggaaggtgtttatcggggagggtatatatttagcgtatagtttatttcgttcgtgttttggtggtggcgggtagggagagaggtagggtattttggttgagcgggggtttttgtttgtaggtggtttagtgttttttttcgtgtaatggggtgagtagtttttcgttttttagggaagtttggtagtttcggtgtagttgtagggtcgttatcggttttcgttttggcgttagggtttagttcgtgcgtaaaggcggttcgttcgcggcgggaacgtcgggttagtgtagtcggcgcgtttaggttgtcggtttcgaggggtcgttttcggtcgtttggtcgtcgagttttcgttttagttcgtttcgggtttagcgtcgcggtcgtcgtttatcgtgggagggtagcgttcggcggcgttcggcgcggttatacgggtagttgggtttcggtcgggcgcgtcggtcgttttcgttcgttcgttcgttcgttggttgttgcggagtgggcgtttcggtcgagggtcgtatcgttgttttgggatgcggagagcggttttggcgtcgagaggatttaggtaaatttttatttttttcgggtcgagttttattggttagttttcggtatagttttttaagagaggattggggggtatgtggtttatgggaaattattttggttaggcgttagatatatatatatatatatatatatatatattgatatagatatatatattttagaggtttatttagtcgttttttttcgtttttttttttttattcgtcggtcggttagtttcgttcgcgcgtttttttagttattttttgttttttgcgttgtatttttaagtttttagtaaacgagcgcgggttttatcgcgtttttattttgtttttttcgcgttttttgcggatcgatttttttttttcgcgttttttaggttgatttagtgttagcgttttatgatcgttttaagggattttttttttaggtttgaaaatttttaaattttagtagaaaacggatcgagagtagggataagtattgggaagggagggaaattttttgaagacgtttttattttattttcggagtgtcgaaaggagtttagtgttatttgttttttcgtggagtttgagttagtaggtttgtcggtagtttttttttttttttgtagtttttaagtagttcggttagttttaagttttattttgggagggaggttagttatttggttaggaagggagtagttgtgttttgtgatagtaagttggggggtttttttttgggtgttagtagatattttaaggtatttgatttttagatgatgaaaatgttggttggtatttatgtttttttttggaggtaaaatttaatttagattggaaaggttttgtatttggattttagatttttttggatgtttttggaaattgtatttattgaggtgattaattacgttttgtttttatatgagaatgagtttaagtgaggattagtaggatgagtttaagtttattaattataatgttaattttaggagatttttttttttttaatttattatgatttaatttttttgtgaggttgttcgtttttattttttgggaaataaaggatatgtggtttgtttttgaagaggagttttttgttagtagcgttatatattttttattttaattttaggtaataattttatattcgaatgtttttgtttagattggtttttttgtttggaatgtttttttttttatatggttgaagataaattttttattattttaggttgaaattgtattttattttttattagtaaagttttttgtgatttttttggtagagtaaagggttttttttttgtgtttttattggatttggtttattttttaatgttggttttgataagttatttgttatttatttattttttatagtatttttcgaagtgtttaaggtggtatcgatggttatattttgtttttattttagatcgagattttttttaggtggtatttatgtttagttatttttggattaatggtatttagtatataataggtattaagttaatgatggttgagttgaatgatgttattagagaatattttgtttttttgataaatatgtgttattagatgttaggtatcgtgttgggttttggggatataataatgatatggttattgtataataatgattttagataatatgttgatattatagtttttaagattgataaaaggttagaggaagtaatttgagaaagataaattaatagatttgttgagaaaggggtttagttttatttgtttttttttttattaatttagttttggtttaggtttattgaggttggtatttggattttgtttagtttttggaggaacgtaattattttttacgttggtgtaaggtttgaggtttttatttttcgtattggagttttttatatattttggtttgaatttgattttattatttataagtgatttgattttggtagttttgttaagttatttgttgtgtgatattggataaattttttttagtttttatgtttataaaatagagatgttaatttttttttttgattaaggtgttatgagtattgaatgagataaggtttgtgaagtatttagtatagggtttgaagatagtaagtgttattgttattattatttgtttatttatatgggttttaaagtaatgatattataatggtgtagtggatttgggagttttaaggttagattttagttttagttttgttatttatttgttgtgtaattttgttgtgtaattttttagttttttgggtttttttttttttatttgtatagtggtaattttaagattttttttaaaggagtggttatgaggttaaatgggttgatatatgggagtttttagggttatgtataatatagagtaggggtttagttatgaaagttttttggatatgtagattgtggggttttgggaggttttgtttttacggagttgtagagggatgagtaaggtttttgataatcgtgattttatagtgggatttgtagttgttttttttttgttattttaaaaggagggattgtggatttgtttgatgtggatattttttgttattagatatagggaaattgaggttggaaaagttgatggttagtttgaagtgatttatttgagttttttttatttgtttttgttttggagttgatgtttttttttttatttttcgtaagttttttagttttattgcgtttgtttggttggttgggagatttgtggttggtaggttttgtttgtagttttagggttaagttagtaggatggtgttcgtttgtacgtggtgttttagttttttatatttatgtaagttgtttgtatttatttatcggtaaggagtgttggtattatagaaatagattttttattttatgttgttttagatgaaaaaatggagatttagatagtataagtttttttttttagagttatatatgaatgaagagttgagggttaggatttttagagtgagttttggagtaagaggatttagttttgtatgtttattttggatagtttagttgttagtttttttgttattagtgaagttatgttttaggttaggttttgggataggtataggggaattggaagtaattgagatttggggttttgataattttttaacgtagtattattaagaaagtagtgtttagttgattttagaggagagtagaagggagtataggagagatgttatttgttagaggaatgaattattggagggagaagagagattgaatagagggaaatggagatggatggtaggaagtgggaggaaatttttatttgttggttgtttaaatgttatttttttgaaattatttgatagttaatttttttttgagattttttttagggaatggttttttattataaagagtttgttttttttttttttttttttttttttttttttttttttttttttttatttatgtatttttttttttttttttttttttttttttttttttttttatttttttttttttttttttgtttttttttttattttttatttttttttttttttttttttttttttttgttattttttttttttttttttttttttttttttttttttttttttttattttttttttttttttttatttaagtggttttgtggttttttagaaagtagattgggggtggatagtagttgttttggaagttggggttgtagagaaaatgttgtttttttgttttagtgttatagaaagggttagaatgtaggatttttggttgattaggtttgggagtaggacgttagagttagagtattttattttttagttacgtatttatagttatttgtattgtagtttgtttttttagttatgtttttttttatttttaaggtgagagatagcgtgaagggtggtaaagtagttagtagggaaggattttggattgaatgtttttgttaattaaatgggaatagtagttttttgttagttttttagggttgttgtgaagtttttgtgtttggtaaattattaagagttaatttttggtattttggaattattgatatttgtcgagattattttattttatggttgggggaaagttagttgttttttttgttttagagttatagaaatatatggtggttttaggatttgtgttatttttgaagggtaagtattgttgtaatgtaagattgtattagtagtttgtttatttttttttttcggagtttttcgttatagttaggttcggtattgttttttgaattttagtaggattgatttttaggttgtttttatgaattttttagaattgaaaaatttaatttagaaattgataaatatttatttatagtgaattttggttttttaagtgttttttttatttttttaaagttataattttttagttgaggatttttttagaatgaaagtttttaatttttatcggaaaaagagaattacgaaaaggatgatgtgttagttggtgtataagtattatagtaagtttattttttattttggttttgtgtgattttagagtaaacgaggtagagaattatttagaaataggaagtgagaatttatattgtttgtagttatttattagtataatagatatttttggtgtttgttgtatgtttggtttgtgtttgtttatatttcgttgaattatatggtttttttttttatagattgttagggatatatatattaaggggtagtgagtaggataatgaagaaatgttttagtgttttaaaggtttagagtggtttggttttagaagttatttgaaggaaattagaaatttggagtagagaagagattgggaattagaagaaattaggttttagatatagttagagagatagatttttttattttatttatatgatttaaggttgtgttttgttttggtttttttgttggtttgtttagtgttaattgggaggtttaaggtgatgtttggatgttttgtatggaggttaggatgggtagagatgggggaggt

SEQ ID NO: 475 - DNA, 5266 bp, Artificial Sequence
  chemically treated genomic DNA (Homo sapiens)
ttttaagagggtatatataggttgtggtttttttgggtgtttgatgatttttttagttagagatgaggtttagagtagagatttaggagtaggggatgtatttttggttttagagggagtatattaggcgagtagtagatataggttagggagggtattgtggtgggaaggtttggtatatttattgggcgtttgtgtttataaggatttttttgtttgagtgatgtgtatggtggagttgttagattttgagggaaaaaaaggaagttttaagaataaagaagtaaataaggaggttttattgtttttggttatttttaaaagttgatatttcgttattattttttgtttggtttattttttatagtttttttggtgttgggagttttttttttattagtgatttttaaatgttttgattttcggatttatatggttataattgattgagtttttttggaggttttttggttttttaaatttgttattttagtgtaatatgggttgattttttaaatttttttgtgattttgtgttttttttattatagtaaatggtttttatgtttttgtttatgagtgtgggttttgtgttttttgttttttattttatgggattattagaagtgagtttttcgagtgtaaggggtttgtgaggtgcgtatttcgtagtaaattttttcggaagtttggttgaatagatgtagagattatatgtggttgagggttaattatttttagatttttttaggtttttttggtattttttagtgttaggaatttgggaatattaagaggttaaattggaattggagtttggcgagggtagtttttttttttgaggtgtatatttggggatcgagatagaggggatgtacgtggggatagaatggggttgaaatcgtagaagttagagatgttgttttatatgtttggtgtggtttggagtgataagggaaggataaattatttatggtgttatgcggtattaggattttttgtcggtgatgtaggatttaggagttttgatttaggtggaggtcggattttttattttattacgtgtgtttagaaggttgttttttgcggttagggttgggtaaggggtagttgtttttggaaattttagtaggtttcgtttttttgtttagtttgggttttagaaattttttttagtattgggtagaggagaaattgaaggattgttttttttttgggaggattttttatagagttttttggggtaggtaatagttttttcggtgaggtagtggttattaatttattgtatagatgtaggggttgaggtttagggaggagggatttttttaggttttagggattggtggtggttgggtaagggtaagagtttaagtttggggtatagagatgtttggatggtaggatttgttggggaaattttgtttttagtttagatttttttgggatagttataggttattttagtttatttgcgaatatttggtaggtatttttttttatagttgttttgaggggataagtacgttgggtttattttttgttggtttagttaggtgattagtattttttaattttttgattttaagataatggaaaatgttaggatagtaggaatagatatgggtttaaattttggttttgcggttattgattgtgtggattgggttgattattggttttttagattttaggtttttagagataataagaatttttattaagggttggataggttaaagaaggattagattagttttaaagtttgtgcgggggtgttatggtatcgaagggattttgaggtttatttttttttttttgtgataatgtttttcgtgataaggattttggagtgatttaagtttttgttttttatagagtttgtggggtggatacgtataggaaattttttttagagggtttttttttgtttttgtaggaaggggggttttagaggggttatattatttatcgtggttttcgtttttgttttgttatagttttatcggagtttttgagttagtatggttggttatcggttgatattgtttaaaatatagtgtaatttaggaatgtttgtttgtgttatggttttagttttgatgttatttttttatgagaaagatgtgtggttgtttataaattttattattaaatttatggatttttgttttgtttgtgttgatttgggtatttgtaggttattattgtcgaaatggattttttattatgatttttgtttttttttttttttttttttttaggtttttggttattggtttgttatttgtttatttgttatgttttagtttttaaatatagttttgttggtttttagtttttttttttgaataattttcgtggttttagttattatatagatatgtatcgttgttagatttgttttttgtatatgtagattttgaaattttaaaatttttcgtgggttttacgttttgaagatttgtttttttgttttttgggtttttattttagttatgtggatagtgattttaattttttttatttatatttagagtatattttggtggggggggaggggggtgagtagattaattttgtttttttatggatggggttaaaaagtttttggaggtaggattttgatcgattttgttatttttatgttttttttttttgttgggaatttagtagatgtttaaaaaataatgaatgattgagtgattttattatagtattaagttttgttgagattttatttttttaatttttttggagtttgtttgttgttttttatatttatttttaaaattttagggttttttgtgtttagaatatttttttttgtttttttttgtttttttttttttaatttaacgtatttatttgatttttagttttttagtttgggtttgtaggtaggatttttagtgaagttttttggtttttttggatttttaagttagagaaggtggttttttgggattttttagttttggatttttttttgtcgagttaaggttatattatgggagggtttattgtagtttgttttttattagattgggagttttaagggttaaatgtgagggttagtgggagggtttcgtttatttttttagaataggttttggtgtggattggaaagatttgttgattgattgtttgagttatgataatttatttttaggaggaaagtgatttttttttttagatgggttatataggttttttgtttttttggttattagttgaattattatttatggtttttttttttgttttttagtttttagggtgttatttaatatatgtgatatttatatgtagtatttatgtttttatttttttttcgagagttttttggaaagagttgagttaaggttttgtaaaaaaggtggagaaagggttagggtttggatattttatgtttttattttagtttggttattaggagtgttttacgtaggtttagatggatggggttggttttatagtggggtttggaggattaaggtttggtttttttatgtaaggttagaaaaatttttatagtatagggaaattggttagggttgtagatttagattatagtgttaaagttatgaattttatttgttttttgaaggttcgttaatttgagtttagtagaatgttttcgtttgtgtttaattttattggtttaggttgaattagtttttagggtttagaggtattgtatttggagtagggagtttttttagtattagagttatttttagaggtttggagttttttataaagtaggtaagaggatttaatagatgtatttgtatggaaaatatttttttttttattaggtatttgtatgtataattaattatagtagtatatatatatttagaaatgggtacgtgtgggtttatatttttttagttatgaaatttaggtatggggtagtttgagttagatattttgtgtaaatataaattcgtgttgttttttttgaattttattgtgaaaattaaatatttgttagttttttaagagtttttagattttttatttttatatttttatagaaaggtttttggagttgggggatgttggggttatgtaggaaattaagtttggagggttttgttggggaagttattgtttttgtatttgagatggatgtagttatagttttggagttagtttgaagtttttggtgttttttgggggttatatataggagtgtagttcgaattttagaggggtaaatttgttttgtagagggaattaaggtttatataattagagaggggagttatttaggaaggtggttttagagttaagagttagattttgggtttcgatttgatttagttatattttttttgaagtttgttgagagtggttgtagtttcgttgttggatgtgtatatggtggttattttttttgtttataggggtaggggtttttttttattggattgaggttgttttttgttttaggttttgggtgggagtttatgtgaattgttagtggggtaggtttgtgagagttttttttatatttaagttttttatagtggttagagaagaggaaggttggagttagaatgaggtattagggcgggtatagtttgtttaaaggtttttgggattataggtaggatggggagttttatttaagtgttttttacgttttattttagttattttaggttaggaagtttaaattgtgttttttagagggagggggtagttttaggtttatttagattgtttagggagggttggagagtttttaggaaggcgggtgggtgggttgtcggtttttggaaaggtttattaatgaaaatttttaagtttgattatttagggaaaaggtttatcgtttttatgtgtggttgataagggttaggagattttatagtttaggtagttttttcgtttttttggtattttgtggttattattaattattttttttgtgtatttaagagtttttttgttagtgagtttagtatatagagagaaaggttaaagttttttggaggatgtggttgtagagtttgttgtttttgggtattgtggtttgtagtatttttgtattcgttcgttcgtttagttttagtacgtagttttgggagtatgtgaatgttatttaggaggttcggcgttttttgaatttgagtagagatattgttgttgagatggtaagtgagagaatgtgggtttgtgtttaggttatttagttggtttttgattggttacgtttgttagtttgataatatgatattttttttttttataga

SEQ ID NO: 476 - DNA, 5266 bp, Artificial Sequence
  chemically treated genomic DNA (Homo sapiens)
tttgtagaaaaggaaaatgttatgttattaagttgataggcgtggttagttaggggttagttgggtggtttaggtataggtttatatttttttatttattattttagtagtagtgtttttatttaggtttaggagacgtcgggttttttggatggtatttatatgtttttagggttgcgtgttggggttgggcgagcgggcgggtgtagagatgttgtaggttatagtgtttaagagtagtaggttttgtagttatattttttagagaattttagtttttttttttgtgtattgggtttattggtaaaagagtttttaaatatatagaggaaatgattaatggtgattataaaatgttagggaggcgggggaattatttgaattgtggaattttttggtttttattagttatatatgggaacggtgagttttttttttaggtggttaggtttgggggtttttattaatgaatttttttaagaatcgatagtttatttattcgtttttttgagggttttttagttttttttgggtagtttgaatgggtttgaggttgttttttttttttgaggggtatagtttggattttttggtttggaatggttggggtggggcgtgggagatatttagatagggttttttattttgtttgtaattttaggggtttttgggtaggttatgttcgttttggtgttttattttgattttagttttttttttttttggttattgtgagagatttgagtgtgaggggagtttttatagatttgttttattgatagtttatatgggtttttatttaggatttggagtagggggtaattttagtttagtaaggggggatttttgtttttgtgagtagagggaatgattattatgtgtatatttagtagcgagattgtagttatttttagtaagttttagagggggtgtggttgggttaagtcgggatttagagtttgatttttggttttggagttatttttttgagtgatttttttttttggttatgtgaattttgattttttttgtagagtaggtttgtttttttgaggttcggattatatttttatatgtagtttttagaagatattaggagttttaggttggttttagggttgtggttgtatttattttaggtatagggataatggtttttttagtaaggttttttaggtttaattttttatataattttagtattttttaattttagaggtttttttgtggaagtgtggaagtaggaaatttaaaggtttttgaggggttgataagtgtttgatttttataatggagtttagagaagatagtacgagtttgtgtttgtataaggtatttggtttaagttgttttatgtttgggttttatagttaaaggggtgtgggtttatacgtgtttatttttgggtgtatgtgtgttgttgtgattggttgtatatataggtgtttggtagaggggaggatgttttttatgtagatgtatttattgagtttttttatttgttttatgaaaggttttaggtttttgaaggtgattttgatattggagaagttttttattttaggtgtagtgtttttgggttttagaggttgatttagtttaaattagtggggttggatataagcgagaatattttgttggatttaggttggcgagtttttagagagtaggtggagtttatggttttagtattgtggtttgagtttgtagttttggttagtttttttgtattgtgggagtttttttgattttgtatagagaaattaaattttagttttttagattttattgtgaggttagttttatttatttgagtttgcgtagaatatttttagtggttaggttggggtgggaatatgaaatgtttaggttttggttttttttttattttttttgtaaggttttggtttagttttttttagggagttttcgggggagagatgaggatatggatattatatgtagatattatatgtgttggatagtattttggaggttggagggtagggaagggagttatagatagtggtttagttgatggttagggaggtagagagtttgtatgatttatttgggagagaaggttattttttttttagaaatgagttgttatagtttagatagttagttaataagtttttttaatttatattaggatttgttttggggaggtaaacgggatttttttattggtttttatatttggtttttgaggtttttagtttggtaggaaatagattgtaatggatttttttatggtgtgattttgattcggtagggggaagtttagagttgagggattttagagggttattttttttagtttggggatttaaggggattagagagttttattagagattttgtttgtaagtttaggttgaaaggttagaagttaggtgggtacgttgggttggaaggagaggggtaggagaggataggggagaatgttttgggtatagggagttttggggttttaggaatgggtataaggaatagtaggtagattttagagagattgaggaggtagaattttaataggatttggtgttatagtgaagttatttagttatttattattttttgagtatttattaggtttttagtagggaaaagggatataaggatgataaaatcggttagggttttgtttttaaggattttttaattttatttatggaggagtaagattagtttatttatttttttttttttttattaaagtgtgttttgaatgtgagtaagaggagttagaattattgtttatatggttaaggtgaggatttaggggataaaggagtagatttttagagcgtgaggtttacgggaagttttggagttttagagtttgtatgtataggagatagatttggtagcggtatatgtttgtgtggtagttgaggttacggaagttatttaggaagaagagttgagggttagtaaagttgtgtttaagggttgggatataatagatgggtaagtaataggttagtggttaagggtttaggagggaaggaaaggaggaaagtaagagttataataagaaatttatttcggtagtggtggtttgtaggtgtttaagttagtataaataggatagaaatttatgggtttggtgatgaggtttgtgggtagttatatattttttttatggaaagatgatattagggttgaggttatgatataggtaggtatttttagattgtattgtattttaaatagtgttaatcgatagttagttatgttgatttaggggtttcgatggggttgtggtagggtagaggcggggattacgatgggtggtatgatttttttggggtttttttttttatagagataggagaaaattttttggaaggagttttttatgcgtgtttattttataggttttgtaggaaataggggtttgagttattttaggatttttattacgagagatattattataaggggaaggaaatgggttttaaagttttttcggtattatggtattttcgtataggttttggggttgatttgatttttttttgatttgtttaatttttgatgagggtttttgttatttttggggatttgagatttgggagattagtggttagtttagtttatataattagtgatcgtagaattagaatttgaatttatatttgtttttgttattttagtattttttattgttttggggttaggaagttgggaaatgttgattatttggttggattagtagggggtggatttagcgtgtttgtttttttaaggtagttgtaaagagagatgtttgttaggtgttcgtaggtaggttggagtggtttgtgattgttttagggaagtttgggttgaaggtagagtttttttagtagattttgttatttaggtatttttatgttttaggtttgggtttttgtttttatttagttattattaatttttgaagtttaggaaagttttttttttttgagttttaatttttgtatttgtataatgggttaatggttattgttttatcgaggaaattgttgtttgttttaggaaattttgtgggagatttttttagggaagagataattttttaattttttttttgtttagtgttaggggagatttttgaagtttaaattgggtagaggagcgaggtttgttggagtttttagggatagttgttttttgtttagttttagtcgtagagggtaattttttggatatacgtggtgaggtagggagttcggtttttatttgagttagggtttttgggttttgtattatcgataggagattttggtatcgtatggtattatgagtggtttgttttttttttgttattttaggttatattagatatatgaagtaatatttttggtttttgcggttttagttttattttgtttttacgtgtattttttttgtttcggtttttaaatgtatattttaaaaagggaagttgttttcgttaagttttaattttagtttggttttttggtatttttaggtttttggtattggggagtgttagggaggtttgggaggatttgagggtggttaatttttaattatatgtggtttttgtatttatttagttaagttttcgggagggtttgttgcggagtacgtattttataggttttttgtattcggagagtttatttttggtggttttatggggtgggggatagggagtataaggtttatatttataggtagagatatggagattatttgttgtgatgggggagatataaggttatagggaggtttgagaggttagtttatgttgtattggaatggtaagtttgagaggttaggggatttttaggaagatttagttagttgtggttatgtgggttcggaagttagggtatttggaagttattggtaaagaggaggtttttaatattagaggggttgtggagagtgagttaggtagaaagtagtggcggggtgttaatttttgaggatggttaaggataatgagatttttttgtttgtttttttgtttttggggtttttttttttttttttaggatttggtaattttattatgtatattatttaggtagaggagtttttgtggatataaacgtttaatgggtgtgttaggtttttttattatagtgttttttttgatttgtgtttattattcgtttggtgtattttttttagggttagaaatgtattttttgtttttgagtttttgttttgagttttatttttggttgggaggattattaggtatttagaggggttatagtttatgtgtgtttttttggga

SEQ ID NO: 477 - DNA, 6065 bp, Artificial Sequence
  chemically treated genomic DNA (Homo sapiens)
attttttttttttttttaattcgtttatttgtttgtttgaattataaataggttttttaagggttttttttttatgtatggagtattttttatttggttatgatgttttttttttttaaaagtttttgttaggttgatttatgaaattgtttttgtttggagtgaatttgtattttgttttttttttttagtttttatttttgttatttaatttttttataagtttgggaatgtttatttttgttatttaatttttttatgagtttgggaatgtaatatgtgtatgtttattttgagtaagaaggtgtttggtttttttttttttttttttttttttttttttttttgttttttttattttttttttgttatttttttgtttttatgtttattttttatttttagtgatttttaatttttatgtttttagggatttaaaatgtattgaatttatattttttgggtcgggtatagtggtttacgtttgtaattttagtattttgggaggttaaggtgggtagattatttgaggttaggagttgagattaatttggttaatatggtgaaatttagtttttattaaagatataaaaattagttaggcgtggtggtgtatgtttgtagttttagttatttgggaggttaagttataagagtcgtttgaatttcggaggtagagattgtagtgagtcgagattatgttattgtattttagtttgggtgatggggtgagattttgttttaaaaaaaaaaaatagtattttttttaaagaaattatatttgttattagtatttgggtttatttagtatatatatgattttttaaaataagaggagatttttagtaagtttttagtttttttttattttttattttagttttatagtaaatttttatattaaaattatttgagttttagtttaatatttttttttaatttatttgtaagtgttataggtttatttattttagtattttagtttttttggattttttttttttgaaatataatttagagtaattttttttagaaaagatttgaaaaattttttttgtttttatatatttaaaattttttgtgttttttaaatgttaaagaaaatttggtattttgtgattttaggtttaagtataatttttttttggtatttttaagatatttatttaaagtttagagttttttatgtgaaatttttagttaatttgatttttgttgtatttaaagtattttatttgtttttttttggaagtatttttgggattatttttatatttttgtaagacgaaaagtttattagtgagaattaggtatggttttattaaaaggaattttgggagttaattttgatttttgttttttattataaaattttatcgtagtagtttttttttttgaatatagattttttattgtttttgaaaaatattttaaaaaggagttttgttttttattgagtggttttttgtttttttgaaagttttgtgaagttttttttatttgttgttgtatttgtttggttgtatatggaaaatttttaagtaatagaggtttaataatatagaagttttttttttttagtatataaaagatgtttagaggtagtagttttaggttagtatggttgttttagagtgagagtgggaatttagttttttttttttttgttgtattatttttatatatggtttttatttttaaggtaattttatggtttaaaatagttgttgaagttttagttattatttttaagttgtaggttggaagaaggaagaaagatagagggataaaaatgaattttttttatttaagttaattgttattgagtagttttttttggaagatatatataatgtttttatttttatttttttggattacgtttagttatttgattgtatttagtggtaacggagtataggaaggaaatagatttttttattttgtgtagtaataaatttagttaaaattttggtttttgttgttaggaggaaagggatacggttttttattgttttttagattaggtagttgatattgtttgttatatttgtttttaattttttttattttttgtttttgaatgttggaatttttgaattttttttttaaatttaaagttttttttaagattttttatttttttgattatttgttttattttatatatttattttttttatttgtggtatttattttgtggtttggtttattattgattgttgttgtttttttgtttgtttgtttttttgagatagagttttaggttggagtgttatggtaacggttttagtttattgtaatttttattttttaggtttaagtaatttttttgttttagtttttagaatagttgggattatagacgtgcgttattatggttagttatttttttttttttttgcgtttttagtaaagacggggttttattacgttggttaggttggttttaaatttttgattttaagtgatttgtttattttggttttttaaagtgttgggattataggcgtgagttatcgcgtttaggttttgattgatttttttttaaattatggattttatatttttaaattttaagaattttgttttttgtatagaagtgtttttttttaaatggttatgatttttaaatttttttgaggatgttgatttagatgttttaatgtatttttttatttttgttgtatttgtatatgtttgtagaagtgtttgttgggttagtatatgttagaatagatgtgcgttgttttgatatttgggaaattgaattattattggtatagaggttagggatagagtttagaggtagtttattgcgggttcgaattttaatttgttttttattaatcgtgtgattgtcgattaattatataatattttatttttgtttttttatttacgaagtggagtttttagtggtaatttatatatagatgtatttatattcgtaaaattttttgaataatgtttggtttatggaaaatattgtaatattgttagttattattatgaattttttttgtgtatgtgagtattgtttgtgttttttgatgatattgatttgttttaattttttaaagtaaaagatattaatttgttttttataattttggttggtatggtttatatgttgaagtgtatttaagtttatgttgtaatttaatttttaatgtgagaatatttggaggtagtgtttgtggtattttataaaatattttagcgagtttttttgtttattttatgtgagattatagggagaagattgtaaggaataggtttttattagatagtgaatttgttcgtattttgattttgaattttttagtttttagaattatgagaaataaattttgttattagtaagttattttatttatggtatgttgttatagtagtttaacggatgagtatattggtgtaaagattttttgtttgtatttcgttttttttttttatggtttagttagtttgataaattatagaagattttatttttatgtatttttgttagtttttgtttttgtgatgttttttatgtttttaagtttaaagagtttaaaggtatttatttttttggtttgtagtttttataggatgtaatattttatatttaaatttataattaatttgttatttggggaatggtgtaaaatggggttttagataggtatttttatgttgttaattaatgattttagtatttttttaaatttaatattttatcgttttatattgatttttgatttttttttagtttggggttaagtagagtttgtttttagttagtatgtttattgatagattttgtgtgtgtgtatgtgtgtttgtgtatgtatttgtatgtgtgtgtgtatgtttgtgtgtaggtggtatatgcgagtgtgtatgtgtgtgtgtgttgtgtatgtatgtgtatgtgtgtttgtgtatgtgtgtttttgtgtgtgaatttttgtgtatgtgtgaatgtgtgtgtatgtttgtgtgtatatgtgtatatatgtgtatatatatgtatgtatttgtgttgtttatgtgtgtatgtgtgtttgtgtttttgtgtgtgtgtttgtatgtgtgtgtgtatgtttgtgtgtgtatatgtgtgtatattgtatgtatttgtgtgtgtttgtgtttgtttttgtgtgtgtgtttgtgtgtgtatttgtgtgtatatatgtgggtatgtgtgtgtatgttttgtgtgtacgtgtatatatgtatgtatttgtgtgtgtttgtgtgttgtgcgtgtgtgtgtttgcgtgtgttcgtgtgtttgtgtgtgtgtgtgtgtttgtatgggtattttgagtgaagtttttaataatttaatagaagaaaaggagttatatttgtttgttttgtttttttgggtattttttagattagtgaaatgaaagggaggaaattttcggttttcgaggagaaaagggaattggtaagtagagggtggggggatgacggtaaaaggagtaggggtggggagagtataggttttgtggaagtgaggatatgtgtgtgtatatgtgtttatgtttaggggatgatattgtggtatttaatagtcgtggattagtagtttacggggagtttagtaggagttaaattttaggtttttgttttagttgttttgttgtttagcgtattgtgtagtggtaggtgttagtgatttaagtggggatttagttttttaggttatatagcgtatgtttattgtttttatgtcgtaggagattgagaggttatgtatgagggttatttttttgggttgtttttataatacgggcggtgtttttgggatacgtggaaggggaggggtagtttattgttgatatttttttttgtaggtttggaggaggtagaggttaggagggagaggttttaagagtttgtgaaatgggtttggtttggtttttagttgggtaggaatataggattttaggatattaaggattttgttatgtttatggttagtatttattagtgttggtgtttgtttgtttagagttgattagggagatggtgttggtttaggggttgttttttatggttttgttggttttgtgttgggagcgtagtttggtaggggtagaaggtgagtttcgtggtttttatttatttttttgtttttgtttttattgttgtattttgggggagggtcgtagcgtatttttaggattttgttcgttagttttttttttgtttttttttttttgtttttttttttggttttttttgggtttttttcgtttttttttttttgtatatttttgtttattttgttttggaaagtttagttgagcgtgtttggtttttttgtttatattttttagggcggtattttcggtttttaggttttaggatggttgttttggtcgtttttttgtttttttttttttagtagatattttttgtgttttagtggtttttattttcgggattttgtttttgtagggttttggttggggttttttttttgttttagtcgttagtattttttttgtgtttgaagttcgtattgggatgtttttgggtttttgaggtgaaatggttttttttaagggtttttagagatttggtttttgtgataatgttgggattatagtttttttaataaatattaggtttttgaggacggggattagagaggaggtgggaggttgtagggtagaattttgttacgttgtattttagggttgagtgtgtgtttttttttaggttgtatagtcggtttaggggttaggtttgtgtttgatgtatgtttttgttttggggtggggggaggggatcgtgtttaggaatagtatattgcggaggtttagaaattatgttgagaattaatagaatgttttgtttttgttaggagaggagggttcgtaattaggagtttatttcggtagatatgaatatatgtatatgtgtttggttatttggtgtttttgtagggatttgggagatttttttttagagcgggatattttaaagtagttgggggtgatggtgataagggtttttgtaggaaagagaggtgatttttttttattttttttgttaga

SEQ ID NO: 478 - DNA, 6065 bp, Artificial Sequence
  chemically treated genomic DNA (Homo sapiens)
tttgataagaggggtagaagggggttattttttttttttgtagggatttttgttattattatttttagttgttttgggatgtttcgttttggggaggggttttttaggtttttgtagaggtattaggtggttaggtatatgtatatgtgtttatgtttgtcggggtgggtttttggttgcggattttttttttttggtagaagtaagatattttgttggtttttagtatggtttttgggttttcgtagtgtgttgtttttgggtacggttttttttttttattttaggatagggatatgtattaagtataggtttggtttttggatcgattgtgtagtttgggagggggtatatatttagttttgggatgtagcgtggtagagttttattttgtaattttttattttttttttagttttcgtttttaggagtttggtatttgttaaggggattgtggttttagtattattatagaagttaggtttttgggagtttttgggaggggttattttattttaagagtttaggagtattttagtgcgggttttaggtataaggagggtgttagcggttgaagtagggagagaattttagttaaggttttgtaggagtaaagtttcggaggtgggaattattgaggtatagagagtgtttgttggggaaggaggggtagggaaacggttagagtagttattttggagtttaggggtcgggagtgtcgttttgagaaatgtgggtaaggaagttagatacgtttagttggattttttaagataggatgagtaggaatgtgtaggaggagggaagcgggggaggtttagggaaggttagggggagagatagagggaggggagtaggaggagggttggcgggtaggattttgaggatacgttgcggtttttttttagggtgtagtagtgaggatagggatagggaagtgggtgggagttacgggatttattttttgtttttgttaggttgcgtttttagtatagggttagtagggttatggagagtagtttttgggttagtattatttttttggttagttttggataggtaggtattagtattggtgggtgttggttatgggtatgatagggtttttagtgttttgaagttttgtgtttttgtttagttgggagttaggttagatttattttataggtttttgggattttttttttttggtttttgttttttttaggtttgtagaaggagatgttagtagtgagttgtttttttttttttacgtgttttagggatatcgttcgtgttgtggggataatttagagaagtggtttttatgtatgattttttagttttttgcggtatgaaggtaatggatatgcgttgtgtggtttgagggattgggtttttatttggattattgatatttattattgtataatgcgttagatagtagagtagttgagataggggtttaggatttgatttttattaagtttttcgtgggttgttggtttacggttgttggatgttatagtgttattttttggatatgaatatatgtatatatatatgtttttatttttatagggtttgtgttttttttatttttgttttttttatcgttatttttttattttttgtttgttagttttttttttttttcggaggtcgggggtttttttttttttattttattggtttgggaagtatttaagagagtagaatagataagtgtggtttttttttttttgttagattgttggaagttttatttaagatgtttatgtaaatatatatatatatataagtatacggatatacgtaggtatatatacgtataatatatagatatatatagatatatatatatatatacgtatatataaaatatgtatatatatatttatatgtatatatataaatgtatatatagatatatatatagaggtagatatagatatatatagatatatataatatatatatatatatatatataaatatgtatatatatatataaatatatatatagagatatagatatatatatatatatgaataatatagatatatatatgtatatatatatatatatatatatatatataaatatgtatatatatttatatatatatagaaatttatatatagaggtatatatatatagatatatatatatatatatgtataatatatatatatatatatattcgtatatattatttatatatagatatatatatatatatatagatatatgtatagatatatatatatatatatagaatttattaatggatatgttggttggaaataaattttatttgattttagattgagaaggaattaggaattaatgtgaagcgatgaaatattaaatttaaaaaaatgttaaaattattgattaataatataaaaatgtttatttaaaattttattttatattattttttaaataataagttaattataaatttaaatgtaaaatgttatattttatgaaagttgtaaattagaggagtgaatgtttttgaattttttaagtttaaaagtataggagatattatagagataaaggttggtagaagtatataaaagtgaaattttttgtaatttgttaaattgattgaattataaaaggaaaggacggagtgtaaatagaaaatttttgtattaatgtatttattcgttaggttattgtaataatatattatagatggagtggtttattagtaataaagtttattttttatagttttggaggttgggaagtttaagattaaggtgcgggtagatttattatttggtgagggtttgttttttgtagttttttttttataattttatatggaataagtaagggagttcgttggggtattttatagggtgttataggtattatttttagatatttttatattggggattaggttgtaatataaatttgggtgtattttaatatatagattatattaattagaattatggaggataggttagtgttttttattttaaaaggttaaaataaattaatattattaaagagtataaataatatttatatatatagagagaatttatgatagtggttgataatattgtagtgttttttatgagttaggtattatttaaaaggttttacggatatgaatatatttatgtataggttattattagaagttttatttcgtagatgagaaaataggggtgggatgttatgtaattggtcgatagttatacggttggtaaggaataggttgagattcgagttcgtagtgggttgtttttagattttgtttttgatttttatgttaatagtgatttagttttttaaatgttaaaatagcgtatatttattttgatatatgttaatttagtagatatttttatagatatgtatagatatagtaaaaataaaagagtatattaagatatttaaattagtatttttagggagatttgagaattatagttatttaaaagaagatatttttatgtaaagaatagagtttttggaatttgaagatatgagatttataatttaaaaaaaaattaattaaagtttgggcgcggtggtttacgtttgtaattttagtattttgggaggttaaggtgggtagattatttgaggttaggagtttgagattagtttggttaacgtggtagaatttcgtttttattaaaaacgtaaaaaaaaaaaaaaatagttggttatggtggcgtacgtttgtaattttaattattttggaggttgaggtaggagaattgtttgaatttgggaggtggaggttgtagtgagttgagatcgttgttatggtattttagtttgagattttgttttaaaaaaataaataaataaaaaaataataataattaatagtgggttaaattatagaatggatattataaatgaaaaagatagatatataaaatagagtaaatagttaaggagatgaaaagttttagagaaaattttaggtttgggaaagaaatttaaaaattttagtatttagaagtagggggtggagagaattaagagtaggtatggtagataatgttagttatttagtttgaaagataatggaagatcgtgtttttttttttttggtaatagaagttaaggttttagttgagtttattgttatatagaataaaaaggtttattttttttttatatttcgttgttattaggtgtagttaagtgattaaacgtgatttaaggagatgagaatagaaatattgtgtatgttttttaaaaaaggttgtttaatggtagttgatttaggtgggaggggtttatttttgtttttttgtttttttttttttttttagtttgtaatttggaggtgatagttggagttttagtagttattttggattatgaggttattttgaggatggaagttatatgtgaagatgatgtaatagaaagagaggaagttggatttttatttttattttggagtaattatattagtttgaaattgttatttttgggtattttttatatgttgggaaaaagaaatttttatgttgttaagtttttgttgtttagggattttttatgtgtagttaaatagatataatagtaaatggggaaagttttatagggtttttaaggagataagaggttatttaataaagaataagatttttttttaaaatattttttaaagatagtaaggaatttgtatttaaggggggaggttattacgatgaggttttgtagtaggggatagagattagggttaatttttaagattttttttaataaagttatgtttagtttttattggtaaatttttcgttttgtaagaatatgaggatgattttagaaatgtttttagaagaaaataaataggatattttgaatgtaataagggttagattggttaaagattttatataagagattttgaattttaaatagatgttttgaaaatattaagggaaaattatgtttaaatttagaattataaaatgttaagttttttttgatatttaaaggatataaaaaattttgagtatgtaaggataaagaaagttttttagattttttttgaaagaaattattttaggttatattttaggaaaaaaaaatttaagaaagttgaaatattgaggtaaataaatttgtaatatttatagataagttaaagaagaatattgaattaaaatttagatgattttaatgtgggagtttgttgtgaggttggggtggagaatggaagagaattgaaaatttgttaaagatttttttttgttttggaagattatatatgtgttaaataaatttaaatgttggtagtaaatatggtttttttaaaaaaaatattattttttttttttgagatagaattttattttattatttaggttggagtgtaatggtatgatttcggtttattgtaatttttgttttcggggtttaagcgatttttgtgatttagttttttaagtagttgggattataggtatgtattattacgtttggttagtttttgtatttttagtagaggttgggttttattatgttggttaggttggttttaatttttggttttaagtgatttgtttattttggttttttaaagtgttgggattataggcgtgagttattgtgttcgatttagaaaatataagtttaatatattttaaatttttaaaaatataaagattaaaaattattaagaatgaagagtaagtatggggataggaggatgatagagaagggatgggagggatagagaaaggaagagagagaaaagagaagagaaaaattaaatatttttttatttaaaataaatatgtatatattatatttttaagtttatgaagaaattgaatggtagggataaatatttttaagtttatgaagaaattgaatggtagggataaaaattaggggggaaaagtaaaatataaatttattttagataaaaataattttataggttaatttgataaagatttttaaaagaagaagatattatggttaagtagagggtattttatatatggaaggagaatttttaagaaatttatttatgatttaaataaatagatgaacggattaaaagggaaaaaaggat

SEQ ID NO: 479 - DNA, 5152 bp, Artificial Sequence
  chemically treated genomic DNA (Homo sapiens)
tttattttttgtattaggttttttttttaaggttttgatgttgttatttttttttattttttaaggttgaaattgttttttagaattttttttttttatttagaatttggttgggtagaaggatttttgtttggtaggtttggcgggtagaattgggtgggttttattttatatttagtgtttttagtaatttgtatttttttaattttatttttttttttatttttttttgttatttttttacgttatggtatatttttttatgttcggtggtttttttttttacggtgagtaaattttttttagtttttttttggaaaatatgtttgtttagggttttttattttttggtttttcgtagtgtttagattttttgtttgttaggggtgttgtggtttaattttagtttgttttttgcgtggtagattgattgtttttttaggagttggaaggagttttttaaggtatttgaagtttgatgtggttatttttgagtttttttgttgattttatgatttggatgagaattgatttaggtttttttagtttgttagagttttggatttttaggttggtattttgaatttttttttaggtttgggtattaaagatggtttggatgatttgtttttttagggtgtttttattttaggtattatttgtaggttacgttatttcgtgatattatttttttttaatgtttattgggtagtgggaaggaaggattttaaggtagaagatgagattagtgtgtgatttgggtatgttatttgatattgttgtagggttgggaggattcgttagggttgagtggatgtgaaggtattttgtgaagtgttgtgtaaaggttagttgttaggattattgatttttagaatatattatggtttttttttatgattttattatttacgttaggttttttttttttattttttttcgtatgttgtgtaggggtagaggtgataaagggttatagatgtgatttatgtggatgatttattttattttttagtttatggtggtttattttttgtaatttttttgatttttaagtttaattatatggtgttttttatggtattattttatttatattatttttagttcggtgttgggatttagagttttaatgattgatagagtttaaaggaagggattagttagttgatttttttttagtttgtagatcggtaaattgaggtttagaatgtgattagagttatataatgagttagtggttaaagattagagtttagttttttaattttttgtttaattattttttattgtttgttagtagtttttatttttgtgtttttttgttatatatattaatattttatatttttgtacgttgagtttgatggtatttacggtattgtattgtacggaatttggaagtttttttgttaggttagagaggtggaagagaataggagagtggggtgttatagagattaggggtggatatatttatacgaaggaagatgaggttatacgtattggagatttttttgagaaggattttttttgttggattttggaagattatgggtgattaggattggatacggaattgtagagttgagtgtaaaataaaaatggggtgtgtgtgggggggttttttgttttaaaaatttgttaagaatttttttttttttttttttttttttttttagataaagttttattttgtggtttaggttggagtgtagtgttataattttggtttattgtaatttcggttttttaggttaaaacgatttttttgttttagtttttcgagtagttgagattataggtgtttgtcgattaaattcggttaatttttgtatttttagtagagatagggttttattatagttggttaggttggttttgaattttcgatttttagtgatttatttatttcggttttttaaagtgttgggattatagatgtgagttattatatttaggtgaaaatttaagaattttaaggttttgttaggtatggtggtttacgtttgtaattttagtttttcgggaggtcgaggtgggtggattatttgaggttaggaatttgagattagtttggttaatgtggcgaaatattatttttattaaaaatataaaaaattaattgggttgaggtggtatatatttgtaattttagttatttgggaggttgaggtacgagaattatttgaatttaggaagtagaggttttatcgagtttgggtcgtgttatttgattttagtttaggtgacgtattaagattttgttttaaaaaaaagaattttaaggttgggtgtagtggtttatgtttataattttagtattttcggaggttaaggattaaggagttttatgagtttgagattggtttgtgtaatatagtgaaatttcgtttttttagaaaaaaaaaaaaaattgtttaaatgtattttttataaaaagaaaaataaattagtagattatggtggtgtatattttagttttagttattcgggaggttgaggtaggaggatggtttgagtttgggaagtggaggttgtagtgagttgtgattgtattattgtattttagtttgggtgatagagtgcgattttgtttttaaaaaataaaaataaaaaagaattttaagatgacgatagtagtagagtgtaaaattaagtgtagagtttttgtgagtatagggtatgaggttttgtgggatttcgttagtcgtatgtttgtgaggttggttttgtaggttatttttgaataagtagttttagaagtatgatggggattagattagatggtaggatgttagatgatattatttttgaggatgtatttattatagatttatttttgtgatgttaataggggaattttgtagatttatatttgtttaaggaattagataattttttatatttaggtaggagaagtaataagtaaattttttttttgagggtcggatattttgttgttggttatttggtgtttatttcgggattgtagttgaatgtgggatagaaagttgagtaattttttttttttttttgttttttttttatattgggtaggggttttaattgaggtataagaattgagtttggttgttgatggagggttatttttttttaagattagggtagtttttaggaaaagagtggaattagggtgtttagtatagtagttgtgggagaagtaggagtttagttggagttgtagatgtggttaattaagggagtttgagtgtaaattcggtgaaggagggagatttggggggaaggaggaattatatttaggatagtgtatattgtttattaggggttgtagaattggagtagaaattttttgttatttatttatttgtttatttatttagtgaggattttttgtgagttttatgtgttagttgaaggggatatagatagggtttttaaggtgttgggtttatggtagggtttttaaaatattttgtatatttaaattatttggggagtttttatagattagttatgttggggttttatttggattaattatattaaaatttttgtgtatggggtttaggtattggtttttttcgaaagttttttaggtatgtttaacgagtagtttgagttgagaattgatggtttggagggaggtatagatatgtttttataatgttttgatgtgttgtttgtattaattgatgtttgtatagggagttgtgaagtatagagagagaataagtattaataatatggtagaattatttttttttttttattattagattaatatatatggttttgggagtggtaatgtatttagtttttgatgatttaatttgattgattttagtttattagaaattttgttgtttatttttttaattttttttgtagttgagggtggtttaattttggttaatgatatttaagtagaagttcgtagaataggtttgtgggatagtttttgatttgttggtaagagaggatagggttgggttttgtttttttttttatttttttttttttttttttttttgagatggagtttttttttggagtgtagagtttggagtttttttttgagtgtatttaggttggagtgtaattgtatgatttcgttttattataatttttattttttagatttaagtgatttttttgttttagttttttgagtagttgggattataggtttgtattattatatttaggtaatttttgtatttttagtagagatgaggtttcgttatgttggttaggttggttttgaacgtttgattttaggtgatttattttttttggtttttgaaagtgttgggattataggtgtgagttagtgtattagtttttttttttgagagagggttttattgtgttgttcgggttggaatgtaaatatagtttattgtagttttgattttttattaaatttaagtaatttttttgttttagttttttatgtagttgggattatagatatgtgttattataattagttaatttttttttttttttttgtagagatgagggttttattttgttgtttaggttggttttaaatttttaaggtttttgttttggttttttgtaaaaagtgttggggattatatgcgtgagttatcgtgtttggtttttattttgaatatgaaagggttaatttaggttatttcgtggttatgagataataaagtataaagggagggttgagtatattgagatgttggttggaatcgttgagttataattttataaaattttcgtaaatagttttttgttttaatttttttgtattgttttggatattaaatttgtataaattttgggaagttattattaagttttagtcgtggttttaggtaatttttttttaggtttttatggggttatgtataaaggtttttttagagttgggttttaaaatagttcggagtttgtagtttagttttatttagatttatggttggatttgttatttagagttttatgaagttgatgggtgagtgttttggtttaggatgggagagtcgtttgttttggtatgggagggaggttggtgtgatagaggggttggggattttcgttttgggaatggggattaaaggtatttagtgttttcgagagggttttaggtggtagggaatagtatgttttttgagttcgttttgtttttagt

SEQ ID NO: 480 - DNA, 5152 bp, Artificial Sequence
  chemically treated genomic DNA (Homo sapiens)
gttggggatagagcgggtttaggagatatgttgttttttattatttgaggttttttcggggatattgggtgtttttaatttttatttttagaacggggatttttagtttttttgttatattagttttttttttatgttagggtaggcggtttttttattttgggttaagatatttatttattagttttatggggttttgggtggtaggtttagttatgggtttgggtggggttgggttgtaggtttcgggttgttttggggtttagttttaggggggtttttatatataattttatggaggtttgggaggaaattatttggggttacgattaaggtttagtaataattttttaggatttatgtaaatttggtgtttaagataatgtaggggggttggaataaaaagttgtttgcgaaagttttgtgaaattgtagtttagcgattttagttaatattttagtatatttaattttttttttatgttttgttgttttatggttacgagatggtttgagttgatttttttatgtttaaagtaggggttaggtacggtggtttacgtatgtaatttttagtattttttgtagggggttaaggtaggagttttaggagtttgagattagtttaggtaataaagtgagatttttatttttataaaaaaaaaaaaaaaaattggttggttgtggtggtatatgtttgtggttttagttatatagaaggttgaggtaggaagattgtttgagtttggtagggggttaaggttgtagtgagttgtgtttgtattttagttcgggtaatatagtgagatttttttttaaaaaaaaaggttggtgtattggtttatatttgtaattttagtatttttagaggttaaggaaggtggattatttgaggttaggcgtttaagattagtttggttaatatggcgaaattttatttttgttaaaaatataaaaattatttgggtgtggtgatgtaggtttgtaattttagttatttaggaggttgaggtaggagaattatttgaatttgggaagtgaaggttgtagtgaagcgagattatgtaattgtattttagtttgggtgtatttagagagagattttagattttgtattttagagagagattttattttaaagaaaaaaaaaaaaaaaaaggtagggagaggagtagagtttagttttatttttttttattagtaaattaaagattgttttataaatttattttgcggatttttgtttagatgttattgattagaattgggttatttttagttgtaaaggagattgaagaagtaggtaataggatttttgatgggttgagattaattaggttgaattattaaggattgagtgtattgttatttttaaagttatgtgtgttaatttggtagtaggagggaagggatgattttgttatgttattaatatttattttttttttgtgttttatagttttttgtataaatattaattaatgtaggtagtatattaaagtattgtggagatatgtttgtgtttttttttagattattaatttttaatttaggttgttcgttagatatatttgaggagttttcgaaagaaattagtgtttagattttatgtatagagattttaatgtaattggtttagatgaagttttagtataattaatttgtaaaagttttttaagtgatttgaatgtgtagggtgttttgagaattttgttatagatttagtattttaagaattttgtttatgttttttttaattagtatataaggtttataggaaatttttattgaatgaataaataaataaatggatggtagagaatttttgttttaattttgtagtttttagtgggtagtgtgtattgttttaagtgtggtttttttttttttttagattttttttttttatcgagtttgtatttagatttttttaattaattatatttgtagttttagttgggtttttgttttttttatagttgttgtgttggatattttagttttattttttttttggaagttgttttagttttagaaggaaataattttttattaatagttaggtttaatttttgtgttttagttaaagtttttgtttagtgtgagagaggaatagggggaaagggaggattgtttagttttttgttttatatttagttatagtttcgaaatggatattaagtagttagtagtagagtgttcggtttttagagaaaaggtttgtttgttgttttttttgtttaagtgtagaaagttatttgattttttagataaatgtgagtttgtaaaatttttttgttgatattataggaataagtttgtggtgagtatatttttagagatgatattatttggtattttattatttggtttggtttttattatgtttttgaaattgtttgtttaaaggtaatttatagggttagttttataggtatgcggttgacgaggttttataagattttatgttttgtgtttataagagttttgtatttggttttatattttgttgttgtcgttattttaaaatttttttttatttttattttttagagatagagtcgtattttgttatttaggttagagtgtagtggtgtaattatagtttattgtagtttttattttttaggtttaagttatttttttattttagtttttcgagtagttaggattaaagtatgtattattatggtttgttaatttatttttttttttgtagaaagtgtatttggataattttttttttttttttggagagacgaggttttattatgttgtataggttagttttaaatttatgaggttttttggtttttggttttcgaaagtgttgagattataggtatgagttattgtatttagttttgaaatttttttttttgagatagggttttaatgcgttatttaggttggagttaagtggtacgatttaggttcggtgaaatttttgttttttgggtttaagtgattttcgtgttttagttttttaaatagttgggattataggtgtgtgttattttagtttagttaattttttgtatttttagtagagatggtgtttcgttatattggttaggttggttttaaatttttggttttaagtgatttatttatttcggtttttcgaagagttaggattataggcgtgagttattatatttggtaaggttttgaaatttttaagtttttatttgggtgtggtggtttatatttgtaattttagtattttgggaggtcgaagtgggtggattattagaggtcgggagtttaagattagtttggttaattatggtgaaattttgtttttattaaaaatataaaaattagtcgggtttggtcggtaggtatttgtagttttagttattcgggagattaaggtaggagagtcgttttaatttgggaggtcgaggttgtagtgagttaaggttgtggtattgtattttagtttgggttatagagtgagattttatttaaaaaaaaaaaaaaaaaaaaaggaagaaatttttaataggtttttgaaataagggatttttttatatatattttatttttattttgtatttagttttataatttcgtgtttagttttggttatttatagttttttaaaatttagtaagaaaaattttttttagaaaggtttttaatgcgtatgattttattttttttcgtgtaagtatatttatttttagtttttgtgatattttatttttttgtttttttttatttttttgatttggtaggagggtttttaggtttcgtataatataatatcgtgggtattattaggtttaacgtgtaaggatgtagggtattggtatgtgtggtagagaggtatagaggtaagagttgttagtaggtaatggaaagtggttggataaggagttagaaaattgggttttggtttttggttattgatttattgtgtaattttggttatattttgggttttagtttatcggtttgtaaattaaggagggattaattggttggtttttttttttgagttttattaattattgaggttttgaattttagtatcgaattggagatagtgtgggtaggatggtgttataggaggtattatgtggttggatttgagggttaagggagttgtaggggataagttattatgggttaaggaatgagatgggttatttatatggattatatttatgattttttgttatttttgtttttgtatagtatacgagaggaggtgaaggggaaaagtttggcgtgggtaatgaaattatggaggaagattatgatgtgttttggaagttagtaattttaataattagtttttgtatagtattttataaagtatttttatatttatttaattttggcgggtttttttaattttgtagtagtgttaggtgatatgtttaggttatatattaattttattttttgttttgaaattttttttttttattatttagtgaatattaggagagggtggtattacggagtggcgtggtttgtaaatgatgtttgggatagggatattttgggggaataagttatttaagttatttttggtgtttaggtttgagggagagtttaaagtgttaatttgagagtttagggttttagtaaattgagagaatttgagttagtttttatttagattataaaattagtaggaaaatttagagatgattatattaggttttaggtgttttaaagaattttttttaatttttagagaagtaattaatttattacgtagagaataaattgaaattgaattatagtatttttggtaggtaggaggtttgggtattgcgaggagttaggaaatgaggaattttggatagatatgttttttaaggaaagattaggggaagtttgtttatcgtggaagaaggggttatcgagtatggaagaatgtgttatggcgtgaaagaatggtagaagggagtagggagaggaatggagttgggggaatataggttgttggagatattggatgtgagatggggtttatttagttttgttcgttaggtttgttaagtagggatttttttgtttagttaggttttgggtaaggaagaggagttttgggaagtagttttagttttggggagtgagggaagatggtagtattaaggttttgggaggggagtttggtgtagggaatgga

SEQ ID NO: 481 - DNA, 6048 bp, Artificial Sequence
  chemically treated genomic DNA (Homo sapiens)
atttagagtttagtttagttttaaaatggttgtgggatatgagtaggttacgttttttttttgggttttagttttttaattttttagggatgaataaggaaagatttttgaagttatagatttggaaagcgttataaggtaaaatattattaggatattgaaggtatattataggatatattttataaatgaggagaaagtttatgaaaaaagatttagtggtttagtgcggtggtttacgtttataattttaatattttgggaggtcgagtaggcggattgtttaaggataggagttcgagattagtttggttattatggtgaaattttttttttattaaatatataaaaattagttaggtatggtggtaggcgtttgtaattttagttatttgggaggttaagataggagaatcgtatgaatttgggaggaggaggttgtagtgagttaatatcgcgttattgtattttagtttgggtaagaagaatgaaattttgttttaaaaaaaaaaaaaagaaaagaaaaagaaaaaaagatttagtggtattttttttgagttttgaagaatgagtagaattttagtaagttgaggtggaggtgagggagggtattcgaggtagagagaatagtttgagtaaaggttaggaggcggaaagtttagggtgggtttagggaagaaggagtgtttagtttttttttaagttaatagtttaagggttttttgtaagtgggttgtttaagcggagtagtttttagtaaatatttgtttgtataatcgaggttatatataggggcgcgtttgtataatgatttgtttgtataattttagttgtttgttgtattttagttaatttcggttttggtagttgagtattatagttttaattttcgggtatttattttagtttgtttatttggatttcgtttcggtttttttgaaataagttgttttttgatttatttagaagttttatatattataggtagtaatagaaatagaaataattcggggtttagtagttaggttgttaagaatagggtttttttattagtatttttttatttagggtttttaatatatagaggttttgtttgatggaggaggggcgggaggtaggatagttggaagaggaagtatttataaagtcgatattgggtgcgggtagaggggatgatttttcgtttgttttgtgttttttagtgtattatagtaaatatttattaagtatttattgtgtttttggttgtgttttataagttttacggttattgattttttttaagaattttatgaagttaatattgttagttttattttatagatgataaaatcgaggtttaaagagattaaatatttgtttggagttatataggtagtaagtggtaaattgaagtagtttgattttttagtttattattttaattttagtatattttaaagaaagtttttttttaaatttaatttttatttttttaaatttaatttttattttggttgttgtagttttattttttggtgtaggtttttaatagagaatggagtataaaggagaatagtagaattttttttttaaatattgaattatgtagaagggaataaaggaaagtaattttattgaatatttattatgcgttggttattatattaggtattgtatttttgatagttaatttaattattataaaatttttgggaggagttattattattgtgatagattaggaaatagaggtttggaagaggtaaatattatttttaaggttttgtagtttaatagatatgtattgagtattttttgtgtgttcggtattgtattgaggttagagaggtagaggtgagaatatagtttttgtttttaaagagtttatagtataatggaggaggtaggcggttaatagtttattatagtattataggatgaatggggagaagggtttttaatttagtttgattaaggtgtggaagtttagagggatgttgagtttaggttggatgtttgaattgggttaggaataggatttagttagtaggaggtgataggcgtttcgtagaagaaaggtatagggttgttttagagtttggggtaggtagggaaatattagtgaatttggtatgatcggagtatgacgggttggatttgaggaagtaggggttggtgaggtaggagagggaggcgagggtaatttgtatgttcggtttaggagttaggatgtgacgacgggtttttgaagaaagacgggagaggagaaggattgtagggttattggtaaggttgagacgggagttttataaaggtaggaattaaaattgtgttttattattgtgtttttgtatttgttttaggagtaagttttttgaatgatgaataaaaggtttatttttttttattaagaattgattggggttaggcgcggtgatttatgtttgtaattttaatatttcgggaagtcgaggtaggtagattatttgaggttaggagttcgagattagtttggttaatatggtaaaattttgtttttattaaaaatataaaaaaattagtcgggcgtggtggtgcgtgtttgtagttttagttatttagaaggttgaggtaggagaattatttgaatttgggaggtagaggttgtagtgagtcgagatcgcgttattgtattttagtttgggtggtagagcgagattttattttaaaaaaaaagaatgaaaataaaaataaaaaataaatttaaaatgattagaaggttaggtgcggtggtttacgtttataaaattagtattttgggaggttgaggtgggcggattatttgaggttagtagtttaagattagtttggttaatatggtgaaatttaatttttattgaaaatataaaaattagttaggtatgatggtaggtatttgtaattttagttatttgggaggttgaggtaggagaattatttgaatttgggagttagaggttgtagtgatttaaaatcgcgttattgtattttagtttgggtgataaagtgagattttgttttaaaaaaaaaaaaagaaagaaagaaaaaaaagaattaaaagaattgattggatatgggaatgtggagaaagggttgtaaggaatgatttttgagtttttgagttgtatgattagggagaggaggggatggtggttaatttattatgataaggtacgtggggattagagatagatttggtgaagtgggggaagatttatttagttgattatttatttaataaatacgtatggaggttttattgtgtggtaagtagtgttatagatattggagataaagttttgaataaaatagataaaaattgttgtttttatggaatttttagtttagtggggattgagatagttaatattagatggtgaaaagggatttgggggagagagagatagggagtgggagggaaggggtttgtaaattttgaaaagggtgtttagagaaggttttaatgagaaagtgatatttgagtaaagatttgaagaaggggagggattagtttatgtagttatttgcgggggaaagagtttaggtaaatgaaatagtaagtgtaaaggttttgaggtaagagatagtataataagtttaagaagtaaagaatatagagtagttggagtaaggtagtaagggggagaataataggagagggatttaggaggtaatagggatattaggttttgtagggttttgtagattatttaaagggttttgattttgattttgaatgagataggagttattggaaaggttgggacgaggatgggttgattagatttttgtttgattgatatcgtattggttgttgaaggaattatagataggtgcgggaataaggatgaaatagaagtaggagagtaggtagggggttattgcgattatttaggtaatagatgagggtagtttggagttggttagtattggttttagttatatttatattttttaaatattattataaaaatatttaaacgtagagttaagttgaattttatagtgaatatttaggattttggttatatttggaaagaagagagtttatgggatttattgagcgagtagagtttgtgggatattttgggagggttgtagtaggtagttaggttatttgatttggaattagaattatagttttggtttgtagtattatattagatttagatgttttaaaaggattatatgttaaggatagtttgttggtttgttggtatttaattttttttgggttatgaatttaataaattatgagtagtttgaattttttttagaaaatgtaaagaaaattatttgtagttttagaagaattatgaatatagataataaaagatataaaatgtagtttattttatttaattataaaatatttagtgttgtagaattattgtgggtaaatatttttaatttttagtgaatatataaagatttcgtgttttattaagacgtttttttgttttgtttttagaatttttgtttttttatttgtttggtttatgggtaatgtatagaatacgtaatgaagaggggagtagtgagtattgggttatataattttttggaatttggaatatatttttttgagtattgtgaagatgtggtttttaaggttagagttgaaaagaggtttagggtcgggtgagttttttagttagggtttgtttttaagtgatgtttttttagggtagggggtataaggatggtatttagttaggtgggagtttgggttttgtttagttttaaagttttgagtttaggaaattcggaggtaggggagggggatatcgttgttatattttttagttttttaagatttttaaggtaggaaggttgttcgggttttattagttttttttataggtttttttttgggaggaaggggttgtttgtgttttcgaaggcgtaagggagggtaggagggaggttcggaaggtgttgtaatttttagttttcgggtttgttagaggttgagttattaacgatagagttcggggagagaagttggattgtagttggttttaggaattttttttgacgagaagagagattaaggaggttaagtaggggttgggttagaggtgttaacgtgagtaggggatttttagagaggggttgagttttgggtttgatggagtttttatttttttttttagtttttttttggtttgttatttttttgagtttttttgtttcgtatattttttgttattttttgaattttaaattttcggtaatagacgtttttcgggttttaggttttcgagtgtttttttttcgtttattttttgggtcggcgtatattgggttttttttttttgtttttcgatatttttttggttttaatcgtttttttggcgagtttttttgtcgttttagtttgtgtggattttagttatcgttttattttgttattttttttgttgttttttttttttttttatttgtagtatatttggaaatgttttttttttttgtttatttttagtttttttttttttttttattttttttatagaaagaatttcgaggtgagagtagaaatagtaagggagcgaggggtgtgaagtggggaagagagtgtgaggggagagggttgagcgtgatgagggagaaatagaaagagggaatgtgaaggtagttagtttaggagatatcgagttgtgttgggttataggagtgagtatttgtagagtttagtagagatggtcgtagtgataggagggttagggggtttaggagttaggaggagaggatttagaaagggggttttggaattgcgtagtgtggtatagataaaagtaaggtggtagttttgggaggtgtgattatataggttgtgagggaggtaggggtgaggggaaaattgaattgtgttggattttgtgagttgttgatttgttatttatggttcgtgaaaataatttatggttgttgagtgttaattttatgtaaggtatagggttaaatgtttttattaaaataattttattttatttttataataacgttgaggagtgagtgttaatgttattttttttttataga

SEQ ID NO: 482 - DNA, 6048 bp, Artificial Sequence
  chemically treated genomic DNA (Homo sapiens)
tttgtgggaaagaaataatattagtatttattttttagcgttgttgtgaggatgaaatgagattattttggtaaaggtatttagttttgtgttttgtatggagttggtatttagtaattataggttatttttacgagttataaatagtaggttagtagtttatagaatttagtatagtttagttttttttttatttttgttttttttatagtttgtgtggttatattttttaggattgttattttgtttttgtttgtgttatattgcgtagttttaaagttttttttttggattttttttttttaatttttgggttttttggtttttttgttattgcggttatttttgttgggttttgtaggtgtttatttttgtggtttagtatagttcgatgttttttgggttggttgtttttatattttttttttttgttttttttttattacgtttagttttttttttttatatttttttttttattttatatttttcgtttttttgttgtttttatttttatttcgagattttttttgtgggaagggtggggagggaggagggggttgggaataaatagaggggagaggtatttttagatatgttgtagataaagaaaaagagagagtaataggaagagtgatagagtgaggcggtgattgaaatttatatagattgaaacgatagagagattcgttaagaggacgattgaggttagagagatatcgagagatagagaaaaagggtttaatgtacgtcgatttagagagtgggcggggggggggtattcggaggtttggagttcgggaagcgtttgttatcgagagtttaagatttaagagatagtaggaaatatgcgagatagagaaatttagagagatagtaagttagagagaagttgagaggaaagatggaaattttattaagtttaaggtttagtttttttttagggattttttatttacgttggtatttttggtttagtttttgtttggtttttttggttttttttttcgttaagagaagtttttgaaattagttgtagtttagttttttttttcgagttttgtcgttaatggtttagtttttgataggttcgggggttggggattgtaatatttttcgagttttttttttgtttttttttgcgttttcgagggtataggtagttttttttttttaggaaggagtttgtgagggaagttggtgaggttcgggtagtttttttgttttgggggttttaaagggttggggaatgtggtaacgatgttttttttttttgttttcggattttttgagtttaaagttttgaggttgggtagggtttaggtttttatttggttgggtgttatttttatgttttttgttttgggggagtattatttggaggtaggttttggttggaaggtttattcggttttaagtttttttttagttttagttttggggattatatttttatagtatttagaagggtgtgttttaggttttagggaattgtgtaatttaatatttattgtttttttttttattacgtattttgtgtattgtttatagattaggtagatggagaaataggaattttgggggtaagataggaggacgttttggtgaggtacggggtttttatatgtttattaaaaattaggaatgtttatttataatggttttgtaatattgaatattttgtaattgagtgaaatagattatattttatgttttttattgtttgtatttatgatttttttaaaattataaataattttttttgtattttttgagaaaggtttaaattgtttatagtttattggatttataatttaaaaaaggttaggtgttaatagattagtagattgtttttaatatataatttttttgaggtatttgggtttggtgtgatgttgtagattagggttgtagttttagttttaagttaaatgatttgattgtttgttgtaatttttttaagatattttataggttttgttcgtttagtgagttttatggatttttttttttttaaatataattagaattttgggtatttattgtaaagtttaatttggttttacgtttgaatatttttatgataatatttggaaaatataaatataattgaaattaatattagttagttttaagttatttttatttattgtttagataatcgtaatagttttttgtttgtttttttgtttttattttatttttgttttcgtatttgtttgtaatttttttagtagttagtgcgatattaattaaatagaagtttgattagtttattttcgttttaatttttttaatggtttttgttttatttagagttaaagttaaagttttttggatggtttataaggttttataaaatttggtatttttgttattttttggattttttttttgttatttttttttttgttgttttgttttagttattttgtgttttttgttttttgaatttgttatgttgttttttgttttagggtttttgtatttgttgttttatttgtttggattttttttttcgtaaatagttatatgggttggtttttttttttttttaggtttttgtttaaatgttatttttttattgaggttttttttgagtattttttttaaaatttgtaagtttttttttttttattttttattttttttttttttaaatttttttttattatttgatattggttgttttaatttttattagattgaaagttttataagagtaatagtttttatttgttttgtttaaaattttatttttagtgtttataatattgtttgttatatagtaaggtttttatgcgtgtttgttgaatgaatgattaattggatgaatttttttttattttattaaatttgtttttaatttttacgtattttgttatggtgaattaattattatttttttttttttttagttatgtagtttagggatttaggagttattttttataattttttttttatatttttatgtttagttagtttttttagtttttttttttttttttttttttttttttttttgagatagagttttattttgttatttaggttggaatgtagtggcgcgattttggattattgtaatttttgatttttaggtttaagtgatttttttgttttagttttttaagtagttggaattataaatgtttgttattatgtttggttaatttttgtatttttagtagagattgggttttattatgttggttaggttggttttgaattgttgattttaagtgattcgtttattttagttttttaaagtgttggttttataggcgtgaattatcgtatttggttttttggttattttaaatttattttttatttttatttttattttttttttttgagatggagtttcgttttgttatttaggttagagtgtagtggcgcgatttcggtttattgtaatttttgttttttaggtttaagtgatttttttgttttagttttttgagtagttgggattataggtacgtattattacgttcgattaatttttttgtatttttagtagagatagggttttgttatgttggttaggttggtttcgaatttttagttttaagtgatttgtttgtttcggtttttcgaagtgttgggattataggtatgagttatcgcgtttggttttagttagtttttaatgaaggagaatgggttttttgtttattatttagagaatttgtttttggagtaggtgtagggatataatggtgagatatagttttagtttttgtttttatggagttttcgttttagttttgttaatggttttgtaattttttttttttttcgtttttttttagaggttcgtcgttatattttaatttttgaatcggatatgtaagttattttcgttttttttttttgttttattagtttttgtttttttagatttagttcgttatgtttcggttatgttaaatttattagtatttttttgtttgttttaggttttggaataattttgtgttttttttttgcggagcgtttgttattttttgttggttgagttttgtttttgatttagtttaagtatttagtttgagtttagtatttttttgggtttttatattttagttaagttgaattaggggtttttttttttatttattttgtaatattgtagtaggttgttggtcgtttgttttttttattatattgtgaattttttgagggtagaaattgtatttttatttttgtttttttagttttagtatagtgtcggatatatagaggatatttaatgtatatttgttgggttgtagaattttggagatggtgtttattttttttaagtttttgttttttaatttgttatagtgataataattttttttagggattttgtgataattaaattagttattagaaatataatgtttagtatggtaattagcgtatagtaggtgtttaataaagttgtttttttttgtttttttttgtataatttaatatttaggagggagattttattatttttttttgtgttttattttttgttgaggatttgtattaggaaatggagttgtagtagttagaataaaagttagatttaaggaaatgaaagttagatttaaggaagagttttttttagagtgtattgaggttaagatgatgagttgaggagttaggttgttttaatttgttatttgttgtttgtgtgattttaaataaatgtttaatttttttaagtttcggttttgttatttgtaaaatggggttaatagtattggttttataggatttttgagagaaattagtgatcgtaaggtttgtggaatatagttaggaatatagtaaatgtttaataagtgtttattatggtgtattgaagagtataagatagacgaggagttattttttttattcgtatttagtgtcggttttgtggatatttttttttttagttgttttgtttttcgttttttttttattagataaggtttttgtgtgttggaaattttgggtaagggagtgttggtgagggaattttatttttggtagtttagttattgagtttcgagttgtttttgtttttgttattgtttgtgatgtgtggggtttttgggtaggttaaggagtagtttgttttagaggggtcggggcggggtttaggtgggtaagttggggtgagtgttcggaagttgaggttgtggtgtttagttgttagggtcggggttggttggaatatagtaggtagttaagattgtgtaaataggttattgtgtaaacgcgtttttgtgtgtgatttcgattgtgtaaataggtgtttattggaggttgtttcgtttggatagtttatttataaaaagtttttgagttgttgatttagaaagaaattggatatttttttttttttgaatttattttgaatttttcgttttttggtttttgtttaggttgttttttttgtttcgagtgtttttttttatttttattttaatttgttgaaattttatttattttttaaggtttagagaaaatgttattaagtttttttttttttttttttttttttttttttttttgagatagagttttattttttttgtttaggttggagtgtagtggcgcgatgttggtttattgtaattttttttttttaggtttatgcgatttttttgttttagttttttaagtagttgggattataggcgtttgttattatatttggttaatttttgtatatttagtagagaaagggttttattatggtggttaggttggtttcgaatttttgtttttaggtaattcgtttgttcggttttttaaagtgttgggattataggcgtgagttatcgtattgggttattaagtttttttttataagttttttttttatttgtagagtgtgttttgtggtatatttttagtgttttgatgatgttttattttatggcgttttttagatttgtaattttaaggatttttttttatttatttttgaaaggttgggaagttgaggtttagagagggaacgtgatttgtttatgttttatagttattttgaggttgagttgggttttaaat

SEQ ID NO: 483 - DNA, 5306 bp, Artificial Sequence
  chemically treated genomic DNA (Homo sapiens)
tgtagtgagcgagatcgtattattgtatttagtttaggcgataatagtgagattttattttaaaaaaaaaaaagagagagagagagaatggtgagattgtggatatattggatatataggatatggggtatgggggtttgaaatatcgttttataggatagatgtatataaataggaatgtagtttgttattgtgttttttttttttttttttatttttttttttatttttgggaaattatagtagtagaagttttatttaattaaatagttgttaattatatgagttgtatttttttttttttgaatagtaaatggttttttttttttttgtttttttttttttgtttgtagagtaatttttttttgtttattttgtagggtcgatagtttaaatatagtgttatggtgatgatattcgattttaagggtaacggtaataatgataaagagggtagagttgatttttttatttagttttgtttaagtatagaagatagagttaggaaagtttgagagtataaagattatttattttagtttataggtttatttttgagttttattttttttaatttagtagaattttttttatttttatgtttggataagaattttaaatttttgaggtttttattttgggtttggtagtagggtagtaaaggttattttgaataatgatagtaatgtttttgttgatagagtttagttggttagtggttgtgcgagtagtaggttttagtgtggttttgggttgttttttgtggtattttaaggttaaagatattttattttaggtatatattaaggttggagttgggtttttttttggacgtaggcgagcgtgtgttttattttttttagttaggtttgtttggtagagtaattggatttttttaattatggtttgtttgtaaaaatagttttttaaagagttgaagtttagtgtattatattttttttttatttttattttttgtttttttttttttttttatttaaatgttgttttttttatttaatagtttttttttttaagggagtattagtagttttttgttttgagttaattttttttttttatttttcgtatgggtagggagttttagatgaaatttagggtgtttttatggatttggattaaaatataatgttgttttgtttatggtggttttggggtttttgttttttatgtttgtttttcggtgggtaaggagttaggtaatagtgaatttagagatgaggatttttttatttttttttttggttttttcgttgttttgtttgtttttttttttgtttgtttgtttgtttttgagataagttagttttattttttcgttttggttggagtgtagtagtgtgatttcggtttatgataatttttgtttttcgggtttaagtaattttcgtgttttagtcgttttagtaattaggattatcggtaaatgttattattttcgttaatttttttatttttagtagagattagttttatttgttggttacgttggttttaaatttttgattttagtgatttatatgttttagttttttaaatgttgggattatagtatgagttattacgtcggtttattttgagttttttgaagttgacgttagaggtgtaaagcgtagtttttttttattggttacgtagaggtttttgttgggtagttttttagtttgtagtagttagggatttggttttaagtgatgttttaatagtgagcgattttttagtattgttaggggaattttaagtttaatttaaagttgattttttattagtaatgaatgatagatatggtttttattgtttaaggttttgggaagatttagattagagaaaatgattattgatttttatttatatttgtgggttttagtttttttttttggtttatggttggtatggtaattttttataaaggtgtttttttaggggtttttagagttttttgagttattataattttgcggttaatagaaatggagaggtgagaggagatatttttttgttttggtagttttatatgtttttggtagtaatttgtatggggagtttcgttattcgtgtgtttattgcggagttatgtagtggtttttaattagggtttttgttatttttttttttaagggaggttgtagattttttttatggttaaaaatttatatttaagtttttagtattggttaaaagattttgttatgggggttttttgttttagttgatattggaggaaggatggtgggggaggtagggatttttttttatttggagtttagggatttttttttatttttatttggttttttttttttgttggtgttggaaggagtaggggaaagtggtgattttatttttttttgattttatattttttagagttggtattatcgatgatattttttttggatttttttataggtttgtttggagaatagtttatagtatagtgtttttttagtagatgatgagtttggggtgttagtttagtaatgttttaggaatgacggtagaaaaaggagttttgttttttgttttgaaagtggggagatggtagggttttagtatttatattttaggttataggggtgtgggtgtttaatgttggttgttaatattattgttaattatttttggaagcgtttgtttgtttgtttgtttgtgtttttatagagttaagtgttagatgtttttaaatttaggggggaagattttattattagagagggtcgttttttttgttgttatttttgggggtatttgatgtttgtgatttttagattatattgaaatagttttaattttgggtattaggagataggaggtttagttttggttttttttgtttttatttttttttgttgtgaggtttttataaggtattttatgttattgggttatttttatttgagaattgagaaagaataatttgttttttatggaaagataaaattaggtaaagggttttttgtgttgggggtaggatttttgtatttagagggatatagaagttgaaataattgggttgggagcggtggtttatgttagtaattttagtattttgggaggttagggagggtggattatttaaagttaagagttcgagattagtttggttaatatagtgaaatttcgtttttatttaaaaagtataaaatttagttcggtatagtggcgggcgtttgtaattttagttattagggaggttgaggcgggagaattattggaatttaggaggtggaggttgttgtgaggtaatattatgttattgtattttagtttcggagatagaatgagattttattaaaaataagaaagaaagaaagataaagagagaaagaaagaaagaaagaaagaaagaaagagagagagagagagagagagagaaagaaagaaagaaagaaagaaagaaagaaagaaagaaagaaagaaagaaagaaagaaggaaagaaagaaaggaaattaaaataattaaataattgagtagtattatattatttgttttggagaaaggatttttgttgttgttgttgttgttgttgtcgttgttgtggttgttgaaatggagttttattttggcgtttaggttggagtgttatggtttaattttggtttacggtaatttttgcgttttgggtttaagcgattttatttttttatttttcggagtaattgggattgtaggtttttgttattatatatagttatttttgtatttttaagagatggagttttgttatgttggttagtttggttttgaatttttgattttaagtgatttatttattttagttttttaaagtgttgggattataggtatgagttattatgttcggtttggagaaaggattttaaatgacgtaatgtgggaagagttaggttgtggagatttgttgttttggttgaggtagtttatgtaattagtttttttgagttttagttttttgatttgtgaaatgggatgatatttatattttttatataagataagttgtaggttagacgtgagaatgtataggtaggtttttgataattggataagttttatataggtttggaaaggaggaagagataaaagaggacgggtttttatggttggatagggtttttttcggcgtgatgtgttttgagttttaaagttggggaagagatttaaatttttaagagtttttttaattttgagattttttgttggttttaggattatgggaggaagcgtttgtggttcgtgtttgttttcgggatttttgttttttggtttgtatttttgttataggtttaaggagttggggtaatattttgagtttgggttattcgtttttagggatttgggggagttttatcgttttcgttttaaggtttagggaaaggggagagtaatgtgtggggttggttttttttagtggttagtgttagtattgtatttagttgatttaggtgggtttaggagttattagtaaaagtggaatttaggatttaatggtgtttagaatttttataatttattggttgtgtttggtttttttttttaatatatatattttgtttggtgggtggaagttaaatacgcggggaggaggaaaggaataggatagagagtggaatggggtcggtaggggttttaaggattggttattttgatagtttttttcgcgtttaggttgattaatatggtttgtagttagagggtatttatttgatttttaaagagaggataagttgggtggagtttgtggttgatattttgtgtataatttttataatattggtgatggtgagaagggaaagacgataagttagggggtatgattttagtatgtgtgggaggagtttttaaattatttattagtataagttcgttagtggttttatgtataaatgtatatagaaataggtggggttaagtagggagagagaattggttagggtataaaaagggtttataagagatcggttttaggattttaaggtttaatttttcgaattatttagggttttgtggatagtttatttagtggtaatggttttaggtaagcgtttttaaaatttttttgggtataacgtgttttgaggggagaggtagcgttttgtagatgggacgggggtattaatttttaggtttggggtttatgaatgtgagtatcgttatttaaggttagatatttggttaatttttgaatgtttttggtttttggagggatggagagagagaaaaaaaataaatagtttttggagtagggagagcgttggttttttttttttcggttttttttattgtttttcggtttttttttagg

SEQ ID NO: 484 - DNA, 5306 bp, Artificial Sequence
  chemically treated genomic DNA (Homo sapiens)
tttggggagaaatcggagggtaatggagggagtcggagaggaagaggttagcgttttttttgttttaggagttgtttgttttttttttttttttttatttttttagagattaggaatatttagagattggttaaatatttggttttagatggcgatatttatatttataagttttaaatttgagggttagtgttttcgttttatttatagggcgttgtttttttttttaggatacgttgtgtttaaagggattttaggggcgtttatttggagttattgttattaggtgagttgtttataggattttgagtggttcggggagttgggttttgggattttagagtcggttttttgtgggttttttttatattttggttagttttttttttttgtttgattttatttgtttttgtgtatatttatgtatggggttattgacgggtttgtgttagtggataatttagaagttttttttatatatgttgggattatgttttttggtttgtcgtttttttttttttattattattagtgttgtaaggattgtgtatagagtgttagttatagattttatttaatttgttttttttttaagggttaggtgggtgttttttggttgtaggttatgttggttaatttgaacgcggggaaggttgttaggatagttagtttttgagatttttatcgattttattttattttttattttattttttttttttttttcgcgtgtttaatttttatttattagatagaatgtgtgtgttgggaaaaggggttaagtatagttaatagattgtgggggttttgagtattattgagttttgaattttatttttgttgatgatttttgggtttatttgagttagttggatgtagtgttaatattgattattagagagaattaattttatatattgtttttttttttttttgaattttggggcggaggcggtggggtttttttaggtttttggggacgaataatttagatttaaggtattgttttagttttttggatttgtagtagagatataaattaagaaatagaaatttcgggaatagatacggattataagcgtttttttttatagttttgaaattaatagagaattttaaagttggaagagtttttgaagatttgagttttttttttagttttaaaatttagaatatattacgtcgaaagaggttttatttagttatggaagttcgtttttttttgttttttttttttttttagatttgtgtagagtttatttagttgttaaaggtttgtttgtgtatttttacgtttgatttgtaatttgttttgtgtaggaggtatgagtattattttattttatagattaggagattgaggtttagagagattgattgtatgagttattttagttagggtagtagatttttataatttggttttttttatattgcgttatttaaagttttttttttaggtcgggtatggtggtttatgtttgtaattttagtattttggaagattgaggtgggtggattatttgaggttaggagtttaaggttagattagttaatatggtaaaattttattttttaaaaatataaaagtagttgtgtgtggtggtagaagtttgtaattttagttatttcggagggtgaggaggtagaatcgtttgaatttaggacgtagaggttgtcgtgagttaagattgggttatggtattttagtttgggcgttagagtgagattttattttaataattataataacgataataataataataataataataaaagttttttttttagagtaggtggtgtggtgttatttagttatttagttattttagttttttttttttttttttttttttttttttttttttttttttttttttttttttttttttttttttttttttttttttttttttttttttttttttttttttttttttttttttttttttttttttttttttttgttttttttttttttttgtttttgatggagttttattttgttttcgaggttggagtgtagtggtatgatgttgttttatagtaatttttattttttgggttttagtgattttttcgttttagtttttttagtagttgggattataggcgttcgttattatgtcgggttaagttttgtattttttaagtagagacggggttttattatgttggttaggttggtttcgagtttttgattttaggtgatttattttttttggttttttaaagtattgagattattggtatgagttatcgtttttaatttagttattttagtttttatatttttttgagtgtagggattttgtttttaatataaggggttttttgtttgattttgtttttttataaggggtagattgtttttttttaatttttaggtgagaatggtttagtggtatggggtgttttgtggaaattttatagtaggaaaaggtgaaggtagagaaggttaggattgagttttttgttttttggtgtttagagttggggttattttaatataatttggaggttataagtattagatgtttttagagatggtagtaggaaagacgattttttttagtggtgaaatttttttttttgagtttaagagtatttagtatttgattttgtagaaatataagtaaataaataggtaaacgtttttagaagtggttggtagtggtgttggtaattaatattgaatatttatatttttgtggtttaggatgtgaatgttggggttttgttatttttttatttttagagtagaaaatagagtttttttttttgtcgttatttttgaagtattattggattagtattttagatttattatttgttgggagggtattgtgttgtgagttgttttttaggtaggtttgtaggaggatttaagaggggtgttatcgatgatattagttttgagaaatatggggttaagggagggtggagttattatttttttttgttttttttagtattagtaaagaggaggagttaggtgggaatggaagagggtttttgagttttaagtagaagagggtttttgttttttttattattttttttttaatgttagttgggatagggagtttttatgatagggttttttagttagtgttggggatttagatgtggatttttggttatggaagaagtttgtagttttttttaggaaagagggtggtaggggttttagttggggattattatataatttcgtagtgggtatacgggtggcgaggttttttatgtaggttattgttaggaatatgtgggattgttagggtaggggagtgtttttttttatttttttatttttgttgatcgtagaattatggtgatttagaggattttaggaatttttggggaaatatttttgtaaggggttattatgttaattatggattagagggaagaattgaggtttataggtgtgggtagaagttaatgattattttttttagtttagatttttttagagttttgagtaatggagattatgtttattatttattgttggtaaaaaattaattttgaattagatttgggatttttttgatagtattgggaagtcgtttattgttggggtattatttgaggttagatttttggttgttgtaggttgagagattatttaataagagtttttacgtggttagtggggagaggttgcgttttgtatttttggcgttagttttaaaaggtttaggataggtcggcgtggtggtttatgttgtaattttaatatttgggaggttgagatatgtggattattgaagttaggagtttgagattagcgtggttaataggtgaaattgatttttattaaaaatagaaaaattagcgggggtggtggtatttgtcgataattttagttattggagcggttgaggtacgagaattgtttgaattcgggaggtagaggttgttatgagtcgagattatattattgtattttagttagggcgaagaagtgagattgatttgttttaaaaataagtaaataaataaagaaagaaataaataaaataacgaaaaaattaaaaagaaaagtagaaaaatttttatttttgagtttattgttatttagttttttatttatcgagaaataaatatgggaagtaggggttttagggttattatggatagagtagtattatattttagtttaaatttataagaatattttaggttttatttgggattttttgtttatacggaaagtgggaaagaagagttggtttaaagtagggagttgttagtgtttttttgggaaggaaagttgttgagtgaaggggatagtatttgggtgaggggaggagagggagtagggggtgaaggtagggagggagtgtggtgtattgaattttagttttttgggaaattgtttttgtagataagttatggttagaggaatttagttgttttgttaaatagatttggttggaagggatggaatatacgttcgtttgcgtttaaagggaaatttagttttagttttggtgtgtatttggaatggggtgtttttgattttgaagtgttatagaaggtaatttagaattatattggaatttattgttcgtatagttattaattagttgggttttgttagtaaagatattgttgttattgtttaaggtaatttttgttgttttgttgttaggtttaggatggaaattttaggggtttgggatttttatttaagtatgaaaataagaaagattttattaggttgggaagaatgagatttagaagtgggtttgtgggttggggtgggtgatttttgtatttttagatttttttaattttattttttgtgtttgggtaggattggatgaaggaattagttttattttttttgttattattatcgttgtttttggagtcgggtgttattattatagtattgtatttgagttatcggttttgtaaagtagataggaggaaattgttttataggtagaaagaggaggataaagaggaggaaagttatttgttgtttaggaagagaaaagtataatttatataattgatagttatttgattgaatgagatttttgttattgtggttttttagggatgggagaagggatagaggagaaaggaagaaatataatggtaggttgtatttttatttgtgtatatttgttttgtaaaacggtgttttaggtttttatgttttatgttttgtgtgtttaatatgtttataattttattatttttttttttttttttttttttttttgagatggagttttattgttgtcgtttaggttggatgtaatgatgcgatttcgtttattgta

SEQ ID NO: 485 - DNA, 8805 bp, Artificial Sequence
  chemically treated genomic DNA (Homo sapiens)
ttaaaaatgtaaaaattagttaggtgcggtggtaggtatttgtaattttagttattttagaggttgaggtaggagaattatttgaattcgggaggtggaggttgtagggagtaaagatcgttttatttgggtgatagagtaagattttattttaaaaaaaaaaaaaaaaatattaatttatataatttgttatttataatatggttattttttttatttatatttaaattaaaggaggtaatattttatggatatttattgtttatatcgaatatttttaggtgttatagggattttaaagatgtgtggggtatgtttttgaagtttatattttgataagggaatagattatggatataagagtataaaaagaaggtagaaaaataagaattttgtgaaagattttgtgaaagattttgtaaagtaaatttgagtttattttttgggttagttttagaggaagagtaaattttaattagtggagaagaagaggaaggaggggatgttataaaaaggaaaattattaataaatgtgggaggttgaaaggaagtttgaagaatagtgagaatattagtttgattaggataggaaaattttgtggaaataaaagaggttttaggtttgattttggagaaaatatttagttgttgaagatttttgaggttagaagttatataataaaatttaaattttaggaagattaatttggtaatgatggaattgataacgaatggtaagtatgtaggttagatagaaatttattataatgattgtaggttattgagttaggtatatttcgtgtataaattaatgttagttgaagttattaaattttatatatgtattttaaatatagtatagaatttttatattgattttataaaatttgaatttataattttttattttttttttttgtttttattttaggtaataatttttggtttagaatttttattttattattttttatttaatatttgtattaataagaaattattatttttatatattagtaaaagtaataagattatacgtttttattttattagaagagtatttaaagtaatttaaaataattgttttatattatatataagttttttttaaattttatattttattttttaagagaaatagtttttttttgtaggtagattaggtttataaatttaaaataaaatgaaaggtaattatttagtgaattcgtaatggttaatttagatatttttttaataggttggttgttataagtattatgaaagtagaaatttaatttcgtgtatgtaaattagtgatatataaatgttttttttttgttatagaaaaaggattgagttaagaaagtttttaacgttttatagattaaggtagttttatttgattttttaaaagaagagataaaaaagttaataaaattttttaaaaaggaaattgagattattgaaatagttatattatatgtgttttatagaatattatgtttggtttttaataaattcgatttttgaaaaggaatagagtagtagatattaatttaaaaaaaaaaaaaagattcgagaaaaattaattttgtttgggttatttaaagaatagtatacgtttagggatataggattaagtagaggatggtgttttcgtttacgagatagttgtgtttttgtttttatgaatttttatttgagttttaaaaggttgttatttagtgatttttttagtagttagtttttttttttatttcgagaagtattgagttacgaatagttgattggtttagggaggttagataatagtttttagtttaatagagtagtttaggaatagatattggttatttgataggaagaaaaggatgtaaaggagtaaggatgtaaaggaaggaacggatgtaaaggagtgaggttgtaaaaaatagaaaaggatgtaaaggaaggtggaggggagaagggaggaggatgtatagaagtaattaagatagaggtttagaagatatatttatttaaagagaggaaattttgtttggaggtttttagttagggagaagagtttttttgttttgttttgttttaaatttaggtaaataaggatattgttttgaaacggttattggagtttaatttatatgaataatttagtagttttataataattttgagtgggtaaggattttttatatatattaatatttagaaaatgtagtttattgaataaatttattgaaagatgttatgttttttaaaaattgtatttaattttagggtttttgtttatagtgattttagttttatatgagagttttaattgaaggaggattaggggggtgagggaggtgtagaatataaatgaaatttttatagtatggaaataaaagtatttttaaatttttttgggggtgaagagttaggtaagaagtaatacgtggaaattgttaagtgtttttttatatatttatttattagatattatcgtagtcggttgggggagtttttttttttttgtttgatagttttattttttttgagatttggagttggtgattatattggttcgttatggtatttttagttaataaagtagttatttaacggggtaaaaagttataaaggagtagagtagttgttgttgtattcgtgatgtaagtgtaggatgagtttcgggtcgttatcgtcgtttcggttttttcgtgacgttcgggaagggtattttcggtatttaggaagtggtggtcgcgggtagtttcgtttttacgcgattcggggttggtcgagttgtcgggtggtagaatcgtcgggtttttcgtagggcgggcggggattatcgtttttttattttcgtgcgtatatatatgtacgggtttcgcgtttcgttgtcgttcgcgtttcgttttgtttattttttatagttcgcgtcggacgaagagagtcgttagcgtttttttttttttttacggttcgtatttatttatttcgattttcggcgtcgagttcggtttttcgtcgtcggttattagatttggtcgaatcgagtttaagatggcgatttcgttttcgtttttttcgtattttcggcggggttagggcgtttttttacgcggcgggttcgcgttcgagattcggttaaaaatagttaggttcgattatatttggttcggtcggattttggcgcggtcgcgcgtttttcgtttcgtttcgtttcgtttcgcgcgttttgtttcgtttcgcgcggcgttgaatggagaaggggcgggggtgatcgaggggaatttatttcgttatttgcggcgcgcgtcggcggcgggtttcggttaatcgtcgaatttagtaatatcgtttgcgttaattacgcgtttcgcgtgcgttagcgtcgcgcggttttaggttttgttttttttttttaagtttttgaatggatataatgtagtagcgtttttttttttttcgaggttggattggaattcgtcgtagtgtagagattcggttgttttcggttgggttaattttcggggtatttttttacgatttttttcgtattatcgtgtttgaattggaagtggaggcgaagaaagatatatatgttatatttatttatatgtagtttgtttttaagtttttggttttagttcgaatttttttcgattttgaaatgtgtgttgtttataaaggaattttgtattttttttcggcgtagcgtttttcgttttcgttatatatatataaattgggataggttaaatatataaaacggtatttgtgatttaagcggattatatggggattattttatttgtattgttttatttaaatatttttttttgtttaaaaatttatttttgaaagagattgcgtttatttagtagtaatttttgggattaggggtttttaattttgataaattttgtttttattaagaaatttatatttaaatttattatttttaggaagaaattgtttttttttatatagttatttaggttttcggtatattattttatgataaatgtgttcgaggagattaaagtaaattttttagcgagggattgattaataagttttgttgattgatttcgaaatgtttaatttgggagatgtgggcggagggtatttataattattaaaaagtgaaagtgttagttgagagttttatttttgattcggtgtcggggaggaggaatgatttgtaatagttagattcgtttagttgtttaatacgtgtgtgtttgttttatatatagagtagtttttgttgtagcgcgcgtgtgtatgatggatgtgtatttcgttgggttataacgtgtttagttaagaaatttacgtcgtacgtgtaaagaaattaaattttattttcggaattatttgtatttttgtgtgaaatacgtatttagtaaatgatgcggggaggggggattagtttgggcgtagaggatcggagtaacgtaaatagttttagaatttatgtaagaggaaagtgtagttgtattttagggcgttttcgggttggtgttagacgttttttgtatcggttgttaggttattggagttggttagaagttggttggcggagttttttttttcggaagagttgtttttttttttatttttttcgttttggtttcgtgtttcggggtagtttcggaggcgcgttagtagtatttttttaattttattttattcgagtttgatagttgggcggtttcgtttgattcgtgggtaggtcgttgtattttttcgtagacgtacgttttggcgagcggtttcgttgtaaaaagagaagtttttaggtcggggtcggtcgtgcggcggagtttttattgtgcggtcgtgcgattggtcgaggaacgcgcgcgcgcgcgcgcgtatacgaatatatatattttttttcgtatacgcggaatcggttgggttaggggagggaggaggagggtgacgtagcgttttatggcgttatattgacgtttcgtattttaggtattttatggagaggtcgttagggtttttgtggtataaatgacgtgtcgagagagcgagcgaacgcgtagtcgggagagcggagttttttgtttttcgttttttatttttttagtttatgtttttttttcgttttttatatatagacgcgtttatattcgtttttttattcgtatatatagatataagcgcgtatataggtttcgtatatatatttcgttttttcgcgcgtttatattttttttgttttgagtttttgtcggtgtagcgcggcgtcgtagttggacgtttttttcgggtttattttgtaacgttgacggtgtcggtagtggtcgtggaggtgggaatagcggcggtatttttttttttggttatagtttaagttaggacgttcgcggaatttttcggttgtgtttttttatgagtcgggatcgtagtattttttattagtcgtttatcgttttcgggagtcgttgggtttgtatatcgtagttttttcgggatagtagttgtgatttttttttagtgtagatttcgggatagttttttagaaattcgttttaaagacggaatcgttatagtatttaagtacgtatgagattcgtttagttaataaggggatttgttaaaaaagttggtttgttgggaagcgtcgtttttgaaattgataattttgagtgtggggtttttttttttgattttgtcgttcggtttcggttttgttagtttagcggttcgtaggttttgatttgaaattttttttttgtagtgggttcgcggggatttttggagttcgtgggatttttttttttattcgaagaggcgaaaagtttttaataaagaggaggatcgggatttgtgttatagcggttttagcgatgtaatttagggtatttcggttttagttgttatggtaatgatgttttcggcggcggcggtagcggcggtagcggtagcggtagggagttgtagtttcggtgatgaacggtagtaatttttttgttttttaagtaggattgaaaataggagttttggtgggtttaagtaaatgttgttaatggtggtatcgagttggttttttggaaggaagtttaggagggaagggtttaggtagcgacggttagagtttgtagacgtattcggaggattttaggaaagagggcgtaattgtaggaatgtggtttattgtattgaaatgagtttggggttttattaggtacgtttgtttgtcgtcgttgatatgtcggtttatattttttttttaggaggtaaatcgggtgtaattggcgattttcgtatattgatacgtgtggggacggtgttttttttttttggacgttggttcggtgtgggaaaggtatgtttttttacggatagaattcgcgtttttggagaagttgtttcgagtgttttatttttagtagaaatgaaagttttcggtggtgagacgagagcggttatgcgagcgtagtttgcggagattgatttttaaaggtatttttttaatttgttggaagtttcggggtagtggtgaggaagaacgtatttgttttttgatttttaaaaacgtttttggagattgttttttatttatttatgcgttcggattttttagagggaagagttgcgaggagttagtaattagaaatgtcgggttgttattttagggttttgtggtgttgggagagaagaatagggagtcgttattttatcgcgagtttagtgtcggattttttttttttacgatcgggaaatattttatagaattaagttagggaaagaaaaagttgtttaacgtggttgatgggtataatgaatgaagttattttattcgagttattttcgttgaataagatgttcgtagagttagtattaaagtttttttaggttatagtaatttttacgttcgtttcgttttttatttttcggtatttatttatttttttgtttgggatcgtgcgtttatagaaattttttttcgcggtttgtttagtttttttcggtttttttgagaattttagtttttttttttttgttagtttttttttcgttttttttgttttcgtttaattttcgttttcgttttttagggttggaaatttcgtagaggagtttcggttataatggtgcgttttacggttttttttatatattttattatcgggaggggaatacgggggtgtttttttcgtttgtttacgagaaagaaaggggttttgatagaggtagttatttttttttaatttataattttaaggttttgtgttttcggtttcggcggtcgtaagtaggagcggcggaacgtgtttttaggtattgaggttttgtttaggtaatcggtcgtttgtggggtggagagagcggcggggcgttgggttgggttggaggaaaggttgtgtgggtttttttcgcgaacgttgggcgttcgaggggaattttttcgttggggagaggcggttttcgtttattcgagttttgaggtttttttttagagaacgatttcgtttgaaaggtttttagggaatgcgggacgggaatgcgggtatttattgaaggggcgggtgggggattgttggagatttttattgaagatgcggggagacgggaagtacgtgttatagtcgtgggaagattcgtttttattcgcgttatatcgagcgtaagtttttcgttcgagtagttttagttggggttgggggtggtaagggaattttttattttttggtcgtcgagggttttttggatttgggagtttcgagtttttttttttttttttgtaggtaagtttcgggtttaggggcgttaggagatgattttcgtggtttcgcgtatttcggaggtttttggtttggtttgatttggggtttttcggtttttgtttttatttttcgagttgcgtttatttcgggtaaagggggcgttataggtcggagtttgggtatttagttttttttttgaggtttgttgagttgcgtttttagttataaagtttcgttgaggttgtgggttgagacgttggtttcggagttgcgttcggcgtttttaggaatgtgttttcgttaggtcgttgggtggttaggagtttttaagtcgtttattttcgaagatatcgttttttgggtgtaggggatttgttttcgttcgttttattagtcgttaacgtcgttcgtttcgtttttttgtttttagcgttagtttttttatcgttgtgtttttttgtttgtttgatttttggttttcgaaattcgcggttaatagaagcgaagttttattagtatttagaatgaaaagcgtagatttttttaatttttcggggtatttatgtattcgtttcggattttgtgtattttttatgtaacgtgtaaaatttgtatttgaggggtgggggcgggcggagttggaaaatggttttttttcgttggtgaatatttattgatttttcgtattcgggcggagttcgttttttaagtgttttgttttttttggtttttttgatttcgtaagttcggaattaattgtgggggtagagagattaatttttgggtaataataggttgcgcgttttttttttagtttcggttttggtgttataaaacggtggtaggcgtagtgggttttaataattttttttcggttttttcgaggtcgtgtgatgttttttgtttagggggatttttgtattattaattatttttaattttacgataattttttgtaattaatgtaatatttttagaggttgttaattaatttttttagtttttaatgcgtttagttcgggtcgtagtgatttattttggttttattgtgatttatgtttttttttattttgtttgtaga

SEQ ID NO: 486 - DNA, 8805 bp, Artificial Sequence
  chemically treated genomic DNA (Homo sapiens)
tttataggtaaggtgaaagaggatataggttatagtgagattaggatgggttattacggttcgggttgggcgtattggggattgggggaattggttggtaatttttagaaatgttatattaattataaagaattatcgtaaaattaagggtgattaatggtataggagtttttttgggtaagaagtattatacggtttcggggaagtcgaggaaaggttgttggaatttattgcgtttattatcgttttgtggtattaaaatcgaggttaaaaaaaaaacgcgtagtttgttattgtttagaaattgatttttttgtttttataattgatttcgagtttacgaagttaggaaaattaaagaaagtagaatatttgaggaacgagtttcgttcgaatacggggggttagtgagtgtttattagcggaaaaaagttattttttagtttcgttcgtttttattttttaaatataaattttatacgttgtataggaaatgtataaggttcggaacgaatgtatgaatgtttcgaggaattaagaaagtttgcgttttttattttaaatgttaatggagtttcgtttttattagtcgcgagtttcgagggttaggggttaagtaaataaaagggtatagcgatgagaaggttggcgttggaagtaaggggacgaagcggacggcgttagcggttgatgggacgagcggaggtaggttttttgtatttagagggcggtgttttcgagggtgggcggtttggaggtttttggttatttagcggtttagcgggggtatatttttgagggcgtcgagcgtagtttcgggattagcgttttagtttatagttttagcgaaattttgtagttgaaagcgtagtttagtaggttttagggaaggaattgggtgtttaaatttcggtttatagcgttttttttgttcggggtgggcgtagttcgaagagtgggaatagggatcgaaaaattttaaattaaattaaattaaaaattttcgaggtgcgcggggttacgagggttattttttggcgtttttgagttcggggtttgtttgtaggaagagagaaagggattcggggtttttaggtttaggaaattttcgacgattaggaaatgggggatttttttgttatttttagttttagttggagttgttcggacggaaagtttgcgttcgatgtagcgcgggtagaagcggatttttttacggttgtagtacgtgtttttcgttttttcgtatttttaatgggggtttttagtaattttttattcgtttttttagtgggtgttcgtattttcgtttcgtattttttgagggttttttaagcggagtcgttttttgagaggaggttttagaattcgggtgggcggggatcgtttttttttaacgaaggagtttttttcgagcgtttagcgttcgcgggagggatttatatagttttttttttagtttagtttagcgtttcgtcgttttttttattttataagcggtcggttatttaggtaaagttttagtgtttggaaatacgtttcgtcgtttttgtttgcggtcgtcggggtcgggagtatagagttttggggttgtaaattaggaagaaataattatttttgttaaagtttttttttttttcgtgggtagacgaaaggaatattttcgtgtttttttttcggtggtgaagtgtgtggaggaaatcgtgaaacgtattattgtgatcggggtttttttgcggagtttttaattttggggagcgggggcggaggttgggcgggggtaagaggagcgagggagagattgatagaaagggaaagattgagatttttagaaagatcgagggagattagataaatcgcggggaagaatttttgtgagcgtacggttttaggtaaaggggtggatgggtgtcggggggtggggggcggagcggacgtggaggttgttgtggtttaaggaggttttgatattaattttgcgagtattttgtttagcgaaaataattcgaataaagtaattttatttattgtgtttattagttacgttaggtagttttttttttttttaatttgattttataaaatatttttcggtcgtgggaaaaggagattcggtattggattcgcgatggaatgacggttttttgttttttttttttagtattataaggttttgggatgatagttcgatatttttgattattaatttttcgtagtttttttttttggagaattcggacgtataaataaataaaaggtaatttttaagaacgtttttggaaattaagggataaatgcgtttttttttattattgtttcgaggtttttaataggttggagaggtgtttttggaagttagttttcgtaggttgcgttcgtatgatcgttttcgttttattatcgagaatttttatttttattaagagtaaaatattcggagtaatttttttaaaagcgcgagttttgttcgtgaaaaagtatgttttttttatatcgagttaacgtttagaggagagggatatcgtttttatacgtgttagtgtgcgggagtcgttaattatattcgatttattttttaagggaaaagtgtaaatcggtatgttagcgacgataggtagacgtgtttagtggaattttaggtttattttaatataataagttatatttttataattacgtttttttttttgaggtttttcgagtgcgtttgtaaattttggtcgtcgttgtttaggttttttttttttaagtttttttttagagaattagttcggtgttattattagtaatatttatttggatttattagagtttttatttttaattttatttaaaaggtaggaaaattattgtcgtttattatcggagttgtaattttttgtcgttgtcgttgtcgtcgttgtcgtcgtcgtcgagagtattattattatgataattagagtcgaaatattttgaattatatcgttggagtcgttatagtataaatttcggtttttttttttgttagaggtttttcgttttttcgagtggggggaggaattttacgagttttagagattttcgcgggtttattataggggaaaagttttagattagaatttacgggtcgttgggttagtaaagtcggagtcgggcggtaaggttaggggagggaattttatatttaaagttgttaattttaggagcgacgttttttagtaagttaatttttttagtaagtttttttattaattgggcgaattttatacgtatttgagtgttgtggcggtttcgtttttagagcgagtttttagagagttgtttcgaaatttgtattgggggggagttatagttgttgtttcggaagggttgcggtgtataagtttagcggttttcggaggcggtgagcggttggtgggggatgttgcgatttcgatttatgggagagtatagtcgagaggtttcgcgggcgttttggtttgggttgtgattaggggggaggatgtcgtcgttgtttttatttttacggttattgtcggtatcgttagcgttgtaaagtgagttcgggaggggcgtttagttgcggcgtcgcgttgtatcggtaagggtttagggtaagaggggtgtgagcgcgcgggagagcgaagtgtgtgtgcggagtttgtgtgcgcgtttgtgtttgtgtgtgcgagtgagggagcgggtgtgagcgcgtttgtgtatggggagcggaggaggagtatgagttggaggggtggggggcgggaggtaggagatttcgttttttcggttgcgcgttcgttcgttttttcggtacgttatttatgttataggagttttagcggtttttttatagagtgtttggaatgcgagacgttaatgtgacgttatgggacgttacgttatttttttttttttttttttggtttagtcggtttcgcgtgtgcgagggagggtgtgtgtgttcgtgtgcgcgcgcgcgcgcgcgcgtttttcggttagtcgtacggtcgtataatggaaatttcgtcgtacggtcggtttcggtttgggggtttttttttttgtagcggaatcgttcgttagggcgtgcgtttgcgggagggtgtagcggtttgtttacgggttaggcgggatcgtttagttgttaggttcgggtggagtagagttggaggagtgttgttggcgcgttttcgaggttgtttcgaggtacggagttagggcgaggggggtaagggagaggatagttttttcgaaagggaaggtttcgttagttagtttttgattagttttagtgatttggtagtcggtgtagaaggcgtttggtattagttcgaagacgttttgaggtgtagttgtattttttttttgtataggttttaaagttgtttacgttgtttcggttttttgcgtttaggttaatttttttttttcgtattatttattgggtgcgtgttttatatagggatgtagatggtttcggggataaggtttgatttttttatacgtacggcgtgggttttttaattggatacgttataatttagcgaagtgtatatttattatgtatacgcgcgttgtagtagaaattattttgtgtgtaaaataaatatatacgtgttgaatagttgagcgggtttgattattgtaaattatttttttttttcggtatcgggttagaaatggaatttttaattagtatttttattttttgatggttgtagatgtttttcgtttatattttttaaattaaatatttcgaaattaattaataggatttattagttagtttttcgttaggggatttgttttggttttttcggatatatttgttatgaaatggtgtgtcgaaagtttgggtgattgtatgaaggagagtaatttttttttggaaatgataaatttaagtgtaaattttttgatgaaaataaaatttattagagttaaagatttttagttttaaaggttgttgttgagtgaacgtagttttttttagaaatgaatttttggataggagaaaatatttgagtgaaataatgtagatagagtggtttttatgtggttcgtttgaattataaatatcgttttatatgtttgatttgttttaatttgtgtgtgtgtggcgggggcggggggcgttgcgtcgaggggagatataagatttttttgtagatagtatatattttagaatcgaagaaggttcgagttaggattagaaatttgaaaataaattatatataggtaaatatggtatgtatattttttttcgtttttatttttaatttagatacggtggtgcggagaggatcgtgggagaatgtttcgaaagttgatttagtcgagagtaatcgagtttttgtattgcggcgggttttaatttagtttcggaaggaaggagggcgttgttatattgtatttatttaaaggtttgaagggggggagtaggatttggagtcgcgcggcgttgacgtacgcgaggcgcgtgattgacgtaggcgatgttattaaattcggcggttggtcgggattcgtcgtcggcgcgcgtcgtagatagcggagtaggtttttttcggttattttcgttttttttttatttaacgtcgcgcggggcggggtagggcgcgcggggcggggcggggcggggcggggagcgcgcggtcgcgttaggattcggtcgaattaaatatagtcgggtttggttatttttagtcgggtttcgggcgcgagttcgtcgcgtgagggggcgttttgatttcgtcgggagtgcggagggggcgggggcggagtcgttattttggattcggttcgattaggtttggtgatcggcgacgaggggtcgggttcggcgtcgggggtcggggtgagtgggtgcgagtcgtgggagagagggggggcgttggcggtttttttcgttcggcgcgggttgtgagaagtgagtagggcgaggcgcgggcgatagcggggcgcgaggttcgtgtatgtgtgtgcgtacggaggtggggagacggtgattttcgttcgttttgcggaaggttcggcggttttattattcggtagttcggttagtttcgagtcgcgtgggggcggagttgttcgcggttattattttttgagtgtcggggatatttttttcggacgttacggaggagtcgaggcggcggtggcggttcggggtttattttgtatttgtattacgggtgtagtagtagttgttttgtttttttgtggttttttgtttcgttgagtaattgttttgttaattgaaaatattatgacgggttagtgtgattattagttttagattttaaagaaagtgaagttgttaggtaagaagagggagatttttttagtcggttgcgatggtatttggtgggtggatgtgtagagaagtatttgatagtttttacgtattattttttgtttaattttttatttttaagaagatttaaaaatatttttatttttatgttgtaaaaattttatttgtgttttgtattttttttatttttttaatttttttttaattaaaatttttatgtagaattggaattattgtaagtaggaattttaaaattaggtatagtttttaggaaatatgatattttttaatgaatttatttaataaattatattttttaaatgttaatatgtatgaaaggtttttgtttatttagggttgttataaagttgttaaattgtttatatgagttgggttttagtgatcgttttaaagtagtatttttgtttatttaaatttaaaataaaataaaataaaaaaatttttttttttggttgagaatttttaagtaaagttttttttttttgagtgggtgtgttttttggatttttattttggttatttttgtgtatttttttttttttttttttttatttttttttatatttttttttgttttttatagttttatttttttatattcgtttttttttttatatttttatttttttatatttttttttttttattaagtggttaatatttgtttttggattgttttgttagattgagggttgttgtttgatttttttgagttaattaattgttcgtggtttagtgtttttcggggtaggaagggggattgattgttggagaggttattgagtggtagttttttgaaatttaaatggaaatttatggaagtagagatatagttgtttcgtagacggagatattattttttgtttaattttatgtttttaaacgtatgttgttttttaggtgatttaaatagaattagtttttttcgagttttttttttttttttgaattagtatttattgttttatttttttttaaaagtcggatttattagaaattaggtataatattttgtaaggtatatgtaatgtgattattttagtaattttaattttttttttaaaaaattttattaatttttttatttttttttttaggaaattaaataagattattttaatttgtgaaacgttgaaaatttttttggtttagttttttttttataatagaagagagatatttatatgttattagtttatatatacgaagttaagtttttgtttttatgatgtttatagtagttagtttgttaaagaagtatttaaattaattattacggatttattggatagttattttttattttgttttggatttgtaggtttaatttgtttgtaagaaagaattattttttttagaaaataaaatatgaaatttgggggaaatttatgtgtgatataaagtaattgttttaaattgttttaaatgtttttttgatgaagtaaagacgtataattttattgtttttattaatatatagagatgatgattttttattaatgtaaatattgggtgaggaatggtgaaataaaaattttaagttagaagttgttatttagggtgaaaataggaaagaaaagtaaaaaattgtaagtttaagttttgtggaattaatgtagaagttttatattatatttaaggtatatatataaaatttagtaattttagttgatattgatttatatacgagatgtatttggtttagtaatttgtaattattatagtaagtttttatttgatttatatgtttgttattcgttattaattttattattgttagattagtttttttaaaatttagattttgttatataatttttggttttaaaagtttttagtagttggatattttttttaaaattaaatttagagttttttttatttttatagaatttttttgttttagttaaattggtgtttttattgttttttaaatttttttttaattttttatatttgttgatagtttttttttttatggtatttttttttttttttttttttttattaattgaaatttattttttttttaaaattagtttaagaagtgaatttagatttattttataaagttttttatagagttttttataaagtttttatttttttgttttttttttgtgtttttgtgtttatggtttatttttttgttaaagtgtaagttttaaaagtatattttatatatttttgaaatttttgtggtatttaagaatgttcgatatggatagtaaatgtttataaaatattgttttttttaatttggatatgaatagagagaatagttatattataagtaataaattatatggattagtgtttttttttttttttttgagatggagttttgttttgttatttaggtgggacgatttttgttttttgtaatttttatttttcgggtttaagtgatttttttgttttagtttttggagtagttgggattataggtgtttgttatcgtatttggttaatttttgtatttttag

SEQ ID NO: 487 - DNA, 6464 bp, Artificial Sequence
  chemically treated genomic DNA (Homo sapiens)
atagtaattaagagttgatttttttattattagaagtgttgaatgttggatgattaattatatattgaagttatatgtgattttattatatataaaattaaatattgattttcggaaaataattttattttgtatttatttatgggataaatttttatttgattataaatggtttaaatatatgttttaaatgttttttaaaggttagaattgattaaatttaaaataagtaagataatgtattaaattttagtaaaaattttgtagagtgggtattgattgtataaatttataataattatataaaattatgtttttttaaattatagtggatagttatattgtataataataatgatatattttttaaaaagaaaaatcgatttaattttttttaattattaataattaattgaggtaaaggaggagattgatttttatttttaggggattataggttatttatttatttatttatttattttaaaatagagatgggtttttgttatgatatttaggttggttttaaatttttgatttaaagtaatttttttaatttggttttttaaagtgttgagatgataggtatgacgtattatgtttggttatattatagattttaaaaattttggattttgagtttatgaaaatttttatagttgttatgtaaattattaagaggtggtttgttttatgatgtaaattagatatttgttattgtttaattgattttttgtgatgttaaggttttttattattaaatttatttaaggggttttgtttggtatggtttatatttttagttgtttttaggtattttatatttcggaggttttgtttaaatttttgtttttggattatttgtaaaaattaaaattttttattttttgtgtgttaattatttattatattttgaggttggaaattttgtattgtttaaattttatgtttgtaatattttgtttagtatttttatttttttgaataaataagtaaataaatgaataaataaatgaggatatagattttttttataaattatagaagatttttatatagtttgatttttttttttttttattattatattttaagttttagggtatatgtgtataatgtgtaggtttgttatatatgtatatatgtgttatgttggtgtgttgtatttattaatttattatgtatattaggtatattttttaatgttatttttttttttttttttattttacgataggtttttgtgtgtgatgtttttttttttgtgtttaagtgtttttattgtttaatttttatttatgagtgagaatatgtggtgtttggttttttgtttttgtaatagtttgttgagaatgacggtttgtagttttatttatgtttttataaaggatatgaatttatttttttttatggttgtatagtattttatggtgtatatgtgttatatttttttaatttagtttattattgttggttatttgggttggttttaagtttttgttattgtgaatagtgtcgtaataaatatacgtgtgtatgtgtttttatagtagtatgatttataattttttgggtatatttttagtaatgggatggttgggttaaatggtatttttagttttagatttttgaggaattgttatattgttttttataatggttgaattagtttatagttttattaatagtgtgaaagtatttttatttttttatattttttttagtatttgttgttttttgattttttaatgattattattttaattggtgtgagatggtattttattgtggttttgatttgtatttttttgatggttagtgatgatgagtatttttttatgtgtttgttggttgtataaatgtttttttttgagaagtgtttgtttatattttttatttattttttgatggggttgtttgttttttttttgtaaatttgtttgagttttttgtagattttggatattagttttttgttagatgagtagattgtaaaaatttttttttattttgtaggttgtttgtttattttgatggtagttttttttgttgtgtagaggttttttagtttaattagattttatttgttaattttggtttttgttgttattgtttttggtgttttagatatgaagtttttgtttttgtttatgtttatgttttgaatggtattgtttaggtttttttttagggtttttatggttttaggtttaatatttaagtttttaatttattttgaattaatttttgtataaagtgtaaggaagggatttagttttagttttttatatatggttagttagtttttttagtattatttattaaatagggaattttttttttattttttgtttttgttaggtttgttaaagattagatggttgtagatgtgtagtgttaattttgagggttttgttttgttttattggtttatatttttgttttggttttagtattatgttgttttggttattgtagttttgtagtatagtttgaagttaggttatatgatgtttttagttttgtttttttggtttaggattgatttggtaatgcgggtttttttttggttttatatgaattttaaagtatttttttttttaattttgtgaaggaagttattggtagtttgatggggatggtattaaatttgtaaattattttgggtattatggttatttttataatattgattttttttatttatgagtatggaatgtttttttatttgtttgtgtttttttttattttattgagtagtggtttgtagttttttttgaagaggttttttatattttttgtaagttggatttttaggtattttattttttttgaagtaattgtgaatgggagtttattcgtgatttggttgtttgtttgttattggtataagaatgtttgtgatttttgtatattgattttgtattttgagattttgttgaagttgtatattagtttaaggagattttgggttgagatgatgggattttttaaatatataattatgttatttgtaaatagggataatttgattttttttttttttaattgaatgttttttattttttttttttgtttgattgtttaggttagaatttttaatattgttgaataggagtggtgagagagggtatttttgtttcgtgatagtttttaaagggagtgtttttagtttttgtttattcggtatgatattggttgtgggtttgttataaatagtttttattattttgagatatgttttattaatttcgaatttattgagagtttttagtatgaagggttattgaattttgttaaaggttttttttgtattttttgagataattatgtggtttttgtttttggttttgtttatatgttgtattacgtttattgatttttgtatgttgaattagttttgtattttagggatgaagtttatttgattatggtggataagttttttgatgtgttgttggatttggtttgttagtattttattgaggatttttgtatcgatgtttattagggatattggtttaaaattttttttttgttgtgtttttgttaggtattgatattaggatgatgatggttttataaaatgagttagggaggattttttttttttttattgattggaatagttttagaaggaatggtattagtttttttttgtatttttggtagaattcggttgtgaatttatttggttttggttttttttttggttggtaggtatagtttgattttgagttaggagtaaaataaattagtttttttgggtatatttttgggaaaagataaaattaaggtattgtaatatagttgatgtttgttttagttttttaaatgaattatagtgaataggaaatattagtaagttgttgaaatttatgtgatgtagttagtaaggaaaatattaattaaagagaattttaatatggaaaagtatattttttttgatttttaatttgaaattaattagtttgaaatgtgtgttaatttagaataatgttttttttatatgattgtgaaaaggttgtaaatattattattatttttttattttttaaaatatatagtatgattttttttttgtaaaaaagtaaagtcgtagttaataataatttttaaaaattttttttattatagatattttttttaggatatagtatttttttatattgtataatgatagttaatataaaggaatagagtttgggataggagagaggtatttttattttttttttttatttatttttaaaaaataggaaattagaggtatggtataattttttaaaattttttaaaattaaaattaatgaataaatattatttttaattagttaatgttataatttgttaaataaatattattataattaatatgtttaaaagaaagtaaataaaaaattgtttgttgtagtttaaatattattaaaatatataggatagttggatatttttttttgaaaaaaagattagagtatatatagtataagttaatttataaagtagatagttataataaataatagaggataagttgtattttaaaaggtaaataaatgatgaatttttttaatggtttggtatattgatagaaattggaacgtttttaagattttattttgtttttaggatttttattataggaattgaattttttaaaagatatatagagaattttattaatatgtttttgttaaattatttttttaatataaaattatgtttttataatagttataaatttggaaatttttgtattttaatttgtaataatgttattttattttttgtgtaatttgttattatagtatgaattattttttgttgaaaatttttagaattttttgggaaaggaattggatagaaaattagttttttatttgggagaatttttagaatttaaataaatttattggttgaattgaaattataaaattagtattttttaattattatatttaaatagcgtaaagtaaagagatcggttattattttggttattaatataatttgtttttttttagatttgggtttaaggtattgcgtttatatatagtaaaattgttattattttatattatttaattttttttttttattgtttattaagtatatttgtattatttttatatgtttgtaaatattaaaattttttatgattttttggtattttaaaaatttttttgtaaattttgatattattttatagttttaggtgatgaattaatatagttttataaaaatattaaattattttttgataattttgtaattaaaatatatttttaaagttgatatataattttagtagaggtttggggtaagttaatttaaattatttttatttaattttatgagaagttgttatgtaaataattttttatttttgtaattattatagtaaaaattatttttagtagaatagtttaaggttatttttgttttatgttatttgggtaataaaattaattttataatgtgaatatttattatagataattagttattgatggttattttgtaatgattattaaatttagatatttagaaagatataaatagtaaatttatttgggtttaaaaatatgttttttttattaatatatttagattttaaaatttgtagattgaagtaatatatataaatgttagtatttgtatgttgattaaggtgtgaataaatagtatgtgtgatttgattttttttttaatgatttttttggaaattatttttttagtatatgtggatgtttatatttcggggtttttgtaatttaatgaaattttggaaattaaatataagatatgttaatattttgattttatttaatttaattatttttatatatttatgttatgaatattttaatgtagtaaaatacgaagttatggttagattttttatttaaaaattgaaagagattaatagtttttatataacgtgtagataggattttttatgaagattttaaaagaaaagaatgtttttaaatagatttaaaagagaagtttatttttaaaattttttaataaaattaaattttagtttttagtggatttaattttattgtttattttagaaaatttgatttgttatttaggaggaaaagtgttttttttttttaattgtattttaatattagtatttttttatttttttaagttatattattatattaagaataaaatgttatgttttaaagtgttagtgaagaaaaatgtttgtaagaaattagtatttttaaataatataagaattaagaaaaataattagaatggtaaatattgatattgagtagtaaagtttttaaaattttaagtttataaaaatttatattatagttttttaaattagtttatttttattataatttgtttttttgttgaaaaattaagaattttttttaggaaataaatttaacgtaataatatttaatttttttttttttgtttttttatatagg

SEQ ID NO: 488 - DNA, 6464 bp, Artificial Sequence
  chemically treated genomic DNA (Homo sapiens)
tttatgtaagagaataaaaaagaaagagttagatattattacgttaaatttgttttttgaaaaaaatttttgattttttaataaaggagtaaattatgataaaagtaggttgatttgaggagttgtaatgtgaatttttataaatttaagattttaaaaattttattatttaatattaatgtttattattttagttattttttttagtttttatattatttagaaatattaattttttataaatatttttttttattaatattttaaaatataatattttgtttttaatgtaataatatggtttagagaaataaagaagtgttaatattgaaatataattgaaaaaagaaaatatttttttttttagatgataaattagattttttaaagtgggtaataaagttaaatttattgagaattggaatttaattttattgaaaagttttgaaaatgagttttttttttaaatttatttgagagtattttttttttttagagtttttatgaaaaattttgtttgtacgttatgtaaaagttattgattttttttaatttttaaataaagaatttagttataatttcgtgttttgttatattggaatatttatgatataaatatataaagatgattgaattggatagaattaaaatattgatatgttttatatttgatttttagagttttattaaattgtaagaatttcgaaatatggatatttatatgtattgggaaaatggtttttagagaaattattagaaaaaaaattaggttatatatattatttgtttatattttaattaatatataaatgttgatatttatatatattgttttagtttataaattttagaatttaaatgtgttaataaaaaaggtatatttttgaatttaaataaatttattatttgtgtttttttgaatatttaaatttaataattattataaagtagttattaatagttaattatttataatagatatttatattgtagagttaattttgttgtttaaatgatatgaaataaaaatggttttgaattattttgttagaaatggtttttgttatggtaattataaaaataagaaattatttgtataataattttttatagaattaggtaaaaataatttaaattagtttattttaagtttttattgaaattatgtattaattttaaaaatatattttagttataaaattattaaaaaatgatttggtatttttataaaattgtattgatttattatttaaagttgtaaaatggtattagaatttgtaaaaggatttttaaggtgttagaaaattataagaagttttaatatttgtaaatatatggaaatggtataaatatatttagtaaatagtggaagaaagagattagataatgtaaaatgatagtaattttgttgtatgtaaacgtagtattttaagtttaagtttggagagaagtaagttgtgttgatgattaagatgatggtcgatttttttgttttacgttatttaaatgtggtaattagaaaatgttaattttgtggttttagtttaattaataggtttatttaaattttaagaatttttttaaataggaaattaattttttgtttaattttttttttaggaaattttgagaatttttaatagggagtgatttatgttatgataatagattatataagaaataaagtggtattattgtaaattaaaatataaaaatttttaaatttatggttattataaaaatatgattttatgttgaagggataatttgataggaatatattaataaaattttttgtatattttttgaaaaatttaatttttataatggaaattttggggataaaatagggttttagaaacgttttaatttttattagtgtattaggttattaaaagaatttattatttatttattttttaaaatgtagtttgttttttattatttattgtgattatttgttttatggattaatttatattgtatatgttttgattttttttttaaagaaggatatttaattgttttatgtgttttggtgatatttaagttatagtagataattttttgtttgtttttttttaggtatattggttgtgatagtatttatttaataaattataatattgattaattagaagtaatatttatttattaattttaattttaaaagattttggaaaattatgttatatttttgattttttgttttttaaaagtaaataaaggaaagaaatgaaaatgttttttttttattttagattttgtttttttatgttaattattattatataatgtagaaaaatattatattttgaggaaaatatttgtaatagagagggtttttaaaaattgttgttgattgcgattttgtttttttataggaaaagaattatattatatattttaggaaataaaaaaatagtaatgatatttatagtttttttatagttatatgaaaagggtattattttgggttaatatatattttagattggttaattttagattggggattagaagagatgtatttttttatattaaagttttttttagttagtgttttttttattgattatattatataaattttaataatttattagtgttttttatttattgtgatttatttaagaggttgagataagtattagttgtattatagtattttggttttgtttttttttagaagtgtatttaggaaaattgatttattttatttttaatttaaaattaagttatatttattaattaaaaaaaaggttaggattagatggatttatagtcgaattttattagaggtataaggaggagttggtattattttttttgaaattattttaattaatagaaaaagaggaaattttttttaatttattttatgaggttattattattttgatattaatgtttggtagagatataatagaaaaagaattttagattaatatttttgatgaatatcgatgtaaaaatttttaataaaatattggtaaattaaatttagtagtatattaaaaagtttatttattatgattaagtgggttttatttttgggatgtaaggttggtttaatatataaaaattaataaacgtaatatagtatataaatagaattaaggataaaaattatatggttattttaaaagatgtagaaaaggtttttgataaaatttaatagttttttatgttaaaaatttttaataaattcgggattgatgagatatattttaaaataataagggttatttatgataaatttatagttagtattatatcgaatggataaaaattggaagtattttttttgaaaattgttacgagatagggatgtttttttttattatttttatttaatagtgttggaagttttggtttgggtaattaggtaagagaaggaaataaagggtatttaattaggaaaagaggaagttaaattgtttttgtttgtagatgatatgattgtatatttagaaaattttattattttagtttaaaatttttttaagttgatatataattttagtaaagttttaggatataaaattaatgtataaaaattataagtatttttatattaataatagataaatagttaaattacgagtgaatttttatttataattgttttaaagagaataaaatatttaggaatttagtttataaggaatgtgaaggatttttttaaggagaattataaattattgtttaatgaaataaaagaggatataaataaatggaagaatattttatgtttatggataggaagaattaatattgtgaaaatggttataatgtttaaggtaatttataggtttaatgttatttttattaagttattaatgattttttttatagaattggaaaaaaaagtattttaaagtttatatggaattaaaaaggagttcgtattgttaagttagttttaagttaaaagaataaagttggaggtattatatgatttgattttaaattatattataaggttatagtaattaaaatagtatagtattggaattaaaatagagatatagattaatggaatagaatagagtttttagaattaatattatatatttataattatttgatttttgataaatttgataaaagtaagaaatggggaaaggattttttatttaataaatggtgttgggaaaattggttagttatgtgtagaaagttgaaattggattttttttttatattttatataaaaattaatttaagatgaattaaagatttaaatattagatttaaaattataagaattttagaagaaaatttaggtaatattatttaggatataggtatgggtaagggtaaggattttatgtttaaaatattaaaagtaatggtaataaaagttaaaattgataaatgggatttaattaaattaaagagtttttgtatagtaaaagaaattattattagagtgaataggtaatttatagaatgggagaaaatttttgtaatttatttatttgataaagggttaatatttagaatttataaagaatttaaataaatttataagaaaaaaataaataattttattaaaaagtgggtgaaggatatgaatagatattttttaaaagaagatatttatgtagttaatagatatatgaaaaaatgtttattattattggttattagagaaatgtaaattaaaattataatgagatattattttatattagttagaatggtgattattaaaaagttaggaaataataggtgttggagagaatgtggagaaataggaatatttttatattgttggtgggattgtaaattagtttaattattgtggaagatagtgtggtaattttttaaggatttagaattagaaatattatttgatttagttattttattattgggaatatatttaaaggattataaattatgttgttataaagatatatgtatacgtgtgtttattgcggtattatttataataataaagatttggaattaatttaaatgattaataataatagattggattaagaaaatgtggtatatatatattatggaatattatgtagttataaaaaaggatgagtttatgttttttgtagggatatggatgaagttgtaaatcgttatttttagtaaattattgtaaggatagaaaattaaatattatatgtttttatttataggtgagaattgaataatgagaatatttggatataggaaggggaatattatatataggggtttgtcgtggggtgggggaggagggagggatagtattaggagatgtatttaatgtatatgatgagttaatgggtgtagtatattaatatggtatatgtatatatatgtgataaatttgtatattgtgtatatgtattttagaatttaaagtataataataaaaaaagaaaaaaattaagttatataaaaattttttgtaatttatgaaaagaatttgtatttttatttgtttatttatttatttatttatttatttagaaagatgaaagtgttggataaggtattgtagatataaaatttgagtaatataaaatttttagttttaaagtgtgatggataattaatatataaaaagtaaagaattttaatttttataaatagtttaaaaatagagatttgaatagggttttcggagtatggagtatttgaggataattaagagtgtgggttatattagataaggttttttagatgaatttgataataagaagttttgatattataggggattaattaaataatgataaatgtttaatttatattataaggtaaattattttttagtaatttatataatagttgtggaaatttttatgaatttaaaatttagggtttttaaaatttgtaatgtggttaggtatggtgcgttatgtttgttattttagtattttgggaggttaagttggaaggattgttttaggttaggagtttgagattagtttaggtattatagtaagaatttatttttattttaaaataaataaataaataaataaataatttataattttttagggataaggattaatttttttttttgttttaattagttattaataattaaagaaggttaagtcggtttttttttttaaaaaatatattattattattgtataatataattatttattataatttgagaaaatatgattttatatgattattgtagatttgtgtaattaatgtttattttgtaagatttttattgaggtttaatgtattattttgtttattttaaatttggttagttttaatttttaaaaagtatttgaagtatatatttagattatttgtggttagatgggaatttgttttataagtaaatataaaatgaaattatttttcgaaagttagtatttaattttatgtataatagggttatatgtagttttaatatgtaattgattatttaatatttaatatttttagtaatgagagggttagtttttaattattgt

SEQ ID NO: 489 - DNA, 5930 bp, Artificial Sequence
  chemically treated genomic DNA (Homo sapiens)
tataataatttggggatagggttagagtattattgttttttagttattgttttttgttattgaataattgtattttttggataggttttttttattaatttgtgaattgtttttttgttataatgatgtttagaatttttggggatatgtaataggtagaaattattttttaattatgtggattttttggaattaaagttcgttattgattttattttaaattataaaattagtgtgttattaaatatagtatataaatagttatagaagttgatggattattatttatttagtattatttttatttttttttaattttggaaaaacggtaagaattttagatataaatttgttgtatttttttttaattatgtattttaaagtagtttgagttatagaaggaacgtagttatttaaaatatagtgtttgaaataaaagtatttaaggtagtattgagattatttttaatatttaggttaaaaaagatagaagtgtttagaagaatttggtaatgatatatagtttttatgagtttaagaaaatataatagttaattttatgtatatatatatatatatatatatatatatatatatatagtatgaggttagtttatagttaatattaaaaggagatttatttttttaattaattttttaatttgatttagtatattatagttataaaaagaattatattttaattatagtatgggtagataaataattattggaaaagttttgtttagtaggtagtttatagtagtagtatattgagttgagaaatggagggaatggtatgggggtatttattattttaaatgtttataaataatgtttttagaagagtttatttattaaatttgtttagagttttaaattttttagtttattatttagtttgtaatattttaaaataatattaaaatgagatagaaatatagaattaagtaaaaaagaaataatgtggtttattttgtaagaaaatttttaatggggtagaaaagatttggaaattataaataaagataatagatgatataaaagaaaaagtagtttagagtgtattagttgataatgaagttttggtttaaaaattagtatataaaagtatattagtatgtagtatatttatagtatagaaatgagtataaaaattagtataattagtattagtatatattagtatattagtatataaattagtattgtaattatatattcgtatataaaattattatatatattagtagattagtaataaaattagtaaagtttatattatttataaaatatagaaaatgttgtgggattttttttatgtgtaattatatataatagagtgttatattttgtttttgaattttgatataaaaatttgggaatttatagtggttttaggtaaagtaaaattaataaaaatttaattaatatttataaaaaatttagaaaaaatatttgttttttgtaatagaattatgtttaatttttaaatattgaaaagaatattttttaaataaattaaagatttttttgatgaagtattttagtttaaaaatttagtttaaaaattgagttttaatatttgagaatgaagatttgagtggtgagtaatattgtggtataaatattattttgaaataaattataaaaaaatgtaagaatatataataaggagatgatttagtatattttggttaaaaatattaatatatattttataagaagaggtagttttaagtttagtagtgggtaagaggttttgattttttggcggattattaagagaatcgtgtgtatattttaataaagagaagagaagaagtttagtgtataatatttaaagttatgtggtataaaggagaatagatattattagttatgtggggaagatgaatataaacggagaagaaataaatttaatagtttaataaagtttttggatagtgatataaataaggaaagtgttaaaatgaaaattttagttttattggaaatgaggagaaataaattaaaatagttatggtaatcgtttagtgaaaagaaaaaaggtaaaaataaaatgtgatttttttgtatatatttttttgattagttttttttagtagaattgaggttttatgagggagtaatattaggattgtaatattttgtttattgttgcggttttggtttttagatagtgtttggtaagaatagattttaaagaaatatttttaagttaatgaataaatttttttttaaattttatttgttttttgaaattattattattatattttaagttttagggtatatgtgtataaagtgtaggtttgttatatatgtatatatgtgttatgttggtgtgttgtatttattaatacgttatttaatattaggtatattttttaatgttatttttttttattttttttattttataatagtttcggtgtgtgatgtttttttttttgtgttcgtgtgtttttattgtttaatttttatttatgagtgagaatatgtggtgtttggtttttttgtttttgcgatagtttgttgagaatgatggtttttagttttatttatgtttttataaaggatatgaatttattattttttatggttgtatagtattttatggtgtatatgtgttatatttttttaatttagtttattattgttggatatttgggttggttttaagtttttgttattgtgaatagtgtcgtaataaatatatatgtgtatgtgtttttatagtagtatgatttataattttttgggtatatatttagtaatgggatggttaggttaaatggtatttttagttttagatttttgaggaatcgttatattgatttttataatggttgaattagtttatagttttattaatagtgtaaaagtgtttttatttttttatattttttttagtatttgttgttttttgattttttaatgatcgttattttaattggtgtgagatggtattttattgtggttttgatttgtatttttttgatggttagtgatgatgagtatttttttatgtgatttttggttgtataaatgtttttttttgagaagtgtttgtttatattttttgtttattttttgatggggttgtttgttttttttttgtaaatttgttggagtttattgtagattttggatattagttttttgttagatgagtagattgtaaaaatttttttttattttgtaggttgtttgtttattttgatggtagttttttttgttgtgtagaagttttttagtttaattagattttatttgttaattttggtttttgttgttattgtttttggttttttatatatgaagtttttgtttatgtttatgttttgaatggtattgtttaggtttttttttagggtttttatggttttaggtttgatatgtaagtttttaatttattttgaattaatttttgtataaggtgtaaggaagggattcggttttagttttttatatatggttagttagtttttttagtattatttattaaatagggaattttttttttattgtttgtttttgttagttttgttaaagattagatagttgtagatatgcggtattatttttgagggtttttttttgttttattggttttggtattagttttggtattaagtattatgttgttttggttattgtagttttgtagtatagtttgaagttaggtagtatgatgtttttagttttgtttttttggtttaggatttatttggtaatgtggttttttttttggttttatatgaattttaaagtagttttttttaattttgtgaagaaagttattggtagtttaatggggatggtattgaatttataaattattttgggtagtatggttatttttatgatattgattttttttatttatgagtatggaatgtttttttatttgtttgtatttttttttatttttttgagtagtggtttgtagttttttttggagaggttttttttattttttgtaagttggatttttagggattttattttttttgaagtaattttgaatgggagtttatttatgatttggttttttgtttgtttgttattggtgtatatgaatgtttgtgatttttgtatattgattttgtattttgagattttgttgaagttgtttattagtttaaggagattttgggttgagacgatggggttttttagatatatagttatgttatttgtaaatagggataatttgattttttttttttttaattgaatgatttttattttttttttttgtttaattgttttggttagaatttttaatattatgttgaataggagtggtgagagagggtatttttgttttgtgttaatttttaacgggaatgtttttagtttttgtttatttagtatgatattggtagtgggtttgttatagatagtttttattattttgagatatgttttattaatatttaaattattgagagtttttagtatgaagtgttgttgaattttgttaaaggttttttttgtatttattgagataattatgtggtttttgtttttggttttgtttatatgttggattatatttattgattttcgtatgttgaattagttttgtattttagggatgaagtttatttgattatggtggataagttttttgatgtgttgtataaatttttttatatatatttataatttttttatgttttttgaaaaatttaatattgtaaatgggatttttttaaaagtggggatagagttgttagttgaaaaatttgaatagttggtaatgaagtttggaatttgaaaaatgagaatcgtaagttagaatggattttgattttttttatgtgatataatttttatttagtatttattttatttattttttaaatgtagatatttttgttatatattattttttttttttttttgttttataaaaagtaattttatttatataagaaagtatatttaattgattaattttttattattttattttttttatatttataggatttagtagttatgaaggtttttattttcgtttgtttggtggtttttgtttttgtaagggaggtatgtgtataagaaaaaatttttaaataattaataaatagtggattatatgtttatttgtagagaataatattattaatattttttattgtataaataatgaagaattttatgagaatttttttggtttttattaaaattatttatatttatttattgttttaatagttttttatagtgttttaaatgttttttgtattaatgtgttgttagttattaaagaaaaagtaaataaattaataagtaataaaaaattataaaaatggtaacgaaatataatattgtataaatataattttaaagatttttaagttagataaatatattttattttagtgataaaatgtatatatattttatagtttagggtattgggttaaattttgtgtttgtttgtataaagatatttatgggatgaagtatagagataattataattatgattataaatatattaataataatataataaaaatatttaatataaattaaagtgattttttttttatttataaaaaattttgtttttaataaatgtaagataaaaatatattaatagattattaaatataaaagatattaaagtaattattttttaaattttaaaagttatataatattttttattttttaaatttgtgaaagagatagttttgtataagtgatgtaaaaattaagtaggatgtatgtttaataatgagttagttatagaagttgaatttttaaatatttttttagaaggaataatttaatgtattttttgaggtgagattatttttttagagaaaatttatgaattataaaatagtaaaattttttaatgatttagaagatttagttggttgttaattttttttttttataga

SEQ ID NO: 490 - DNA, 5930 bp, Artificial Sequence
  chemically treated genomic DNA (Homo sapiens)
tttgtgggaaaaaaaaattgataattagttaaattttttagattattagagaattttattattttatggtttataaattttttttaaaaaaataattttattttagaggatgtattggattgttttttttgaaaagatgtttaaaaatttaatttttatagttaatttattgttaaatatgtattttatttaatttttatattatttatgtagagttattttttttataaatttgagaaataaaaaatgttatatgatttttgaggtttaaaaggtaattattttaatgttttttatatttagtaatttattaatatatttttattttatatttattaaagatagagttttttatgggtaaaagaagagttattttaatttgtattaaatatttttattatattattattaatatatttatgattatgattatgattgtttttgtattttattttatggatgtttttgtatagatagatataggatttgatttagtgttttaggttgtaaggtatatatatattttattattggaataagatatatttatttagtttgagaatttttggagttgtatttatgtaatattatatttcgttgttatttttatgattttttattatttattgatttgtttgttttttttttagtgattagtagtatattggtgtaggaagtatttggggtattataggaaattgttgagatagtgggtaaatataaatgattttgatagaagttaagagaatttttatgaaattttttattatttatatagtaaaaaatgttggtgatgttattttttataaataagtatatagtttattatttattgattgtttaggaatttttttttgtgtatatattttttttgtaagagtaagagttattaggtaggcgaggatgaggatttttatggttattaagttttgtgaatgtagaaaaaatggaatggtggaagattggttaattggatatatttttttatgtaggtaaggttattttttataaaataaaaaaaaaagagagataatatataataaaaatatttgtatttagaaaataaatagaataaatattaaatagaagttatattatatgaaggaggttaaaatttattttggtttgcgatttttattttttaaattttaaattttattgttagttatttagattttttagttaataattttatttttatttttaaaaaagttttatttatagtattgaattttttaaaaggtataaagaagttataaatatgtatggaaagatttatgtaatatattaaaaagtttatttattatgattaagtgggttttatttttgggatgtaaggttggtttaatatacgaaaattaataaatgtaatttagtatataaataaaattaaagataaaaattatatgattattttaatagatgtagaaaaggtttttgataaaatttaataatattttatgttaaaaatttttaataatttaggtattgatgggatatattttaaaataataagagttatttatgataaatttattgttaatattatattgaatggataaaaattggaagtattttcgttaaaaattggtataagatagggatgtttttttttattatttttatttaatatagtgttggaagttttggttagggtaattaggtaggagaaggaaataaaggttatttaattaggaaaagaggaagttaaattgtttttgtttgtagatgatatgattgtgtatttagaaaattttatcgttttagtttaaagtttttttaagttgataagtaattttagtaaagttttaggatataaaattaatgtgtaaaaattataagtatttatatatattaataatagataaatagagagttaaattatgagtgaatttttatttaaaattgttttaaagagaataaaatttttaggaatttaatttataagggatgagaaggatttttttaaggagaattataaattattgtttaaggaaataaaagaggatataaataaatggaagaatattttatgtttatgggtaggaagaattaatattatgaaaatggttatattgtttaaggtaatttatagatttaatgttatttttattaagttattaatgattttttttatagaattgaaaaaaattattttaaagtttatatggaattaaaaaagaggttatattgttaagtaaattttaagttaaaagaataaagttggaggtattatgttatttgattttaaattatattataaggttatagtaattaaaatagtatggtatttggtattaaaattgatattaagattaatggaataggaaagagtttttagaaataatgtcgtatgtttataattatttgatttttgataaagttgataaaaataagtaatggggaaaggattttttatttaataaatggtgttgggaaaattggttagttatatgtagaaagttgaaatcgggttttttttttatattttatataaaaattaatttaaggtggattaaagatttatatgttagatttaaaattataaaaattttagaagaaaatttaggtaatattatttaggatataggtatgggtaaggattttatgtgtaaaagattaaaagtaatggtaataaaagttaaaattgataaatgggatttaattaaattaaagaatttttgtatagtaaaagaaattattattagagtgaataggtaatttgtagaatgagagaaaatttttgtaatttatttatttgataaagggttaatatttagaatttataatgaattttaataaatttataagaaaaaaataaataattttattaaaaagtgggtaaaggatatgaataaatattttttaaaagaagatatttatatagttaaaaattatatgaaaaaatgtttattattattggttattagagaaatgtaaattaaaattataatgagatattattttatattagttagaatggcgattattaaaaagttaggaaataataggtgttggagaggatgtggagaaataggaatatttttatattgttggtgggattgtaaattagtttaattattgtggaagttagtgtggcgattttttagggatttagagttaggaatattatttgatttagttattttattattgggtatatatttaaaggattataaattatgttgttataaagatatatatatatgtatgtttattgcggtattatttataatagtaaagatttggaattaatttaaatgtttaataatgatagattggattaagaaaatgtggtatatatatattatggaatattatgtagttataaaaaatgatgagtttatgttttttgtagggatatggatgaagttggaaattattatttttagtaaattatcgtaaggataaaaaaattaaatattatatgtttttatttataggtgggaattgaataatgggaatatacggatataggaaggggaatattatatatcggggttgttgtggggtggggggagtggggagggatagtattaggagatatatttaatgttaaatgacgtgttaatgggtgtagtatattaatatggtatatgtatatatatgtaataaatttgtattttgtgtatatgtattttaaaatttaaagtataataataataattttaaaagataaataaaatttaaaaaaagatttatttattaatttaaaaatatttttttagaatttgtttttgttagatattgtttagggattaggatcgtagtaatgaataaaatattatagttttgatattatttttttatggagttttagttttattggaagagattgattaagaaaatgtgtataaaaaagttatattttatttttattttttttttttttattaaacggttattatgattattttagtttatttttttttatttttaataagattgaggtttttattttaatattttttttatttgtgttattatttagagattttattggattattgagtttgtttttttttcgtttatatttattttttttatatagttaataatgtttgtttttttttatgttatatgattttagatattgtatattaggtttttttttttttttttattgaaatgtatatacgatttttttgatgattcgttaaggggttagagttttttgtttattgttaagtttgggattatttttttttgtgaaatatatgttaatatttttgattaaaatatattaaattatttttttgttatgtgtttttatatttttttgtaatttattttaaaataatgtttgtgttataatattatttattatttaaatttttatttttagatattgaaatttaatttttgaattaaatttttgaattaaaatattttattaaaaaagtttttaatttatttgagagatgttttttttaatatttgaaggttgaatataattttattatagaaaataaatattttttttagattttttatgaatgttaattaagtttttattaattttattttgtttaagattattataagtttttaaatttttatgttagggtttagaaatagaatataatattttattatatataattatatatagggaagattttatagtattttttatattttataagtaatataaattttattagttttattattaatttattaatatatataataattttatatacgaatgtataattataatgttaatttatatattaatatattaatatatattaatattaattatattagtttttatatttatttttatattataaatatattatatattggtatatttttatatattaatttttaagttagagttttattattaattggtatattttaagttatttttttttttatattatttattatttttgtttatggtttttaagttttttttattttattaagaatttttttataaagtaaattatattgttttttttttatttaattttgtatttttgttttattttaatattgttttgaaatattataaattagataataaattgggaagtttgaggttttagataagtttgatgagtaaatttttttaaaaatattgtttataaatatttaaagtagtaaatgtttttatattattttttttattttttaatttagtatgttattgttgtaaattatttgttggataaagtttttttagtaattatttatttatttatattataattgaagtataattttttttataattgtgatatgttaaattaaattggaagattaattaaaaaaatgaatttttttttaatattaattatgaattagttttatattatatatatatatatatatatatatatatatatatatgtataaaattagttattatatttttttaaatttatgaaggttatatgttattattaaatttttttgggtatttttattttttttagtttaagtgttaaaaataattttagtattattttaaatatttttattttaaatattatattttaagtaattacgttttttttatagtttaagttattttgaaatatatggttaggagaagatataataaatttgtatttaaaatttttatcgtttttttaagattgaagagaagtgaaggtagtgttggatggatgatggtttattagtttttgtgattgtttatatattatatttaatgatatattaattttgtgatttgaaataagattaatagcgagttttaattttaagaagtttatatgattagaaaatgatttttgtttattatatatttttagaaattttgggtattattataataagggaataatttataagttgataaaagaaatttgtttaggaaatgtaattatttaataataaaagataatgattggaggatagtgatattttggttttgtttttaagttattatg

SEQ ID NO: 491 - DNA, 6098 bp, Artificial Sequence
  chemically treated genomic DNA (Homo sapiens)
ttttcgcgtttgtgttgggtgttttgggtcgttatttttttgttttatagtttattcgtgtgttagtattttatagagggtatagatgagatagggagagtgtattgaggtgatagtattgttgttttgggttattaggagtttggagtatttattttatttggttaggagggttttgagtattttattaaagaataattttttgaaagtgaagggtttgtgtgtagtatatgtagtatattagggttgggttgtaagtaatagaattatattgtttaatgttaagggaaagaaggaaatattttggaaatgtatattttgtggtttttattatgttttgagaaggatagaagttggaatagttttggggtgagggttttagtagttgaatatcgttagtttattttgtgttttatttaggtagtaaattttgggagataatggttttttggttgatttgatattttgagtttttttgtgtggttagagaagtgaggttttttggttggtagtttattagtgttttatagaaagggatagttttttttaagttgtggatgttgggtagatagaaataagattataaaaaatggtaattttttatgttagagtttttatttgttatttagattggagtttagtggtacgatcgtagtttattgtagttttgaatttttggatttaagtagtttttttgttttagttttttaagagtagttgggattataggtgtatattattatgtttggataatatttttaaatttttttcgtaaagataggcgttcgttatgttgtttaggttggttttaaatttttggttttaaatagtttttttgtttcggttttataaagtgttgagattataggcgtatagttatagtattcggtttttaaaatagtaattttttattaaagatgtttgatgatatagaattttttttttttaaaattagtagcgattataatttttattatgtgtggttatcgtggttgagaaaagaggtagcgattatgaatcgtgacgaggtcggtggggaagggagtaggatgggaagtcgtgttttgatagtatgttgtaattgttttttttacgtaggttatttaatgtaaaattatattatttggaatatataaaaatgatggataaagttcgaaggtagaattgtattattttaatagttgttggatatatatagattgtttttagataagagttttgaaattatgtttatgttttttttgttaattgttttatggttagatagtacgtttttgatatcgaaaggttttgtatatcgttaatttattataagtttttttggttggaatttaggtagtaagggaataaataatttttttatttgtggtagtatgttagttatttttgttttttgggtttttttttaaatttttaattgttatcgttagtagtagtgggaaggaatataagatcgagtgaatttaatgaataggagaaggtgaaaatttgaaggtaggtttggaataagtttttagcggtaaaggaagatttagtttttgtttgaatgtttgtttaagattttgtttttgttacgaggatagtgaattagagaataaggtatttagttgggtagtttagaggttgtgtagaaatggattgatattatgggattaaagacgtttttaaaattattataggaggttaggtgtaatggtttacgtttgtaattttagtattttgagaggttgaaatgggaggattatttgagtttaagaggttaaggttggagtgagttatgattacgttattgtattttagtatgggagtaagagattttgttttagatataaattattataggagaaggaaatgttggggtttaggatatattatttttaaaatatgattgtaggagattagatatatattattttaaattatatttttttggaatattttgagttggttattttgagaaattgtagatataataggtgtagttttgaaaagttgttttttgtaaaagaaatgtatgttatgaaggaaatttatattagtataagtatttgtattaggaagagataatttttattatttgagagatttatatttgtataataagacgatttttattcgttatgtattttttttttttattattttattattagtttttatttgttttagaagttttaagtttttaatttttatatagtttaggatgttatatagggtttagttatttggtttttttttaagttttttgttttgtgggatttagttgtatatatatataattaaaatagttttttttttattagttttaattcgaagtttaattaaagaatttaaaagggtggagagaagtattttattttttttaattgaaattaaatgtgtattaaatataagataaaatgtagatggtgtgaagatttttatattgtaagtatttttgtaatcggaagggaaaaagtacgggttgaaaatgaaggttaagagtttttagtagaaatttaagaaatagagtggttgggcgggtgtggtggtttatatttgtaattttagtattttgggaggttgaagcgggtggattatttgaggttaggagtttaagattagtttggttaatatgatgaaattttgtttttattaaaaatataaaaattagtcgggtatattgttatatatgtagtattagttattcgggaggttgagggaggagaatcgtttgaatttgggaggcggaggttgtagtgagttgagattatgatattgtattttagtttgggtgatatagtaagttttaaaaataaataaataaaatggtaaaaatgatagtaggatttgcgttttgggaggtcgaggtaggtggattatttgaggttaggagtttaagattaatttggttaatatggtgaaattttatttttattaaaaatataaaaattagttaggtatggtggtggatgtttgtaattttagttatttaggaggttgagataggagaattatttgaatttaggaggtagaggttgtagtgagttgagatcgtgttattgtattttagtttgggcgatagagtgaggttttatttaaaaaaaaaaaaattgatagtagggaggtgaaattttagttatatggtagaagtattggatatataatgaattaatggtttttaagaattgaggaaaattttgttttttaaatgaaattcgtattattttttatgaggaagagtttatgagaattatttgaatattttttgtgtatttaagggagggagagggtgggattgcggtgaaaaatataattttaagaaataggtttaagaaatgtttatcgtggatttaaaatgaattgaagtggaggtttttgatttaataaaggatttttatatttcgatgttttagattcggtatttggaagaggtttaggaagattagagggttggtttcggatatttatggaatatgtaagtttagtgtgtttcgtgaggaggcgtttgttgttcgttttgcgtcgtaggtttagattttgattttggtagtgttgtttgagtttatgtgggtagtgggtgaggttgtagggttgtttggttttagcgggggattattgttttattttgatgtttttacgtggttttttgttagtttgttaggagtatttttgatttagggggtattttgtggtgttttgtaaatatggatgtgttaggtattatgatgagtgttgtaatattaggaggagtgattttagtaagtcggtgggtaggttttgtttagggtggtaggatttgttattagtttttttgtttagggttttgggtatggtaggtaggtaaataggtgggtttttttaagatgggaggtgacgaatttttaaattaggatcgtgtttttgggataataagggtttttgtgttttgtagacggtttttagagaaatttgtgttttttttaggtttgtttgttttaaattgtttttaaattgatttttagagattggtttagttttttttatttttgatttttgtttttatttgatatttgggatgtagttaagtttggtttaaggtaaagttattagagttttggttgaaggtaatagttacgatgttttagatgtagtgtttatgttgtgttaggttgttttataaggttttataaggtgtttttttttttatttgaaagggtttcgtgttgatttttgaggttgtcgtttgagtttaggtttaatcgtagtgcgggagaatttttgtttttttttagagagatttagattttggtagttttggatgcggatcggagttttttggttttgtgttgtttgttttttttcgttttttcgaaggggaaggttttgtgttttttgtgatgagttaggatatggttacgtgaatagtattatagttaaatttgatgggtatttggtcgtagttgtagggaggatacgaggttttgtattgttttaggtttgtttgtgattttaagtggtgaagttttattattggtaaagaggagtgggacgggtttagtcgtttttatttgtttagttagaggtaggtttttggtttgggggaaatttttgggcggggaggaaattgattaatagttgagttacgtatatatagcggtttttgtttgagttgtttgatttgggttttaaatatagtttattaaggtaattagcgaattggttttaaagtttattttttttgatttttaaagataaaagaaggtataatttattttatttttaggtaaaaagtgtagacgatttgggattatttggttttaaaaaaataatttgatttagatataaatgaataaaataaaaacggttttggagagaaattggtgtttttgattttttttttttttgtgtggcgtatttaagttttattgtaaaaaaaaaaaaaaaggtgtttaataattatttttattgatttttgtattttttggattttttttgtttttgggtataagatatggttatttttagggttggatcgtgtaggtacgggcggttagttgggtcgtagttttttcggttttgtagggttacggaggaaggtaagtaaggttagtaggtgatagaaaggtttatggtttttttggtcggggtttggatagataatttatttagagagagggtataggagtgtatggtttttttttagtttagtttggaattgggttttttcggtaatgttttttttttttttattatttaatgaaaaagtatttggttaggcgtggtggtttatttttgaaattttagttttttgggaggtcgaggtggaaggattgtttgaggttagtcggggtaaatagtaatattttcgtttttataaaaaatattgtaaaaatttaaaaagtataaagaaaaagtatttgtattgtggatttgtgatgtatgggagtgtttttaattttgggaaggaattataagatagatattttttatttggatttgattttgataaatatattttataatatttttattttttaattttttatatatatattttttgaaatagaatttcgttttgtggtttaggttggagtgtagtggtatgattttggtttattgtagtttttgtttttagggtttaagtgttttttttgttttagtttttcgagtagttgggattaataggtatttattattatatttagttaatttttttttttttttttttgtatttttagtagagacggggttcgttatgttagttaggttggttttaaatttttgggtttaagtgatttatttatttcggttttcgaaagtgttgggattatagatttgagttattgtgtttagttcgggatgttgttaaatatttttttttatttttgaaaaaaaatgaagttgattatagaggtagaatgatttttaaggtataggtacgtgggttaggaggttttcggggtttgtttgggagagagttaagtaagtagttgagttttggagagtagcggggagttgtgtttttttgtttggataatgttaatgattgattttgattttggggtttagcgtatgagttttgagggattggtagcggtttttatttgtagtaataattaatattgtgtttttgtagt

SEQ ID NO: 492 - DNA, 6098 bp, Artificial Sequence
  chemically treated genomic DNA (Homo sapiens)
gttgtaaaagtatagtgttggttattgttgtaggtgggggtcgttgttagttttttagggtttatgcgttgggttttagagttaaagttagttattaatattgtttaggtaggggaatatagtttttcgttgttttttaaagtttagttgtttgtttagtttttttttagataggtttcgggagttttttggtttacgtgtttgtgttttgaaagttattttatttttatggttaattttatttttttttaaaagtaaaaagaaatatttaataatatttcgggttgggtatagtggtttaggtttgtaattttagtattttcggaggtcgaggtgggtggattatttgagtttaggagtttgagattagtttggttaatatggcgaatttcgtttttattaaaaatgtaaaaaaaaaaaaaaaaaaattagttgggtgtggtggtgggtgtttgttaattttagttattcgggaggttgaggtaagagaagtatttgaattttggaggtagaggttgtagtgagttaagattatgttattgtattttagtttgggttatagagcgagattttgttttaaaaaatatatatataaaaaattaaaaaatgaaaatattgtggaatgtatttattagaattaagtttaggtaaggagtgtttgttttataatttttttttaagattaaaggtatttttatatattatagatttataatataggtattttttttttgtattttttaaatttttataatattttttataaagacgggagtgttgttatttgtttcggttggttttaagtagtttttttatttcggttttttaaagggttgggattttaggggtgagttattacgtttggttaggtatttttttattgagtgatgaaaggaaagaaaatattgtcgaggaaatttagttttagattgaattaggagaaaattatgtatttttgtattttttttttaaataaattatttgtttaggtttcggttaggagagttatgagtttttttattatttattgattttatttattttttttcgtgattttgtagagtcggaggagttgcggtttagttgatcgttcgtgtttgtacggtttaattttagaaatggttatgttttgtgtttaggagtaaaggaagtttagaaggtatagaggttaataagggtaattattaaatatttttttttttttttttgtaatgaagtttagatacgttatataaaaaaggggagggttaggaatattaatttttttttaaaatcgtttttgttttgtttatttgtgtttaggttagattatttttttaaaattagatggttttaaatcgtttatattttttatttaaagataaaataaattatgtttttttttatttttgggaattagaggagataaattttggaattaattcgttaattgttttaataggttatatttaaaatttaagttaggtagtttaaataggaatcgttgtgtgtgcgtaatttagttgttggttagtttttttttcgtttaggaattttttttaagttaagggtttgtttttggttgagtaggtgagagcggttgagttcgttttatttttttttattagtgatggggttttattatttggaattataagtaggtttgaggtaatgtagggtttcgtgttttttttgtagttgcggttaaatgtttattaggtttggttgtggtgttgtttacgtagttatgttttggtttattataagggatataaaattttttttttcggggaaacggagggggataggtaatataaggttaggaagtttcggttcgtatttagggttgttagggtttggatttttttgggagggagtagaggttttttcgtattgcgattggatttaggtttaggcggtagttttaggggttagtacgaagtttttttagatagggaaggaagtattttatgagattttatgagatagtttggtatagtataagtattgtatttgaagtatcgtagttgttatttttagttaaaattttggtagttttgttttgggttaaatttaattgtattttagatattagatggaagtaaaggttagggatggaaggagttgggttagtttttgggggttagtttgggagtagtttggggtaagtagatttgagagaggtataggtttttttgaaagtcgtttgtagagtatagggatttttgttgttttagaggtacggttttgatttagaagttcgttattttttattttgggagggtttatttgtttatttgtttgttatgtttagagttttgagtagagaggttagtggtaggttttgttattttagatagaatttgtttatcggtttgttggggttattttttttaatgttgtagtatttattatagtatttggtatatttatgtttgtaaaatattatagaatattttttgggttaaaagtgtttttggtaggttgataggagattacgtgaggatattagggtggggtagtggtttttcgttggggttagatagttttgtaattttatttattatttatatgggtttaggtagtattgttaggattagggtttgaatttgcgacgtagggcgagtaataggcgtttttttacggaatatattgaatttgtatgttttatgaatgttcgggattagttttttggtttttttgggttttttttaagtgtcgagtttggaatatcgggatgtgagggttttttgttaagttagaaatttttattttagtttattttgggtttacggtgagtattttttaagtttgttttttaaagttgtgttttttatcgtagttttatttttttttttttttgaatatatagaaagtatttaagtaatttttataagtttttttttatggaaaataatacggattttatttaaaaagtaaaattttttttagtttttgaagattattggtttattgtgtatttagtgtttttgttatgtgattgaagttttatttttttgttgttaatttttttttttttagatggagttttattttgtcgtttaggttggagtgtagtggtacgattttagtttattgtaatttttgttttttgggtttaagtgatttttttgttttagttttttgagtagttgggattataggtatttattattatgtttggttaatttttgtatttttagtagagatggggttttattatgttggttaggttggttttgaatttttgattttaagtgatttatttgtttcggttttttaaagcgtaaattttattgttatttttattattttatttatttatttttgagatttgttgtgttatttaggttggagtgtagtgttatgattttagtttattgtaattttcgttttttaggtttaagcgattttttttttttagtttttcgagtagttggtattatatgtgtgataatatattcggttaatttttgtatttttagtagagatagggttttattatgttggttaggttgattttgaatttttgattttaagtaatttattcgttttagttttttaaagtgttgggattataggtgtgagttattatattcgtttaattattttattttttaagtttttgttaaagatttttgatttttatttttaattcgtgttttttttttttcgattgtaaaaatgtttgtagtgtgaagatttttatattatttatattttattttatatttggtgtatatttgattttagttggggagggtaaaatgtttttttttatttttttgggttttttggttgggtttcgaattgagattaatgggaggaaaattgttttaattatgtgtatatgtaattgagttttataaaataagagatttgaagaagggttagatgattaaattttatatagtattttgagttatataaggattaggggtttggggtttttggggtaggtagggattagtaatgggatggtgaggggaggaaatgtatggcgaataaaggtcgttttgttatgtagatataagttttttaggtaataaaagttgtttttttttggtatagatatttgtattaatgtagattttttttatgatatatattttttttgtaaagggtagttttttagagttatatttgttgtgtttgtagttttttagaataattagtttaaaatattttaaagaagtataatttggggtgatatatatttagttttttatagttatattttgggggtggtgtgttttgagttttaatattttttttttttgtgatggtttgtgtttgagatagggttttttgtttttatgttagagtgtaatggcgtgattatggtttattttagttttgattttttgggtttaagtgatttttttattttagttttttaaagtgttgagattataggcgtaagttattgtatttggttttttgtgatggttttaaagacgtttttaattttatagtgttagtttatttttgtatagtttttgggttgtttagttgggtgttttgttttttaatttattgttttcgtgatagaggtaaggttttgggtaaatatttaggtagaggttgaatttttttttatcgttgaaagtttgttttagatttgtttttaagtttttatttttttttatttattaagtttattcggttttgtatttttttttattgttgttgacggtagtagttggggatttggagggggatttaaaagatagaaataattggtatattattatagatagaagagttgtttgtttttttattatttgaattttaattagaagaatttgtgatgagttagcgatgtgtaaagtttttcgatgttagggacgtgttgtttagttataaaataattagtaaggaaagtataaatataattttaaaatttttatttaggaataatttatatatatttaataattattggaatagtataattttgttttcgaattttgtttattatttttatgtgttttaagtaatatggttttgtattaaataatttgcgtggggaagatagttgtagtatgttgttaaaatacgattttttattttgtttttttttttatcgatttcgttacgatttatggtcgttgtttttttttttaattacggtggttatatatgatgaaagttgtgatcgttgttgattttggggaaagagggttttgtgttattaaatatttttaataaagagttattattttgggggtcgggtgttgtggttgtgcgtttgtaattttagtattttgtgaggtcgaggtagggagattgtttgaggttaggagtttgagattaatttgggtaatatagcgagcgtttgtttttacgaaaagaatttaaaaatattatttaggtatgatggtgtgtatttatagttttagttatttttgggaggttggggtaggaggattgtttgagtttaggagtttaaggttgtagtgagttacgatcgtgttattggattttagtttgggtgatagatggagattttaatataggaagttattattttttgtaattttgtttttgtttgtttagtatttataatttggggggaattgtttttttttgtgggatattggtgggttattaattaaaagattttatttttttggttatataggagggtttaggatgttaggttagttaagaggttattgttttttaggatttgttatttgagtgaagtatagggtaggttgacggtgtttaattattgagatttttattttaaggttattttagtttttgttttttttaaaatatggtggaagttatagagtgtatatttttaaaatattttttttttttttttaatattgggtagtatagttttgttgtttgtaatttagttttggtatgttatatatattatatatagattttttatttttaaagaattattttttaataaaatatttaggatttttttgattaggtgaaatagatgttttaggtttttgatgatttaaggtagtaatgttgttattttagtgtattttttttgttttatttatattttttgtagagtgttgatatacgggtggattgtggaataaggggatggcggtttagagtatttagtatagacgcgggga

SEQ ID NO: 493 - DNA, 16750 bp, Artificial Sequence
  chemically treated genomic DNA (Homo sapiens)
tgttttttaaaatgatgtttagttgaattagttaatggagataaaaatatttatatataatttttttttaagtttattagttattttatagattagttataattttggttattttaatgagttaatttttttttagagatattataaattttttaaagatggaaaataattgttatttttttgaataatgtttattatttaaaataatgtatataaaagttgtttaataaatttttgttgaattgagagaaaatataaaaaattgaaagtagtttgtttgtaataagtatttgttaagttttatagatttttttttttttttggaattattgtaataaatatttgatttttgatttgtaggattaaaatgtgattttttatattttaataggagtaagtattagttttgtaattttttttgttaatagaataaaaatggaatgtatgtttgttgtttttatatgtcggttgatatttatgttgaatattttttttataatatagaggtttttttgttttttgttttgcgttttatttttgtttattatagagatattaatgatgttatgtgtttttttgtattattagtgtagtagtttttattatgttttttgtttcggttttattgtagtttaattaaataaatggaaacgggtagttattgaaaataaatagtaattgtaaaagttttgttttttaagaaattttttgtattgtatttcgttttgttttattgattttaagatttttatcgtttttttgtgtttagaaattagattttttagtttgttttgttttagttagataaatgttttataaaaatgatttatattttttagattgtggggagagaagaaaaagattttgagaaagtgattaaggagggagtaagagtgatataatttttgatttaatttagttggattgtgttttttatgtttttatttttttttttataaaaaagatagcgtttttgatgttttgttttaggtagttttttagggtgagtgtagatgtgttgagttatttggttgttttgaggatcggtttagagagtttttttttttattaatgaagttattttttttcggtagttcggttttttttattattttatgttggaatttggttttggtttgtatagttttgtcgtgatgtagatggttttttagttaagttttagagaaatttgtttaattatgaataggatatttatagtataggagaaaaaaaaatttattaaaataaatattttattgtaatattttgatttgggggttggagagtaaaaatttaatatttgatgtttgggaaaaatttaatgttttatggttttttaaggaaatttgtttgtgtttaatttattagagtaatttatatatttcgggttaaagtataatgagattgttattattattttgttttttgtaagattttttttttaagaataaaaagaaggtaataaagattttgtatttttgttttttttagaaagttaaagagaatttaaagtgttggatgaaatgtttgtttttaatttgtagtgttttatttaaaaaaaaaattatgatataattttagaggataggttttttttttttagggtttttgaaagttaaaagtatatttttaatttgtagtattattgtattatttagtgaggataatttgtttagttgtgtttaggattagttagattaaggagttgaaattaagttttttttgaatttgaatgggattggaattttgttatttttagagtagtaatagatgatgttatgtttaagaatattttatttgattaataaaaaaggagaagtttgaaatgtaattttaaagaattttagaaggaggtttagatgaagataataaaattttttggagatatatttgttatttatattttttttttttaagttattggtttgttgtttttgagtttagttaaatttttaaagataagattaaagtaaggaagtaaggtatatagtttttggtttatggttttttttagatataagtattgtgaatgaagattttgttttatttatatttgggattttggagtttttataaagaatatttttagtataaggatgtgatttaaagggggatttatagaataatattttaattattgtttgatttatatttgagtgtaatggataaataaatataattttagttataaaatttgaaaaatatatatttttttatttaaaaatttttgatagttttgttaggtattggagaattagaaataaatgtttttttatttttttttttttgatgaaggaaagttattaaaaatagttatatagaaataataatataattgtagattttattttaaatatagttggtatgttttttttttttttttttatttattttttattttagatagttagaggggaaagtttgttttagagatagaaagaagatatttatggggtataattttattttagttatttgatagtttgaagaagtatttaattttttgaataataatgttataagttaaagaagagaaaagataggtagtttaaagttttttaatattgtgtatattttaattttttaagttagttttgagaaagtgtttttgttttgtagaagtatttggttaagtgttgtgaagtttattggtattaaaagaaattaaaaattttggaggattagagaattaaatttggtaatataaatgaaaatattttagaatgtaaaaagtatttaatttattatttttaattatgttttattatatatagatggtattatttatagtgaatgttaattattaatatttttttaaaaatgggtattaatttgttattagttgtttgtttttgatttagtttttttttgttgaaaggttttatttaattgtattataaagggataaaagggtaaaagataataagttttttagattggtagatttgttatttataaaatggttttgggtaggttatttgaattttttgaaatttaattagatttatttaaatttaagaatgagaatataaatttatattttgaagtgttttatagaaaggtttattttaatgtttggagtatatattttaatgaatatttattttattttatttttttttatttttgaattaagtaattttgaatttaaagttgttatgattagtattgaaaagattattggattattaattgtgtgattttgggatagtaattttttgtattttagtttgtttatatgttatatatgaaggttgaagtttgattttgttttgtgattattattttaaatatttgatgaaattaaattttagtgtttggaatggtagtataataaatttattaagaataaataatttattgtaaaaatatattgatttttaaatgatgtaattgatagttatattattgtagagggttgataaataataaaagaaatgaaagatgtatatggtgagaattgaaattattttgataagttttttatttgtttattatttaaaattaatgattatgttgaatgtttataaattataaaatataaaagaaattttataaatgcgtatgtataggagtttaagttattaaaagttttaaagtataagtttaaattaaattaattaaagaagttgagaggaaaaattggtttttatttttaattattattgttttgaggttttatgtttaatataattttttaagtagaggttttagagagaagagttgtgaggatatttttatatttgtgtagaaggaaaagtttgttatttattttagtatttttagtgttatattgatgtgtattttggatttattttgtttttattgtataaatttatatttgattttaaagaaaaggaaaatttaaagttttttttttttaaggggatagaaattttttgtgttaattgtttgatttttttttttgtaaggttttattggaaattttttgtaatataatgtaggggatttttttatgtgttgatgttgtttatatagtggggtgggtttgattgaagaaaaaaaatcgtatatacgtatgaaagattatggttttattttcggaaagtatgaaaggtgattgatatttttaagaagtttttgttatttaggaaaattattaaatattttatttagagatatttggaaagattgaaggaaaggaagaacgaagaaagtagaatttagatttatgtggggagagatttgtggtagaggaaaagtattttttttgaattcgataagggatttgtttgggggaattttttgtttagttttttattattagggttttttgaagtcgggttttttattgggtagttttttgggagtgtagtggggaatttttatattttttttttaggttttcgaaggatttcgtttttttagtgttttttttaggttggtaggagttttgagtttgatatttttttttgatgggataggtaagttttgtgggcgcgtaaatacgttgtaattaagttttttgttgattttatagttttgtgtgttttcgagaagaagtgatcgtatttaattgtttattgttggtttgttttttaagagtttgggggttttttttttttaatttagaattagttgtacggggggcggggaaatgggggtggggaaggagtgggagggtagtggttttcgcgagtagagcgatgttattgagtgagtttttgaatggggagcgttgttgtttttaagtcgattggtattttttgttaggaagaaacgttaagaggtgggagtgtttggggagggaggtaggcggtttttatcgtaggcgcggggagttgttttttcgttttttcgtttgttttttaagtttggatttttaggagtggttgaagttgcggagcgtttttggagtttgtgaatgaattttttttttttttttttttttttttttcgttgagtttttttttcggttttgacggtatagtgatataatgatgatgggtgttataattcgtatttgaatttgtaggcgagttgtttcgagtttttttggggaagaattttaggcgtgcggacgtaatagtcgagaatattaggtgttgtggataggagttgggattaagattttcggttagtttcgtattttttcgtattttttagtatcgtttcgtatttttcgtattttttttcgggttattacgttttttatgtgattcgtttgggtaacgtcgaatttagtcgcgtagcgttgtagtgaattttttttttaaattgtaataagtcgttttttaaggtaattacgttttttttgttttttttttaaaaaataaaaataaaaaatttatagaaaaaaattcgcgagtttagaaaaaagaagtaattggtagaaggttttaattaaggtaaagagttgtaaggcgaagttaagaaaatgtaggtatttaaaaaatgtaggtaatttttataagggtttttggggagaggtatatagagggattttggtgttgaaaaagatttagataaaagaaatttagggtggggtggggggtaaaatgattaacggaattgggggaagggagggaataaattgtaaagaaattatagaaaagtggtgggtttttgagttggagagaagagagggatttttggtattttgatttttttgttgttgttgtttttaatacgttcgaggtaaaagtttgaatggggattattaagatttgttatagataagttttcgaagtcgttttggtgtaggttatttggttttttagtttttggtgtgtggttagtgtttggtgtttttggaaagttattttcgggtagtttttgatagtgcgattcggcgtttaagtagtttgggattttgcgcggatttgatttttttagatcgtaggtagtttgggaggaggttcggtcgggggaggtgtaggattttcgtcgtgtttttttgacgatttggggattgttacggttttttttcggcgtttttgggtttttttgttttgtacgcggtgcgaaggggttagtagggaaggagtagaggatggggggtggggttgttggagtttcgcggaggtttgggaggtttttgggcgggaaaagtttgttttgaatcggtagggatgtgtaataattttttttattttgaagagtgaaatagggtttgtcgtttttattttaataagtaaatcggtatttagagcgtattgtagataaaggtggttcggggattcgaattaggggtttttgggttagttttttcgtttagattataggagtttttcgtttttttatatattttttatttttttttagtttttcgttttagttgagtaattttattggtaggtttagcggtagcggcgcgcgcgtgtgtcgggagtttcgggggacgttttcggttggagcgttttatcgttttgtagaggcgtgggcgttgtagggcgatatttttggtgcgtgtagatttagggtattcgggttgttttggttcgcggtttgtgttattgggcgtggagcggtttgggtgttaggtagaggagagcggggtagaaaaatagtgttatagtttaaattatttgttttttaatttaattgcgtttcggtaagttttgtatgtttttgggagatgttgcgggaagggggagaaatttatacggcgtttggagagttgttttgtcgcgcgtatattcgcggtagagtttttttgggtcgcgttttttatttttgtgtttttttttgtttttattttttttgttttttttttttttttttagtttttgttttttttttttagtttttgcgtttttttttttatagttgataaatgaatggttagtgtgaaatttttgtttttttcgtgttttaaggtagtagggagggaggagcgagggaggcggtgcgttttttcggatttgtttttagtttagtttataagatttgtagaatttagatgtttaggaattgggagttttgcggcgggtgtgggcgttttttgatggagaagtttcgtataggcggagaaaaataagttttttagattaagcgagtattttttataattttgtgtttaaggatggaaggttttagtttttttttaagttatttattttgtattttataatttgcggcgtatatttaggagtttggaggattttgaaaaaaggttttggtttgtgtaaagtgtagagatgttttttcgcgagtcggttggaacgtacgcggcgttttgggtttagttcgtcgtttagtggacgaacgtatatggttagggtggagttaggtttcggaggtttagacgcgttattttgggcgtttttaagaaagataatatatatatcgtgtttttaaaatttatgattatttgaatttaacgttagggtttcgttttaggatattgtaaaagaagggtttttaatttaaaatttaaatttttttaattttagggcgggcgtcggacgggaaagtggagagaaggcgggtagtgggaggaaaaaagaaagggaaggaagggaagtggaaggaaagaggatcgtggaggggaggaaaaggagaaaggaacggagatggggtagatggtatttaaatagttaggaacggatcggaagggttcgtttcggggtttgggtttgaatttcgagattcgttttaggatattttttttttttttttagcggtaataaatgtgattgtagaggcgtgtcgggatggaagggtgggaaagaattagataagcggaggtggtttagtttcgtttaaaggggttgggtttggggttcgtttttattcgtttatttcgcgttaagggaggattcgtaacgggcgtttttcgtagcggttgggttagttagtcgttacgtgggttggcgtttcggtttttagtcgagacgggtgtgattttttgggtttagagattgtagtatagtcgtataggcggtcggcgtagtcgaggtttttatttatcgaggttaatgggggcggggcggggaaggtagggtttagtttaatcgagagagtcgagtggtttcgtttttaggattcggggtcggttgtttttggagttgattcgagttttatttagatagcgttgaatatttttattaaaaggttatttaagttttattttattttattttatttttgtttgttttttgggagtggtaggaggggtatcgtgtttttgttttgaggtaggggagaggttaaaatttattttaagtaaattttttgttagaaaaatgagattttatatcgtattttatttgttgattttttaaatatatttaggttattttaaagtttatttttagttaattaatagattaatttcgttttagattgttataaagagttcgtttggaatggtaaatattgttattcgataagattaatagaattttatgggggtaaatatggaagggttgcgagtgtaattgaggtttttgtgttttaatgaggaattttagcggggatttggcggggattggaagtttagtatttatttagggagtgattgagttggaaatttggagaagtttggtgtagacgagacggtgttttttagagttgtattttaagtttttttattttgttgtatattggaagaattggattttaaagattttttttattattttagattttgtagttaatagttacgtttttttttttttgtttgttgaaagttgtgatttaattgttttaagtattttttgataatttcgttaaatttattttgaaaatatttatataaagttttaaaataggatgttgtgagtgtaatataaaaataggaaggtattaatggaagtaataattagtgttttgagatagaagcggtttttagtttgtaatttggaaatgttaagagtagtatattagggagaaggtttttaagagtttgattttttgttttgagttttgagtaaagaaagaaatatgttagaattgtattgtttgttcgtagtaatattgtaaagggttttaatggattttaatgtgattgagtaattattttttttagtattaagtttatagtttttaatttttttgtgagaagattaggtaggaagcgggatgagatttaagataattatttaggatttatgttagaatttaaagttttgatttttttggtagataaaaatagagttggttttaaattgtattttttgtttttaaaaaaacgaggtttgaaaggaatttttttagatttatataggtttatagatgtaagttttttttttttttttgtgtttgtaaattggagggagatgtttttgatattttagaatatttgtatttatatatttgtaaattttgttaggaaaggatttaaatagttaaattaaaggtgattatgattaatgttaaagatattatttattgtttttttttttgttgtattattaggtttaaatattttggagttaatgattggttatttaattgagtaatagagtttttgagagcgtaaagattaattaattttgttttttaaagtttggtaattaagttttttttttttggtgagatttaaatatttttgttgacgttatttatggataaatatcggtaaatattgtatttaaaatgggatattgttttgtgatggagtagaattttttaagatatatggtttttttgaaagaaagaattaatgattgtagtaaggtatttttttattatttacgtagagaaattagttaggattgataaatatttattgttgggagttatttgttttggtttgagaaaatatgttgattgttatataggtttgtattttattagaaaatataaagtatgtattttttttgatttggaattagaaaagggggattagatatggatgttttggttaagttttattttaattagtgaatttttgttagtttttttttgtagtttagatttggtaaattatatatatataaagtttgtgtgtgtgtggggggtgcgtgtgtgtgtgtatgtatatagggtttttaaatattgttaagtttttattattgaatgtgttagaggtggttgtattttagaggttagtatagagaatttttgtttaatgtgttagttttgttttttgaaatatatttttgggtagatttattaattataaaaggatataaatgtatatattttttatatttgtatatattttattttatttttttaaggattttaagaggtgtttatgtttataaaatgagattatatattttataataaatatatttgataaattataatttttttattattaaattattgatttgatattatttgaggtatagtggaatgagtattagatttggaattagaaagtttgagttggatttattagttgagaaaattaagtaaagatattatttttggatttttagtgttataatttattaaatgaatatgtagttataaagattaaaagagtaagtattttgaaaaattatataaaaaagggatgataatatattatgttttgggatttatattgatttaattttataattttaataataattgtattatttaagttatgtagtttttattgaatttataaaataaattagagaggggtatattgttttaaaaattgtttagttttattaattagaagataggttatagaaattgattttaatgaagttggatatttagtggaaaggaagaattatttaataaatggttttaggataattgatgggtttatgtaaaataagaattagtttttatttgattttttattttaaaagaaatataagatgaattaaatatgaaatgtagggaataattttttataaaatgataaaagaaaattatgggattaaaaaaaataagttaggaatagagaaatttgttttaagtaaaatataaaatttagtgttattttaggaaatattgataggtttgattaagtaaaaattatataaaagtaaataatatatttggaaaatatttacgatatttgagagataaaaagttaataatttttgatattttatggatttttatgaataattttgaaaagtttatatttattaaaatatgagtaaaaattatgtataggtagtggtagaaagagatatagagttttaaaattatagaaaaaatcgtttagttttatttgtaattaaataaatagtaattaaaatattaatgatatgttatattatttttttattaattagaggagtaataaaaaaaaataatttttttttttttttttttttttgagatggagtttgttatttaggttggagtgtagtggtacgattttagtttattgtaattttcgttttttaggtttaagtaatttttttgtgttagtttttttagtagttgggattatgggtatttattattatgtttggttaattttcgtgtttttagtagagtggggttttattatgttggttatggtagttgattttgaatttttgattttaagtgatttatttattttagttttttaaagtgttgggattataggtatgagttattgtgtttggtaaaaataaaattaaaaagtttgatgtaagtttgtgttggttaggttgtggagaaattgggttttttatatattgttgtatgaaagtaaataggtttttttattttaaaaaataatttggtaattatttttttttgattttttattaaaagtttttaaaagatgtatatattttttgatttagtaattttatttttcgatattattatatggatggatattggtattaatattatttaagataaatggataaggatgttttttgtagtattgtttttaagagtaaatatttggaaatagtgtaaaggtttattatagggaattatttaaataaaagttgttgtatttatttaatggaaaattatgtagttgttaaaaataatatggaaaaattgtatttgttgatttggaatattttttaaaatatattgtattttaagtgaaaaaattgatagataaaattgagtatatattatatatttaattatgtaaaatgggtgtatatttatttttttaataaatatttattgagtgttttaggtattgtggatataggagtgaataaaatattaaagattgttttgttggaatttttattatggtaggtagagaaaggtaatttttaattatatatgtaaaatggtgatatgtgttaggatgaaaatagagtatgggaaagggaatagagtatagtatgttttaggtagagtaatgagaaaggagtttattaggtagagaatagaggagtgttaaggggcgataatgtgaaaaagtttagttaagtttaggtttaggaatttatatgatgttattatttgtatgaagtaaatttatgaaattttatatttaaattacgtgatttttttttgttgtataatgattttttttgtgagaaagaattagtgagtaatatgatatgtgatgtttattatatttattttgtagttgaagtattttagaaagttggttgtttagggtatttaattagtagaatggtggataaaattatcgtgtttttgtttttaagttattttttgttagttgagtttttttaaaattaagggagaatattaaatatttatttaatagaattttggttttttttcggaggttgtttatttttggtgtgttttttattttttttgtagatattttttatggataggagttttattgattttgttttttatgttttttaggtaattaaatagttttagtattttgtatttggattgtttaatgatttttttttttttttattgattttattggagtagaaggttaaatataggtatttatttttatattttttaggtttttttatgtagatagagttgttattattagtagacggtgtttataagagagatatggaaaagtggaagaatggaaatagggatttggagtggtgttaaaaataaagaaagaggtttttgaaagttttttatttaatatgattaaatatagaagataaaagatgtaatttaatgattaaggatagggatatagttttgagaaaattatagaagtggaatgaacgttttggattttaaagaagagggaatggaaatgtagttttgaggtagttaaagttaataaagttttttgatatatttattgtagaaataaatgattattttttaatttaaggtttgtaaatttaggtgattataggggcgaggtatggagtggaaatgggtaagagattaagtgggggtagtaatggttttgagtatatagatttaaggggagagattgttgtttggttaatgtttatgattagttagttgaaatatagatttagtgttgttagattttttgattttttgaaagaagttagagattttatatttagtgtaaatagtttaatttttaaattgagtaatttatttaaatatatttatgtaatttatttaaatgtatttagagtatgtttgattttttttttgtatttttatttagttttaggggtaattttaaggaaagtgatgcgtatatttgttgtatttatgtagatggaggattatttttttttttttaataaaagatatttttataaggattgagtgtggtataaagagttcgatttttagtatttaaattgagtaggaaatttaaatatagaagatttttttttgggttatatttttggtttttttaaatgagatttgattttttagatattgataaatattatattattgggttatggtaaatttttaagtggattgatttaaaagtgtttaaaagtattttaggtgttaaggaattgttggtacggagttttaaaggtgtttttgtataagaaatagaggcgttgattatgtatttgatttataaatattttttaaggatatattttgaatttggtaatgaagaaatattgtgggaattattaagttgaataaagtattagttttgttttttagaagtttattgttttatagaggagattagatatgtttatagataatttgaagtatatagtaataaattataggatgatttattttaagtataaagtgtatattgttattatagtggtaatttaggttataatttttaaatgtaagagttttaaatattattttttttatttttagtgatatgaaattatgttagaatatttgtagaaagtttgaattagtaattttaataataaatattgagtattgatatattgtatattattgagatttattttatatatattattttattaatttttatgattatttcggtaagtattaatttttataattaagtagtgatagaaaatgaggtttagagagatatagtattttatttaaagttatagaatataagtagagaatgtagaatttgtattttgggttatttgatagtggagtttagatttttaaaattaggtttataaagattttttggaaaaaaagaaaaataaaaaatagagaataaatttttttgaagaaaagtaggaaattattatttataagtataattaaagagagatttttaattttttttttttttttttttttgagacggagtttcgttttgtcgtttaggcgtaattttagtttattgtaatttttatttttcgggtttatgttataaagaaaggttttttatttggatttagttaatatttatggaatgtattttttttaatatttttttattataaaatataattttttattttggttgtgtaattgatatttttatttttttttaaaatattgtaatagtatagatatatggtatatattttttgtttgttgtgttgttttataagaaatttagaaatatagaaatattatggtattttttagttagtgtttaataaagtttattagtagattttagtgattataggataaataataaatttaattattagggttaatttaggattattaattatatgttttttattgtgaattattagttggtttatagatggaaaatataagatgtataatgtattagtttaaaaaatgttttttagagagtgtttagaattatagaatttaaaaattttgttttgaaaaggtttaatttttattttaaaatatataaagaaattaaatgtaaaaaaattaagagaaaaggttttaattaattaaatgttgtataattttaagttttatttatgtttaagattagttttgtaatttatgattaattttagtattagtttgtttttaatttaggtttgttaaataatatagaattttttttttaatgaagttttttagggttttagttgaaaaatatatattagttaggatgtttttaattgtaaggaataaaaagttacgattttattgggtttaaataataatgatatttataattttatataaaatgaagtttaaaggtatggtttattttaggtttaatttttaaggatttacgttttgtttttgttgatttttttttagttttatttttagaggtattttatttatttatggatgtaaaatttttataatagttttagtagaaagattttagtatgataatgtttagggaagaaaattgattatttttttttttgttttttttttaggatgaatttattttttttagggattttttattggaggaagagatttttttatattttattggttaaaattatattatatattgttttaaatttaattattggaaaagggaatggtatttttataattgatttaggatattaagattattttttgggttggggtttgatttaggattttttaaagtatgtgattgagggtaggtattagaatggaattagagttgtgttagaaaggagaaacgtatggttattatagaatagttttaaatgttatcgaggagggtataattgtaaaaattaaataattttttgttatttttttgaagttggtattttgatttttagatggttttttaatataggttttttttttttttattattatagttgttttgaaatttgagttggaagggaatattttgagatttagattgttaaatgttttttttaaagttatgtaataaattaaatggtaaagttagggtagttttttgatttagtatagggtatttttttttattttttatttttgagacgttagaattgttggtattgttttaaaatttatggtaagaattggttatttttgtaattaatatttttttataatatatttgttttgtttgtttagttagttagaaattatatggagtttgtgttttaaaaagtttgtcgaagtttttattttttgttttggtattatgtgtatgaattattaattggtttttttttattttatatttgatgaagatgttttttttttaatatttttttttattgttttttatttttttttgttttatttatgattagttgtttgtttttaaatagattttgtggttatttatttttttttgtgttagtttttatttattagttatttgaattgtggtttttgttgttttttatatagtttatttatttgtggttgttatatatatttatattgttatatgtttttaaattgtattttggaatgattttggtaatggttgtattggatgagatttaaattaataattaaagtattgagatagtttttgttattataagtttatttttgtttttatagtttaagaggagttattttttttatttttattatttaatgtttaatattatttttattatatataatgtataaaaagtatgtgatttatgatttattttaaatttgaatgtttgtgatttattttgtgtttttttttatttttagg

SEQ ID NO: 494 - DNA, 16750 bp, Artificial Sequence
  chemically treated genomic DNA (Homo sapiens)
tttagaaatgaagaaaaatataaagtaaattataagtatttaggtttaaagtgggttataaattatatgttttttgtgtattgtatgtaataagggtagtattaagtattaagtaataagagtagaagaagtagttttttttggattataaaaataggagtaaatttgtaatagtagaagttattttaatgttttaattattagtttgaattttatttaatgtagttattattaaaattattttagaatatagtttgggaatatataataatgtggatgtgtgtgataattataagtgagtaggttgtatgaagaataatagagattatagtttaagtaattagtggataggagttggtataaaaagaaatgggtgattataaagtttatttagaaatagatagttgattataaatagagtaagagaagatggggagtaatagagaaagatgttgaaagaaagatatttttattaagtgtaaggtgagaaggaattaattggtggtttatgtatataatattaaaatagagaataaggatttcggtaggttttttaaagtatagattttatgtagtttttagttggttaagtaaataaaataaatgtattataaggaggtgttaattataaaagtgattagtttttgttatgaattttaaagtagtattaatagttttaacgttttaagagtaaagaatgaaagaaaatattttgtattgagttaagaaattgttttggttttgttatttaatttattgtatgattttggaaaagatatttaataatttgggttttagaatgtttttttttagtttaaattttaaggtagttataatgatgaggaggagaagaatttgtgttggggaattatttagaaattaaagtgttaattttaaaagaatggtaaaagattatttggtttttatagttgtgtttttttcggtagtatttagaattattttataatagttatgcgttttttttttttaatataattttggttttattttagtgtttatttttagttatatattttggagaattttgggttaaattttagtttaagggatgattttgatattttaagttaattatagaggtattatttttttttttaatgattggatttggaatagtatataatatagttttggttagtgagatgtgaggggatttttttttttagtgaagggtttttgggaaagatagatttattttgagaagagaataaaggaagaggtggttagtttttttttttggatattattatgttggaatttttttgttggaattgttgtagggattttgtatttatgagtaagtgagatatttttggaaatgaagttgagaaagaattagtaaaggtaaggcgtaagtttttaaggattagatttagagtggattatgtttttgaattttattttatatgagattataaatgttattattgtttaaatttaataaaatcgtgattttttgttttttatagttgaaagtattttaattggtatatattttttagttgggattttgaaaaattttattggaaaagaaattttatattatttagtaaatttagattgaaaataagttaatgttgaaattagttataaattataaaattgattttgaatataaatagggtttggagttgtatagtatttaattaattaagatttttttttttaatttttttgtatttgatttttttatatattttgaaataagaattagatttttttaaaataaaatttttaaattttataattttagatattttttgaagagtattttttaagttaatatattatatattttatattttttatttatagattaattgataatttataatgaaaaatatatggttgataattttaaattaattttgataattaagtttgttatttattttataattattaggatttgttaatagattttgttaaatattaattgggaaatgttataatgtttttatgtttttggattttttataagatagtatagtaagtaggaagtatatattatatatttatgttattataatattttaaggaaaaataaaggtattaattgtatagttaaagtaaaagattgtattttatgataaaaaggtgttaaagaaaatgtattttatgagtattagttgaatttaaataagaaatttttttttatggtatgaattcgggaggtggaggttgtagtgagttgagattgcgtttgggcgatagagcgagatttcgttttaaaaaaaaaaaaaaaaaagaaattaaagatttttttttaattatatttataaataataattttttatttttttttaggaaaatttgttttttattttttatttttttttttttttaggaaatttttataagtttaattttaaaagtttgggttttattgttaaatagtttagaatgtaagttttgtattttttatttatattttgtgattttgggtaaaatattatatttttttaaattttattttttgttattatttagttgtgaaaattagtatttatcgaagtgattataggaattgataaaataatgtatataaaataaattttagtgatatataatatattagtatttaatatttattattaaaattattaatttagattttttgtagatgttttaatatagttttatattattaagagtaaaaagaatagtatttggggtttttatatttgaaaattataatttaggttattattatagtagtaatatatattttatgtttggaataaattattttataatttattgttatgtattttaaattatttgtaaatatgtttaattttttttgtagaatagtaggtttttggaaggtagagttagtattttatttaatttaataatttttataatatttttttattgttaggtttagggtatatttttgaggaatgtttgtagattaaatatatgattaacgtttttattttttatgtagaaatatttttgaaatttcgtgttaataattttttaatatttgaaatatttttgaatatttttgaattagtttatttgaagatttattatgatttaataatatgatgtttgttaatatttagagagttaaattttatttaaaaaaattaaaggtgtgatttaggaaaggattttttgtatttgagttttttatttaatttaaatattaaaaatcgaattttttgtgttatatttaatttttataaaagtgttttttgttggggagaggagaatggttttttatttatataggtataataagtatacgtattattttttttaagattatttttaagattaggtaagaatataaggaggagattagatatgttttaaatatatttgaataagttgtataaatatgtttgaataagttatttaatttaaaaattagattgtttatattaaatataagatttttaattttttttaaaaaattagaaggtttagtaatattaagtttatattttagttggttgattatgagtattaattaagtagtagtttttttttttaagtttgtgtgtttaaggttattattgtttttatttagttttttatttatttttattttatgtttcgtttttgtagttatttaagtttgtaaattttgaattaaaagatgattatttatttttatagtaaatatattagagggttttattgattttagttgttttagaattatatttttatttttttttttttggagtttaagacgtttattttatttttgtaatttttttaaggttatgtttttatttttggttattaagttatattttttgttttttatgtttgattatattaaatggaaagtttttagaagtttttttttttgtttttagtattattttaaatttttatttttatttttttatttttttatgttttttttataagtatcgtttattagtgataataattttgtttgtatggaaagatttgagagatatgagagtgaatgtttatatttagttttttattttagtgaagttaatgagaagggaagaaagttattgaataatttaggtatagggtattgagattgtttaattgtttgggagatataaaagataaggttaatggaatttttatttatgagaaatgtttgtagggaggataagggatatattagggatgggtagttttcgagagaaagttaagattttattaaatagatatttagtatttttttttgattttggggaagtttagttgataaggggtgatttaaggatagagatacggtggttttgtttattattttgttaattaggtattttagataattaattttttaggatattttagttataaagtggatgtaatgagtattatatattatattgtttattggtttttttttatagaaagaattattgtatagtagagagaaattacgtgatttaggtgtgaaattttatgaatttattttatataagtaatagtattatgtgaatttttgaatttggatttggttaagtttttttatattgtcgttttttagtatttttttgttttttgtttggtgaattttttttttattattttatttaagatatattgtattttatttttttttttatgttttatttttattttagtatatattattattttgtatatgtgattgggaattgtttttttttatttattatagtaaaagttttaatagagtagtttttgatgttttgtttatttttgtatttataatgtttagaatatttagtaaatatttgttaaaagaatgaatatatatttattttatataattagatgtataatatatatttagttttatttattaatttttttatttagaatataatatattttggagaatgttttaaattagtaaatataatttttttatgttatttttgatagttgtatagttttttattaggtggatatagtaatttttatttaaatggttttttatgatgagtttttatattgtttttagatatttgtttttagaagtaatgttgtaaagaatatttttgtttatttgttttgggtgatattggtattaatatttatttatataataatgtcgagaagtggaattgttgaattaaagagtatatatattttttaaaaatttttgataaagaattaaaaaaaagtgattgttaaattattttttgaagtagaggaatttatttatttttatataatagtatatgagagatttagtttttttataatttggttaatataaatttgtattaaattttttaattttatttttgttaggtatagtggtttatgtttgtaattttagtattttgggaggttgaggtgggtgaattatttgaggttaggagtttaagattaattgttatggttaatatggtgaaattttattttattaaaaatacgaaaattagttaagtatggtggtgggtgtttataattttagttattagggaggttgatataggagaattgtttgaatttggaaggcggaggttgtagtgagttgagatcgtgttattgtattttaatttgagtaatagattttattttaaaaaaaaaaaaaaagaaaaaaattatttttttttgttatttttttgattggtgaaaaaatggtgtagtatattattggtgttttaattattatttatttaattatagatgaggttgagcgattttttttataattttaaaattttatgtttttttttgttattatttgtatataatttttgtttatattttgatagatgtggattttttaaagttatttataaaagtttatggaatattaagagttattagttttttgttttttaaatgtcgtagatgttttttaaatatattatttgtttttgtgtaatttttatttagttagatttattagtattttttagaatggtattgggttttatgttttgtttagaataggtttttttatttttaatttattttttttaattttatgatttttttttattattttgtaaaaagttattttttatattttatatttgatttattttatattttttttaggatgagaaattaggtagagattgatttttattttgtatggatttattaattgttttgaaattatttattgaataattttttttttttattgaatgtttaattttattggagttaatttttgtaatttgttttttgattaatgaaattaaataatttttaaaataatatgtttttttttgatttattttatagatttagtagaaattatatggtttgggtaatgtagttattattaaaattatagaattagattaatatgaattttaagatataatatattattattttttttttgtatagttttttaaagtatttatttttttgatttttataattgtatatttatttaatagattatgatattaaaggtttaaaagtaatatttttgtttggtttttttagttagtgagtttaatttaaattttttgattttaagtttagtgtttattttattatattttaagtaatattaaattaataatttaataataaaaagattataatttattaaatatgtttattgtaaaatatgtaattttattttatagatataaatattttttaaaatttttagaagaatgaggtaggatgtatatagatgtggaaagtatatatatttgtatttttttatagttggtaaatttatttagaggtgtgttttaggaaatagaattgatatattaaataaagattttttgtattgatttttgaaatataattatttttaatatatttaatggtaagaatttagtagtgtttaaaaattttgtatatatatatatatatacgtattttttatatatatatagattttatatatatgtaatttattaagtttaggttataagaggaaattggtaaaaatttattaattgaaatggagtttggttaagatatttatatttaattttttttttttgattttaaattagggagagtatatgttttgtgttttttggtaaaatatagatttatgtaataattagtatatttttttagattagagtaagtaatttttaataatgagtgtttgttagttttaattggtttttttacgtgggtggtgaaaaaatattttattatagttattaatttttttttttaaaagaattatgtgttttgagaagttttgttttattatagggtaatattttattttaaatatagtgtttatcgatgtttgtttatgaatgacgttaataaaaatgtttaaattttattaggaaaggagggtttagttgttagattttgggagatagagttagttgatttttgcgtttttaaaggttttgttatttaattaagtgattaattattaattttaaagtatttaagtttaataatataataaaagagagaataatgggtagtatttttaatattaattatggttatttttggtttagttgtttaggtttttttttagtagaatttataagtgtatagatataggtattttggaatattaaaggtatttttttttagtttgtaaatatagggaaaaagaagaaatttatatttgtaaatttatgtaaatttagggggattttttttaaatttcgtttttttgaaagtaggaaatataatttaaaattaattttgtttttatttattaaaagaattaaaattttgaattttgatataaattttaaatgattgttttgaattttatttcgttttttatttaatttttttataagaagattaaggattgtggatttggtgttggaggaagtaattgtttaattatattggaatttattggaattttttataatattattgcgggtagataatataattttaatatatttttttttttatttagagtttagaataagaagttagatttttggagattttttttttgatgtattgtttttaatatttttaagttataaattgggaatcgtttttattttagaatattaattgttgtttttattggtatttttttatttttatattatatttataatattttattttaggattttatgtgaatatttttaggatgggtttggcgaaattgttaagaagtgtttaaaataattaggttatagtttttagtagataaaaagaaaaagacgtggttgttagttatagaatttgaggtgatggaaaagatttttaaaatttagtttttttaatatgtagtaaaatgggaggatttaaaatgtagttttaagaagtatcgtttcgtttgtattaagtttttttaggtttttagtttagttattttttaaataggtgttgagtttttagttttcgttaggttttcgttaaggttttttattgaggtataggaattttagttatattcgtagtttttttatgtttgtttttatgaaattttattagttttgtcgaatggtagtatttgttattttaggcgaattttttatgatagtttggaacgaaattaatttgttaattgattaagaatgggttttagagtgatttgaatgtatttaaaaagttaataaatggaatacggtataaagttttatttttttgataaaaagtttgtttggagtaaattttaattttttttttgttttaaaataaaagtacgatgttttttttattatttttaagaagtaagtaaaaataaaataaaataaaataaaatttaaatagttttttaataagagtgtttagcgttgtttggatggaattcgggttagttttagaagtagtcggtttcgaattttgggggcgaggttattcggttttttcggttaagttgggttttgtttttttcgtttcgtttttattggtttcggtgggtgggggtttcggttgcgtcggtcgtttgtgcggttgtattgtagtttttgagtttaggaagttatattcgtttcggttgggagtcgaagcgttaatttacgtggcggttggttaatttagtcgttgcggggagcgttcgttgcgggtttttttttggcgcgaggtgagcgagtgggggcgggttttagatttagtttttttgggcggggttggattattttcgtttgtttagtttttttttatttttttatttcggtacgtttttgtagttatatttgttgtcgttgggaaagggaaaagagtattttaaaacgagtttcgaaatttagatttaaatttcgaaacgaattttttcggttcgtttttggttgtttgaatgttatttgttttattttcgtttttttttttttttttttttttttacggttttttttttttttatttttttttttttttttttttttttttttttattgttcgttttttttttattttttcgttcgacgttcgttttgaagttgaggaagtttaagttttggattaggagttttttttttgtaatattttggggcggggttttagcgttgggtttaagtggttatgggttttgagagtacggtatgtgtattattttttttaaagacgtttagggtggcgcgtttagattttcgaaatttggttttattttggttatgtgcgttcgtttattaagcggcgaattggatttagggcgtcgcgtgcgttttagtcgattcgcgagaaggtatttttgtattttgtatagattaagatttttttttagggttttttaaatttttagatgtacgtcgtagattgtggagtgtaaaatgaatgatttaagggaaaattagggttttttatttttgaatataaggttgtgaaagatgttcgtttggtttggggggtttgttttttttcgtttgtgcgggatttttttattagggggcgtttatattcgtcgtaaaatttttaatttttagatatttaggttttgtaagttttgtgagttgaattgggggtagattcgaaggagcgtatcgtttttttcgtttttttttttttgttgttttggagtacgggaaaggtagggattttatattagttatttatttgttagttgtgggggaggggacgtagaagttagagagagagaatagaggttgggagaggggaagggaggtagagaagatggagatagagggagatataaagatgaggaacgcgatttagagagattttgtcgcgggtgtgcgcgcggtaggataattttttaggcgtcgtgtagattttttttttttttcgtagtattttttagggatatgtaggatttgtcgagacgtagttggattggagagtaaatagtttaggttatgatattatttttttatttcgtttttttttgtttaatatttagatcgttttacgtttagtgatatagatcgcgggttagaataattcggatgttttaggtttgtacgtattagggatgtcgttttatagcgtttacgtttttgtaggacggtggggcgttttagtcgaggacgtttttcggggttttcggtatacgcgcgcgtcgttgtcgttagatttgttagtaaagttgtttaattagagcggagaattaggagagggtggggaatatgtaaggaaacggaggatttttgtagtttgggcgagaggattgatttagaggtttttgattcgggttttcgagttatttttgtttgtagtgcgttttgggtgtcggtttgtttgttgagatgggagcgatagattttattttattttttagggtgagaaaaattgttgtatatttttgtcgatttagaataggtttttttcgtttaggggttttttagattttcgcggggttttaataattttattttttattttttgttttttttttgttggttttttcgtatcgcgtgtaggataaaagaatttaggggcgtcgggagagaatcgtgatagtttttaagtcgttaaagagatacggcggggattttgtatttttttcggtcggatttttttttagattgtttgcggtttgaaggggttaggttcgcgtaaggttttaggttgtttgggcgtcgggtcgtattgttaggagttgttcgggagtggttttttaggaatattaggtattgattatatattaggggttgggaaattaggtggtttgtattaaggcggtttcggggatttgtttgtggtaagttttggtagtttttatttaaatttttgtttcgagcgtgttaagaataataataataaaaaaattaaagtgttaaaggttttttttttttttttagtttaagaatttattatttttttatgatttttttataatttattttttttttttttttaatttcgttagttattttattttttattttattttgggttttttttgtttgaattttttttaatattaaggtttttttgtatgtttttttttaaaagtttttatgaaagttatttgtattttttaagtgtttatatttttttaatttcgttttatagttttttgttttaattaaagttttttattaattgttttttttttttaagttcgcgggtttttttttataagttttttgtttttgttttttaaggggggaataaaagaaacgtgattattttggaaggcggtttattgtagtttggggggaaaatttattgtagcgttgcgcgattgggttcggcgttgtttaggcgggttatataggaagcgtggtggttcggggaaggatgcggagggtgcgggacggtgttggaagatgcgggaggatgcggggttggtcgaagattttggttttagtttttgtttataatatttaatgttttcggttgttgcgttcgtacgtttggagtttttttttagaaaggttcggggtagttcgtttgtaagtttaaatgcgggttgtgatatttattattattatattattgtatcgttagagtcgaggaggagatttagcgagaagaaggaggagggagaggaggagggtttatttataggttttaaaagcgtttcgtagttttagttatttttaagagtttaggtttggaaagtaggcggaggggcggaaaggtagtttttcgcgtttgcggtagggatcgtttgtttttttttttaggtatttttattttttggcgtttttttttgataagaagtattaatcggtttggggatagtagcgttttttatttagggatttatttagtaatatcgttttgttcgcggaaattattgtttttttattttttttttatttttattttttcgtttttcgtgtagttagttttgggttaggggaaaggagtttttaggtttttagggggtaggttagtaatagataattgagtacgattattttttttcgggagtatataaaattgtaaaattagtaaagaatttggttatagcgtgtttacgcgtttatagagtttgtttgttttattaaagggaagtgttaggtttaaggtttttgttaatttgaaagagatattgagaaaacgagatttttcggggatttagagggaaagtgtaagaattttttattgtatttttagggaattgtttaatggggagttcggttttaaaagattttggtaataaaaggttggataggaaatttttttaggtaaattttttgtcggatttaaagagaatattttttttttgttataaatttttttttatataagtttagattttgtttttttcgtttttttttttttttagtttttttaagtatttttgagtagaatatttgataatttttttgagtaatagggattttttggaagtattaattattttttatgtttttcggaaataagattataattttttatgcgtatatgcgattttttttttttagttaggtttattttattgtgtaaatagtattaatatatggaagagttttttgtattgtgttataaaagatttttaataggattttatagagaaaagggttaaatagttgatataaaggatttttgtttttttagaaaagagggattttggattttttttttttttgaagttaagtatgagtttatataataggaataaaataaatttaaggtgtatattagtataatattagggatattagaatggatggtaaatttttttttttatataaatatgaaagtatttttataatttttttttttgaagtttttatttagaaaattatattaaatataggattttaaaatagtagtgattaaagatgaaagttaatttttttttttaatttttttgattagtttggtttaaatttatgttttaaaatttttagtaatttagatttttgtatatgcgtatttataagattttttttatattttgtaatttgtaggtatttagtatggttattgattttaagtgataaataggtagaagatttgttaggataattttagtttttattatgtgtattttttattttttttgttatttattagttttttgtagtaatataattgttagttatattatttggaaattaatgtgtttttgtagtgaattatttatttttagtaaatttattgtattattattttaaatattgaaatttgattttattagatgtttagaatgatagttatagagtagaattagattttaatttttatgtataatatgtaaataaattaaggtgtagaaagttattgttttaaagttatataattaatagtttagtggtttttttagtgttaattatagtaattttagatttaagattgtttgatttaggaatggagagaaataaaataaaatgaatgtttattgaaatatatattttagatattaagatagatttttttgtgaaatattttaagatgtggatttgtatttttatttttaaatttgagtaaatttagttgagttttaaagagtttaagtaatttgtttaaggttattttgtaagtgatagatttgttagtttgaaaagtttattattttttatttttttgtttttttatgatatagttaagtaaaattttttaataaaggagaattagattagaaataagtaattaatagtagattaatgtttatttttagggaaatgttaatagttaatatttattataaataatgttatttgtatataatggaatatgattgaaagtgatgggttagatattttttatattttgagatgtttttatttatgttgttaaatttgattttttaattttttaaaatttttagttttttttaatgttaatagattttataatatttgattaaatatttttataggataaaggtatttttttagggttgatttaaggaattagaatatgtataatgttgaaaagttttaaattgtttgtttttttttttttttgatttgtaatattattatttagaaaattaaatatttttttaggttattagataattaaaatgaaattatattttatggatattttttttttatttttagggtagatttttttttttagttgtttaaaatggagaatggataaaaaagaaaaaggaaaatatattagttatatttagaatagagtttatagttgtattattatttttatgtaattgtttttaatgatttttttttattaagagaaagaaaatgagagagtatttatttttgattttttaatgtttgataaaattattagaagtttttgaatgggaaaatatatattttttaggttttataattaaaattgtatttatttgtttattatatttaagtatgaattaaatagtaattaaaatattattttgtgagtttttttttaaattatatttttgtattggggatattttttgtgaaaattttaagattttaggtataaataaagtaagatttttatttataatgtttgtgtttaaaagaaattataagttagaagttatgtgttttgtttttttgttttgattttgtttttgggaatttggttgagtttaggggtagtaagttaatgatttggagaggaaaggtgtagatggtagatgtgtttttagggaattttattatttttatttaaatttttttttgaggttttttaggattatattttagatttttttttttttattgattaggtgaagtgtttttagatatggtattatttattgttgttttagggatgataagattttagttttatttaaatttagaaagagtttagttttaattttttgatttgattggttttaggtataattaagtaaattatttttattggatgatatagtaatgttatagattaaaaatgtatttttaatttttaaagattttggaaaaaggaagtttattttttaagattgtgttataattttttttttaaataaaatattgtaaattagggatagatattttatttagtattttgaattttttttggttttttaggaaaggtagaaatataaggtttttattgttttttttttatttttaaaaaagaaattttgtaaaaggtaaagtgatggtggtaattttattgtgttttaattcgaagtatataaattgttttgataaattaaatatagataaatttttttagaaagttataaaatattagattttttttagatattagatattgagtttttgttttttaatttttaaattaaaatgttatagtaaaatatttgttttaataaattttttttttttttgtgttgtaaatgttttgtttatggttgagtagatttttttagaatttaattgaaagattatttatattacgatagaattatgtaagttaaagttaagttttaatatggagtgatgggagaggtcgggttgtcgagaggagatgattttattagtgagaagagaggttttttgagtcggtttttaaggtagttaaatggtttagtatatttgtatttattttgggaggttgtttggagtagagtattaaaaacgttattttttttataaagaaaaagatgaaggtataaagaatatagtttaattaaattgaattaaagattgtattatttttattttttttttagttatttttttaaagttttttttttttttttttatagtttgaaaaatataggttatttttataaagtatttgtttgattgaagtaagataaattgaagagtttggtttttgaatataaggaagcggtagagattttagaattaatgaggtagggcggaatataatgtagaaggttttttaagaggtaaaatttttgtagttgttgtttatttttagtgattattcgtttttatttatttaattagattatagtgggatcgagataaggagtataatgaaagttgttgtattgatggtgtaaaaagatatatggtattattaatgtttttgtggtgagtaaaggtagaacgtaagatagaaaataaggaaatttttgtgttgtaagaaaagtgtttagtatgggtattaatcggtatgtagaagtagtaagtatatattttatttttattttattgataaaaagaattgtaggattaatgtttgtttttattaaaatatgagaaattatattttaattttataaattaaaggttaaatatttgttgtaataattttaaaaaaaagagaagatttgtaagatttagtaaatatttattataaatagattgtttttaattttttatatttttttttaatttaataaaagtttattgagtagtttttatgtgtattgttttagatagtaggtattatttaaaaaagtaataattattttttatttttaaggagtttataatgtttttagaaagaaattaatttattggagtagttaaagttataattgatttataaaatgattagtgaatttagaggaaaattatatataaatatttttgtttttattggttggtttagttagatattattttaaaaaata

SEQ ID NO: 495 - DNA, 6963 bp, Artificial Sequence
  chemically treated genomic DNA (Homo sapiens)
ttagcggagcgtagggcgtaggggttggattcggcgcggagttggttgagtcggagcgtagcgttttttgtgttcggcggtcgtttcgggatgcgttcgagttaggagttaggtgggggattcgtgagggggtcgtgttgcgggagaagatttcgggattagagatagagtttaggattagggagaggatttgagattagggagaagtttttagaatggggagggggttgaagcgggggaggggagttttaggttgaggagggagcgcgaattgggagggggtttgggaatgttaggtgaatagatatttggggaggaaggttgttcgcggaattcggagattatttttcggtggggagggggtcgggttgggggtgggttttagggttgaggagggagtaatgggaaatagggttaggggaggggtttttcgagtttggagggaagaagaggatatttagatgtcgaatgggggattttggaatagggtattttcgtattttagtcgagatattttaggattttaagtagggatttttaatttgcggttgaatggaggatttcgggtcggattgtagtggggagggggtttttagattattttgtgtttaatggaagggtatttgcgttgagagcgaacggttatggggaaggggttttttgttatttttttgtttttttgggttaggttcggttattacgttttgatttagggaggaggttttgggggtttttattttaacgtggtttttcgttatttttttagattttgggttgaggtgttgttttttattttagggaatatattgggtgttttaggtgaatgttgggtgggggttttttagattttttagttatggatttttaggatttgtgagggatattagtttagagggggggttgttttttagtatttttatagttttttacgtttttatagtatgatatagatttttatttttattttttttagttttatttgtttatatggatatatgtggaagcgttggtttggtttgggggtataggggttgggaagtaaggggttgggaagtaagggttttgtttgggtaggagagatttttatttttacgcgtggggttttgttttttttaggtagtattaatgagaaatagttaggttagggagagggttggttttgggttttagcgggggacgtgggggtagggtaggtaggaaggggtgggtgtattgtgggattttagaatttagtcgtcgtaatagttgatggatattttgaaattaagtttttttttaaggatatgggggttttgtgtgtgtgtttattttagataggtagggagggggagtatgtttaggggttttagggttttttgtgagtttgatgtgattgtggttgtgtttttgttagaaaatttgtgtcgagggttatattattatgtggtaaaatgatgggtgtttatcggttattaaggttataattatttatttcggtttgtgttaggggttggtatcgtcgtgtgagtgaggagttatgtttgatgttgtttcgtttattaaggggtttatgtgggggggggggggttcgagattgtgggtgtgtgtttttgtgtagaagatacgtcgtttgttttgtaagtgtttatattgtttttttttgttaatgttattgtgaatttgtgtgagtgtgtgtttttttagggtttgtgtttggggtgcgtggttgtgtgtgtttcgtttgtgtatttggaggggttaagggttttttttatgcggttggtagtgtgtatttttggtacgggggtgtgggacgtggtttgtgtttagagttggggcgttaatagggaaagtttgagtaggggttgaaatttttaaggggaagttcgggatgatgattgagtttattttttttttttttttacggagttttatatttatatttatgtatattaatatattttgatttttaggttagaaatatatatatgtgcgtatagttttttgttgagggttatttagatttatatatatttatagattatattaggttttatgtgttttattcggtgtacggagttgttgtaggtttatatatataatatgtatttattatatggtataatcgtttttatatttttgttaggatataatatttcggatatatatttagttataaatatttataaatgtttattggtaaatttatttttatttagtgttaacggagatttgaggtgggggtgaagtgaaggaggggatatatatatatttatatatatatatttatatatatttttttatatatatatatttatatggattcgagttgttttttttttagtatttcgtaggtttttgtttgtatatgtatgaggtttgtatattatttatgagggtacgggttttagatagttgtgtaaatgtttatttttggtcgttttggggaggaggtattttaagagaagggtgtgggtgtgtgagggtgcgagtggaagggagtgggagggtgtgtgtggggggtgtgtatttgaaattgtgtttgttattatgttgggtaattttagtatatttttagcgtatatatgaggttttgtgtttaaagagttgtttttaaatttaatatttttaggattttgtaagttttaggttattttatttttatagtagttgtaggtggtatttgttggataatttttattttataggtggggaaattgaggtatagagagattgaagtagtttgtttcggattagaagtagagttatttggatgtagtttgatttgttaacggggtgtgtgtgtgtgtgtgtgtgtgtgtgtgtgtgtgtgagagagagagagaaagagaattttttggttttgttttttcgtaaggttttgttgggggtaggtgtaattcggagttttgtttttttttaatatttggttaggtttggaatagttatgaggggattttatatttgtttagggttttaaggggaagaaatgagaatagtttggtgaaggtagaggttgttgaggtttataagttggtagttgggagtattggtttagggtttggttttgatttttattttgttgtgtagtttgaggtaaatttttagttttttttggtttttgaggtatcgtgttagtaggtaggaggtaggggtggattaggtgggttttgtcgttgcgttgtcgttttagagtttagtattacggataggttttaggtcggttttttagtaggggattttgggagttgggaaggagaattggggaaagggatagttgttatatatagtttttttttttggatttcgtttatattttttttttagggataattttttatgggggcggggagtaaggattgggtttgtagatgatgttttaattttttatttgcgtttattttttgagttttggtgatcggggttcgtaggagtgggaggttttggggagggattatttttttaggatttttagtttttggaataatgtgaagttaggaaatgtattgttgtgttttaacgattggtatgggttttgtttatagtaggcgtttaataattgtttattttatttttatgggttttagtttttatagggaaatggatttataattgaagtttttttgtgggtttaagaagtatttttgttgagttgtgtgaagttaggaggaggatgggtgggtaggggtgagtttttttttttagttgggagttggcggtttttttaaaattttagaaattaagaatagaattttggtgataattaaattttggaattgaagttgcgaatcgtgttagttagtaaatttagattaaaggatggtttagaggttagtttgttgtttggattgaggatgttgggaggattgggatagattgttgttttttaggagtcgttagtttgatggaggaggttgatttgaaaaatggtattttagttttggttgtgttaaggtcggtaataataatagtagtagttaaaatgtattttttattgtatgagatagttttaagtattttatatgtattgatttatttattttttttaattatttgatgttatttttatttgatttataaagaaagtaaggtatagagaaggtaagtaatttgtttaagattatataaaaggaatagtgagttaattttagatttgatttattattagtatttaggtttttgattatagattttattgtttggattgttttttgttgttgtgttgtgttttgttttgtttttagtttcgcgttgttatttaggttggagtgtggtggtggaattatagtttattgtagttttgaatttttgggtttaagtaatttttttattttagttttttgtatagttgggattataggtgtgcgttattaagtttagataattttttttttttttgagatagagttttattttgtcgtttaggttggagtgtagtggcgtgatttcggtttattgtaatttttatttttcgggtttaagtaatttttttgttttagttttttgagtagttgggattataggcgtttgttattacgtttagttaatttttgtatttttagtagagacggggttttattatgttggtaaggttggtttcgaatttttgatttcgtgatttatttttttcggttttttaaagtgttaggattataggcgtgagttattacgtttggttgttaattttttaaatagaggtaagattttattatgttgtttaggttggttttaagtttttggttttaagtagtttttttattttagttttttaaagtgttggaattataggcgtgagttatcgcgtttagttattgttattttgaggttaagtggttttgggttcgaattttggtttagttttttgttggttttttttgtgatttagaataatatattggtttttttgagttttggttttttgatttgtagagtgggggagtttggttttgtaatgttgaatatttgggagggttgggttgtggtttatttttttttttttttttattttgttttagatttaggatgggggtttcgtttgtttgggttttgggttttttgatgttgtagatgttgttttttgtggttggggaatagggtgagttggtttgtggggagggagagattggggtttaggggatggataagatggggtagtttttgaattttagagtttttttttgttggttttttggtatgggttagagaataaaatgagaatagattttaaaaggtttttgaatagttaaaagcgaataggatatttaagaggttatttttagttattgttagtagaagttggagattttcgttttttatcgttttgtttagatgaattggagagaaagaaagaaagaaatgagaatagtgtagagattgattagtgatgtttgttaagggtggagcgatggaaataaaggtttgtgtttttttattggtggttaagagtttaggttttagaaattttttatagatttggtttgtgattttaggtaagtataattatttttttgaattttagtttttttaattttttttaaagagaatgagatattgttattttgtagatggttatgaaaattaaatgagttgattgttataaagtgtttgttataaagatggtattttgtaaatattattttttttttattagttgttttttgttttatttttcggaaaaattggggtttagggaaggaaaatgttttttttagggttatatagtgaattagtggtattggagtgaaatttttgtttttataaaaataaagtgaggggttaggtatagtggtttatgtttataattttagtattttgggaggttgaggtaggtagattatttgaggttaggggttttaggttagtttgtttaatatggtgaaatttcgtttttatagaaaatataaaaattagttaggtgtggtggtatatgtttgtaattttattttttcgggaggttgaggtatgagaatcgtttgaatttgggaggcgaaggttgtagtgagtcgagattatgttattttattttagtttgggtgatagagttagatttaaaaaaataataataaggttgggtgtagtggtttatttttataattttagaattgtgggaggttaaggtaggtggattagttgaggttaggaattggagattagtttggttaatatggtgaaatttatttttattaaaaatgtaaaaattagttaggcgtggtggtatatatttgtaattttagttattggggaggttgaggtaggagaattgtttgaatttaggaggtagaggttgtagtgagttgagattatgttattgtattttagtttgggagatggagcgagattttattttaaaagtataaataaataaaagaataataataataaggggttgggtatagtggtttatatttataattttagtattttcgggaggttgaggtgggaggattgtttgagtttaggagtttgaggttgtagtgaattatgattatgttattgtattttattttgggcgatagagtgagatttaatttttaaaaatagttttttgtttttttttttgagatggagtttcgtttttgttgtttaggttggagtgtaatggtgcgattttggtttatcgtaatttttgtttttcgggtttaagcgatttttttgttttagttttttgagtagttgggattataggtatgtgttattatatttagttaattttgtatttttagtaaagatagggtttttttatgttggttaggttggttttaaatttttgattttaggtgatttgttcgttttggttttttaaagtgttggggttataggtatgagttatcgcgtttagttattgtttggattttgaggttaagtggttttaggtttaaattttggtttagtttttttaaaaaattttttaaaagagggaaatagtagtttttgtttggtttttgtttttgaattaggttttttttttattttttttaatttagg

SEQ ID NO: 496 - DNA, 6963 bp, Artificial Sequence
  chemically treated genomic DNA (Homo sapiens)
tttgggttggagaaggtggagagagggtttgatttagaggtaagaattaagtagggattgttattttttttttttaaaaaattttttaaaagggttgagttagaatttgaatttagggttatttgattttagaatttaagtagtggttggacgcgatagtttatgtttgtaattttagtattttgagagattaaggcgggtaaattatttgaggttaggaatttgaaattagtttgattaatatggagaaattttgtttttattaaaaatataaaattagttgggtgtggtggtatatgtttgtaattttagttatttaggaggttgaggtaggagaatcgtttgaattcgggaggtagaggttgcggtgagttaaggtcgtattattgtattttagtttgggtaataagagcgaaattttattttaaaaaaaaaaataaaaaattatttttagagattgagttttattttatcgtttagggtagaatgtagtgatatgattatgatttattgtagttttaagtttttagatttaagtaatttttttattttagtttttcgaaagtgttgggattataggtatgagttattgtgtttagttttttattattattatttttttatttatttatatttttgagatggagtttcgttttattttttaggttggagtgtagtggtatgattttagtttattgtaatttttgttttttaagtttaagtaatttttttgttttagtttttttagtagttgggattataggtgtgtgttattacgtttggttaatttttgtatttttagtagagatgggttttattatgttggttaggttggtttttaatttttgattttaattgatttatttattttggttttttatagttttgggattataggggtgagttattatatttagttttattattatttttttgagtttgattttgttatttaggttggagtggagtggtatgatttcggtttattgtaattttcgttttttaggtttaagcgatttttatgttttagtttttcgagaagatgggattataggtatgtgttattatatttggttaatttttgtattttttgtagagacggagttttattatgttaggtaggttagtttggaatttttgattttaagtgatttgtttgttttagttttttaaagtgttagaattataggtataaattattgtgtttagttttttattttatttttataaggatagggattttattttagtgttattgatttattgtatggttttgggagaggtattttttttttttgagttttagttttttcgaaaggtaaagtaaaagatagttaatgaaaaggaaatggtgtttgtagagtattatttttgtaataggtattttatagtaattagtttatttgatttttataattatttgtagagtagtaatgttttattttttttggggggagttgaggaaattgaagtttagagagataattatatttgtttaaggttatagattaaatttgtgagggatttttaaaatttgggtttttgattattagtagagggatatagatttttatttttatcgttttatttttggtagatattattaattaatttttgtattatttttatttttttttttttttttttttagtttatttgagtaaaacgatgagaggcgggaatttttagtttttgttgataatgattaaaaataattttttaggtattttgttcgtttttgattgtttaaagattttttaaaatttatttttattttattttttagtttatgttaggagattagtaggagaaggttttggaatttaaaagttgttttattttgtttattttttagattttaatttttttttttttataaattaatttattttgttttttagttataaagagtagtatttgtagtattaaaaggtttaaggtttagataaacggggtttttattttggatttggaataaaatggagagggagggaggggtgagttatagtttaatttttttagatatttagtattgtaggattaaatttttttattttatagattaggaaattagggtttagagagattagtgtgttattttaggttatagaaggagttagtaaagggttgagttagaattcgaatttagggttatttgattttagaatagtagtggttggacgcggtggtttacgtttatagttttagtattttgggaggttgaggtgggaggattgtttgaggttagaagtttgagattagtttgggtaatatagtgagattttatttttatttaaaaaattagtagttaggcgtggtggtttacgtttgtaattttagtattttgggaggtcgaggagggtggattacgaggttaggggttcgagattagttttattaatatggtgaaatttcgtttttattaaaaatataaaaattagttgggcgtggtggtaggcgtttgtaattttagttatttaggaggttgaggtaggagaattatttgaattcgggaggtggaggttgtagtgagtcgagattacgttattgtattttagtttgggcgatagggtgagattttgttttaaaaaaaaaaaaaattatttgggtttggtggcgtatatttgtggttttagttatgtaggaggttgaggtgggaggattgtttgagtttaggagtttaaggttgtagtgagttatgattttattattatattttagtttgggtgatagcgcgagattgaaaataaaataaaatataatataataataaaaaataatttaagtaatgaagtttgtggttagaagtttgggtgttggtagtgaattaaatttggaattggtttattgttttttttgtgtgattttgggtaagttgtttattttttttgtgttttattttttttgtgggttagatggggataatattaggtagttgaaaggaatggatgagttaatatatataaaatgtttagaattgttttatgtagtaaggggtatattttagttgttgttattattattatcgattttaatatagttaagattgaaatattattttttaagttagttttttttattagattggcggtttttagagggtagtagtttgttttagtttttttagtatttttagtttaggtagtaggttggtttttaagttattttttaatttgggtttgttggttgatacgattcgtagttttaattttaggatttggttgttattaagattttatttttggtttttgggattttggaggagtcgttaatttttagttggaggaaggggtttatttttgtttatttattttttttttgattttatatagtttaataaagatattttttaggtttatagagaaattttagttgtgggtttatttttttataggggttaggatttatagggataaagtggataattattaagcgtttattgtgagtaaagtttatgttagtcgttgggatatagtagtgtattttttgattttatattgttttagagattaggaattttggggaggtggtttttttttaaaattttttatttttgcgaatttcggttattagggtttaggaggtgggcgtagatggaaaattagaatattatttgtaaatttaatttttgtttttcgtttttataagaaattatttttgaggaaggggtgtgaacggagtttagaaggggaggttgtatgtgatagttgtttttttttttagtttttttttttagtttttagagttttttgttgggaggtcggtttgggatttgttcgtggtgttgaattttgaggcggtaacgtagcggtaaagtttatttagtttatttttgttttttgtttgttaatacgatgttttagggattagagagggttagaggtttgttttaggttgtatagtagggtagaggttaaagttagattttggattagtgtttttaattattaatttgtaaattttagtaatttttgtttttattaggttgtttttattttttttttttggaattttgagtaagtgtggggtttttttatggttgttttaggtttggttaggtattagagagagataggatttcgggttgtatttgtttttagtagggttttacgagaggataaggttagagaatttttttttttttttttttttatatatatatatatatatatatatatatatatatatttcgttaataggttagattatatttagatagttttgtttttaattcgggataagttgttttaatttttttgtgttttagtttttttatttgtaaaatggagattatttagtaagtattatttgtagttattgtgaggatgaaatgatttaagatttgtaaagttttagaaatgttaaatttaaaaatagttttttagatataaagttttatgtatacgttaaaaatatattgaggttgtttaatatggtgatagatatagttttaggtgtatattttttatatatatttttttatttttttttattcgtatttttatatatttatattttttttttaaaatattttttttttagggcggttagagatgagtatttatatagttgtttggggttcgtgtttttatgaataatgtataagttttatgtatatgtaagtaggggtttgcggggtgttggaggaggggtagttcggatttatgtgaatgtgtgtgtgtgagagagtgtgtgtgagtgtgtgtgtgtaagtgtgtgtgtgtttttttttttattttatttttattttaagttttcgttagtattgagtgaaggtgagtttgttaatgggtatttgtgagtgtttgtgattgggtgtgtgttcggggtgttgtgttttggtaagggtgtgaaggcggttgtgttatgtggtgggtgtatgttgtgtgtgtgagtttgtagtagtttcgtgtatcgggtggagtatatgggatttagtgtgatttgtggatgtgtgtgagtttgagtgatttttagtagggggttgtgcgtatatgtgtgtgtttttgatttgagagttagggtgtattagtgtgtatgggtgtgaatgtggaatttcgtggaggagaaagggagatgggtttagttattatttcgggtttttttttggggattttaatttttgtttaagttttttttgttagcgttttaattttgaatatagattacgttttatattttcgtgttaagggtgtatattgttaatcgtatggaaagaatttttggtttttttagatatataagcgggatatatatagttacgtattttagatatagattttggggaaatatatatttatatagatttatagtgatattaataaagagagataatatgggtatttataagataggcggcgtgttttttgtataaagatatatatttatagtttcgggtttttttttttttatataaattttttgatgaacggaatagtattagatatagttttttatttatacggcgatgttagtttttggtataaatcgagatggataattgtggttttggtgatcgatggatatttattattttgttatatggtgatgtggttttcggtataagttttttgataaagatataattatagttatattagatttataggggattttagaatttttgggtatattttttttttttgtttgtttggggtggatatatatataaaatttttatatttttgagggggaatttgattttagaatgtttattagttattgcgacggttgggttttggggttttatagtgtatttatttttttttgtttgttttgtttttacgtttttcgttggggtttagagttaattttttttttggtttggttgttttttattgatgttgtttgagaggaataaagttttacgcgtagggatgggggttttttttgtttagatagggtttttattttttagttttttattttttagtttttgtgtttttaaattaagttagcgtttttatatgtgtttatatggataggtggaattaaagggggtgggggtaggggtttgtgttatgttgtaaggacgtgggaggttgtgaaggtgttgggggatagttttttttttgagttggtattttttataggttttggggatttatagttggggggtttaggggatttttatttaatatttatttgggatatttagtgtgttttttgggataagggataatattttaatttaaggtttaagggaataacggggaattacgttgggatggggatttttaggattttttttttgagttagaacgtggtgatcggatttgatttaaaaggatagggagatggtagggagttttttttttatggtcgttcgtttttagcgtagatatttttttattgggtatagggtgatttgggggttttttttttattgtagttcggttcggaattttttatttaatcgtaaattgggaatttttatttaaaattttggggtgtttcggttgagatacgggggtgttttgttttagagttttttattcggtatttgggtgttttttttttttttttaaattcggggggttttttttttagttttgttttttattgttttttttttaattttgagatttatttttagttcggttttttttttatcggggggtagttttcggatttcgcggataatttttttttttaaatgtttgtttatttagtatttttaagtttttttttagttcgcgttttttttttaatttagggtttttttttttcgttttagttttttttttattttggggatttttttttggttttaggttttttttttaattttgagttttgtttttaatttcgaagttttttttcgtaatacggtttttttacggattttttatttggtttttagttcggacgtatttcggggcggtcgtcgggtataaaggacgttgcgtttcgatttagttagtttcgcgtcgggtttagtttttgcgttttgcgtttcgttgg

SEQ ID NO: 497 - DNA, 15861 bp, Artificial Sequence
  chemically treated genomic DNA (Homo sapiens)
  unsure 15222: n is a or g or c or t
gtagtggttgtagagggagtaggagggaagtgattttatattaattttaggttaaggggaggggaagaggaagtggttatttaaaaatttatttagattgttttatagtgtttttaaggatttaattttgagttattttagtgtatttttgaatattattttttaagtttttttggagttttatagtgtaaattttagtttgaaaattagaagagatttttggattaggaattttttagagtttttattttgtttttttttaaatggattttttttttttttgtttttaagtattttatttttataatatgtatatattgtttttttcgatttttatttgtttttggttgttaagtttatttttttagtaaattttgagagattttaggaattttttttagaaaatatgaatatagggattgaaagtaaatgttgggttttattttataagttttttttgatttgttttattttagtttaggtatagtcgaatagtgttagagttagggagagttttgtagattatttacgtgggtaggcgggtttagttatatttttaggggtttatagagatattatttattaagtacgatatattttttaagaattttatttttttgaatagtaagtaattttatttatttatttatttattttttgagatagggttttattttattatttaggttggagtatagtggagtatagtacggtttattgtaatttttattttttgggtttaagcgatttttttattttagcgtttttagtagttgggattataagtatgttattatgtttagttaatttttgtatattttgtagagattgggttttattatgttgttaaatttggttttaaatttttggatttaaatgatttatttgttttagttttttaaagggttgggattataggtgtgagttattatgtttggttagtgagttattttaaatattatttttttatgaagataaatatagttatgtgttaaggagaatgtaaaatttaaataaatttttgtaataaattttaagattttaaggattgggagtggattgattttgataatattgtgggttttttatatttatttttttgttgttagaggtattttagtggaaattttggagaatattgagttagtttaattttttattttatatatgaggaaaattgaggtttaggttatggttataaagttattaagttagttattgttgtaagttttggtttttttatatgtaaagtagggggtaaaaatagtttttattttatatagttattgcgaagattaaaggggataattgtgtaaagtatttgataggtagtaaatgtttaataattataattattttttattattaatagtattttatttgttttttgtttttttgagatatagttttattttgttatttaggttggagtgtagtggttggatttcgttttattgtaatttttattttttaggtttaagcgatttttttgttttagtttttatagtagttgggattataggtatatgttattatattcggttaatttttttatttttagtagaaatggggttttattatgttgattaggttggttttgaatttttgattttaagtgatttgttggttttggttttttaaagtgttgggattaaggtatgagttattgcgttagttattattagtattttaaattatagatgatagagttgagatttaaattgtaagtttagggttggattttttttttttttttttagattattagatgagtaaattttttgaggttaggatttaaattataggtttttttgtatttttagaatttagagattagtatagagtggggttttaataaatgttttttgagtgaatggttggatggatatatggatgaataggtggatggacggatggatggatggatggatggagggagggatggatggatggagagatagatggatgaataaatggatggatgggtgaatgaatgaatggatggatggatagatggatggaaggatggataagaagatttttagtttagattggatttttaatttttttgggatgatgagtagagttaagttagatatatttttttattttttttttagttttatatttaggttttttttatttgggattaatgcggaaaagaagggttttattataggagaggagagagaagatgtagtattaggatgttgatgagggaggaaagagaagaaaagatgttagaggaagtagtagataaagttggaagttggaggataggggttttattttttgtttgtaataggttttattttatttttagtagttattaaatattaatttagaagtgttgggaaatagagtgtatagagagaatataaagatattgaaaaggttagatatttgtgagagttttgagaagtacgtaagtttttaagtgtgttaagtttttttttagaatttttagtagataatttattggtgatgagttttgattgtattgtttttgtagatgtgggtgttgttgattagttcgggttagtttagatatggttatataaatgaggttagttagaatgagaatttttgtagaatgagaatttttgttttaaggatgttttaagtattgatgatgtttattgatttttttgttattttaatattaggtttgtttttgtttgtatggtgggtaattttagtattatttttgatttaatttaattttaaagtttttttttattttttaagttttttttatttgtaaatgtgttatttaagattaagtttaagtaattggtagtaggttgggagaataatatagttagaaggtgagaggttttggaaaaatattaaataaggtaggttttatttggttttatttgtagttttgcgtagatagtttttaagataagtgatttgatagtttttgggtggaaaagaggggtgattatttgttttggattgtttgagatagttttgttgttttagtgtagttacgaatattattatatattatttattatttaaagtattttggtttagatgatatattgtatagttattttgtttataaggtgttttaagatttgggagaaatttaagtgtgattgtagtgattgtttttttttttttggatttattttaaagttattttatagtataggttggtatgtttttatagggaaatttattaatagttttatgattttagagaggataaatttagattaaagaaggtaatgtaggagtttgtttttttgtaaaattttgggtaaaatttcgaggtttatttttttaagatattgagaattgaaaggagagggggaaattttatgggatcgttatttttgggcggaagtttttggtttttgatattgatggtggttttgtagtttaatggatttgtttaattattgtttagttagtgtagtcgtgattagaaatttttttggtttttttttttttattttggttgggttagatgaagatggtttaatttgtaagaaatattggttgtgtgtttttagatattttaattttggagggttttgtttataggatggatttggttaaaggaaagatgttatttatggtagaaagtaagaaaaatttagataaatatttttttttttgagaaatatttttgttttgtcgtttaggttggagtgtagtggtgtaattttggtttattgtaatttttgttttttgagtttaagtgatttttttattttagtttttcgagtagtttggattataggtatatattattacgtttggttaatttttttaatttttttgtagaaatagggttttattaggtttcgaatttttgggtttaagtaatttgtttgtttcggttttttaaagtgttgggattataggcgtgagttatagtgtttggttaaatattttattttttagattataagatgtttaattttatttttggtaaaaagttgatttagtaaattagggttttaagtgaagtcggttggggtttgaatttttgatatttgtttagggtggaagatatagtagttgtatttatgggttatttggggtgtagggtgattagttggaggttgtgagtttttttgttttttgaaatgtttgtacggggtatttaggaagggttggggattgggtgaggaggtgtggatagaatgttttttggaaattgttttaggggtagtttgagtggtttgagtttgtgtttgttttattgaaggttggagttttagagaaaagtttttatggaggtatttattttttagaattgttgtttttgcgggagaatatttttttttaggtgttgtttttagggtagtagggaagattgggaaaaattgaggggtaagagttgttggaggggggagttatatttattgagtgtttattatatgtcgggtgttgttgaaggtttgcgggttttattcggatttttttttagttttttatatttttgtagattatacgtcgtttatagatgattttgaatttagaagggttgtttaggtttagggtttagttagtgagtggatgggtagaattagatttgttttggaagggtttgttttattttggcgtttaaaatgtgttttttattttttgttattaggataagtaaattcgagatattttttcgttaggggtttaagtttattatgggtttgatttttaaggttatattttcgtttttttatttgatagataggaaatttttgaaatgtttttcgtacgtgtaagacgtttttcgcggtggcggcgatagggcgtatagtgggatcgtagtacgagttcggagtatttttagagtcggcgatttttgttttcgtttttgtcggtcggttttttcggggtttaggagggtagtatcgtcgggtttcgcgttatgatattagttttggagtggtgtagtgtgtaaagtttattggttggcgtggttcgggatacgtttttcgcggagcggaataaaacggcgcgtaggtcgggcgtatttagtcgttattttcgagagcgtttgtcgtttttgcgtcgtcgagttagttgttaggtgagtgcgttttgagtcgcgcggttttgttcgtcgcggaggggcgtttgggtacgtatttagcgtttttcggttttgttagtttcgtcgtagtttcggggttgtcgtaggcggggaattgtgagaagtgatcgtagttagttcgggtagtgttgtttttttttggaggtattaggttcgtttttatttcgggtttttttgggttttttggatatagttgattttcgcgtgtgcgtgatttagggcgattcggtttttcgtaatcgtttgtaagtcgggtagaataatcggcgattttgcgcgttattgacgtttattgtatggtagagagatgagggtatacgtgttatttttttttttatttttttgttggggagaaaatgttcgcgggcggggtggggtaaatattttggtttgattttggatatttgtgtttttgagcgtaggtgtgagtttttttttttgtgaaataattgtatggaaatttttttattttaaattttggtgttaggtggtgatggttattgaaatttgaaagagtttgtagttagtgtttgtgggtttagttttttgaagttggtaagtgataaaggggttggtattgagtatatttaaagtaaattataatgtgttagttaataattagttttttgaggtaggtattgtatttattggtatagattagagaatattttgtatgtttttggttttggtgttgttgtgaattaattaggatttaggaatcggttggagtaatagtgggtttaggttttgtttagagttttgggttttagttatttattagttgttttttgagagtgaatgaatgggtaggttttttttacgttgggatattattatagtggtatcgaggaaatttattgggttttggtagaaagtatattagtatattatgaagaggtggtttggagttttggtgggattgtttggaaggtagagttttgatttttggatttgttatttaacgcgtaggtttttttggataaattatttaattttttaatgttttagttttttttagggatgttatttggggagtatattatatagaatttttaatataggagtgattttttagttattgttttttttgttttttttttattttttgttttttttttagaagttaaggaggttggaggtgttggttgtttttttttgtttttttagattgtatgttggggattttttttaggtgggatttggggatgggtattgagtttttttttaattgtttttatttaattgttgttttttgattttttagttggtttttggttattttttttgagagagattgtttttagtttttagttgttggagggtagtttttatttattgttttttaaatttagtttttttttgtttacggttttttagtgaatgattttttgttttggagaggatattcggggcggaggtagttagacgaggaaggaagtttattttgtagagggtgtagtgtgggttagaggagagggaggagagaattgtttgtaaggtttgagatgtttaggatggagggtatggggaagaagaagtaggagagaaattaaagagaaggtttattaattttgtaattggtttgttaataaaatgggaaaaataggggtgttgtggtttatttgtttgtggtttgttttagtatttgtttttttggtttaggtgtttgtttttttaattgtatatatgtgtatttgtttttggagttagtgagttttgattgggttagagttgtagtttgggagtgtagtgatatttgattgagtgattagtaaatatttgatgaatgagtggggtagtaatggttttttagttgagttggtttacgggatatttataaattttgtaaatagtattagttagtttttttatttgggtagattgataagtaggtgagagaaaaaaggcgtaggttttttttgggtttttttgtgtgtttttgtttgaggtagttttgttttgttatttaggttggagtgtaatggcgtgatattggtttattgtaatttttgttttttgggtttaagcgatttttttgttttagttttttaagtagttgggattataggtgtttgttaatatgtttagttaattgtttgtatttttagtagagacggtatttcgttatgttggttaggttgtttttgaatttttgattttaggtgatttatttgtttcggttttttaaagtgttgggattataggtatgagttattgcgttcggtttggtgttttttttttttttggagatagcgttttattatattggttagtttggtttcgaatttttggttttaagtgattttttttttgtttttattattattttagttttttaaagtgttgggattataggtatgatttattgcgtttagtaatatagtttttaatttattgtttatttttggtgtgggaagtaaattgggaaggtttttttggtaggttgttaaagttttaaatatgtatgtaagtttagtttattgtgaaacgttggtttgttagatgaagatatatgcgttaaatattttgggatttaaagaggtgttagtgagaataagatttttttttttaagttagttatttggtattatttagggtatattgttaaatattaaaagagatataaatttgaacgataagtgttagagttggtttttttttaagataaggataattagatatttgtatttgtagtgtattagatagtgtgagaaatattttatatgtgttattttggataatttatgaggtagttattgatgttttttattttataaatggagaaattgaggtttagaggtagtaagaaatttgtttaggattatagttgattagttgtggagttgttatttaaatataagttgattgtttttaaaacgtatgtttagttattattttattatttttttttgtttttttatattttttttttttagattaatttattaaggaaatatttgttatttgtgaaatatattagttttataaggtgttttatagtggtttataaattatttaaggaagatattttttatttggatggattagggttagaatttttgattttcgggtttttagtttgttgtatggttaggtaggagtagaggggatttttgagagttagtttttagttattaatggatatgtttttattagttttgtatgtttgagttttagagttaggtttgtagaaagaaaataagtttggaaaagagcgtgtttgagaaagagagagttagtaaaatttgaggggagggtagagaaggtgaggtggaggggttttgggtttcgattgttgtttttagttgttaagaatttatatggtaatgacgtgtttgtattacgtagttatttaggaatgtgtttgacgttagtattgagtaatttttatgtatggtaaagtgtgtaaatacgggggtagttagtatttttagattttggtatttttagtgtttttttagggttagaaggtagcgtttgagtttttagcggtgataataggggaagaaatggaaggttagtagttggagtttagttttagttaggtagttagtattttttattttcgattgtgtgtttggttttttttatgtaggggtggcgtgtgttggtgttttttgggatgttagttgtaaacgatttgtgtttttaaggtttaagtgttaatgtgttttaatttgtaaaaaattaattaaagaaaaattatttagattattttgtttagtatggaataattaatattattatagatttggataaaagtaaggaaattttatttgttaatttgtttatgaggttttattataatataggattttttgtagaagttttgaaatattataaagaagttatcgatttttatttttatttgtgttaatttttagattttttttttttgagatagagtttcgtttttgttttttagttggagtgtagtggtacgattttggtttattgtaattttgtttcgagtttaagtaatttttttgttttagttttttaagtagttgggatatagggtgtgtattattatatttagttaatttttttttttttttggataattagtagagatggggttttacgttgttggttaggttggttttaaattttgattttaaatgatttatttattttagtttttttaagtgttaggattataggaatgagttattgcgttttgtaaatttttgaattttaagagtagggagttttgttttagaaggtattgggggtaagtggggaaagggagagatatatatcgtttttgttagtttatagttttataagggttattggatatggatttgaaaagagaaagtttatttaatagagagaaggatttttgatttagaatgatagttaagttttggaggtttatggggtttggattgatggtagtttagtgatgttggttatttttttagagaggcgggttatgtgtacggttttgaaggaaatatgaggtgggatatggaaagttgaggttaagtttgttttatttttatggtagttattttttttttattcgtgattttgagttttaggagaggttgattttttgagtttttaggtgttatttttaagatttggttttgagttttgattagtttagtttttttttttttttgtttttagttgttttttggatattggggcgtggaggtaaaagtcgagttgtagattggaagggatgttagtttttttgtttatttggtagatattaagtagtttagttaatgcgagggagttagataaatatttgataggtttttattggagtaagtggatggggattttaattttgtgtcgttagttattttttggttttagggaataaatgattttggaatgggagagatgggatttttttattgtagaaataaagatatgggatggttttgaagggtttgataagaaggggtttgtttttagatattggtggttggtagttagggattttatatttttgcgatggtttttttaatttgttatttgagttagattttatttattaatttatttatggatttattaatttattttgagattgagtattgttttattgtttaggttggagtgtagtggtaagatcgttgtttattgtaatttttattttttgttttaagtaatttttatgttttagttttcggagtagttgggattataggtgttcgttattatattcggttaatttttgtatttttattaaagatggggttttattatattggttaggtcggtttcgaatttttgattttaagtgattcgtttgttttagttttttaaagtgtaaggattataggcgtgagttattatatttagtcgagtttgatttttatgagatttggggtgattgagagtttgtgattttttttttttttttttgttgttgttgtaagagttgttattttggtttttttgttttaaggttgaggatttgggtatagttttaattggggatttgggtatagttttaatgggatagttaggttaggaagatgtagtagtagatatagtaggtttttagtcgttagtcgttttaggaaaatagttgattaggtgtttttagttatttagtagaaaatttaagttttgttttttgttgagatggttaatagagtgaaatgggatattatagatagttggggggagttaaattttaaagaagggtaagtaatttgttttagatttattcgttgggttagtagatgaattaggagtttttggttttatttggtatggtattttttaagtttcgttttttttatatgtggattagttatatgtggatggttggtttatatttagtagtgtggagtcgacgtatgattggtttagtcgtgtgagtggtagttagaggggcgggtatttatagtgtgttggttattatttttatatttttttatttaatttttatagttgaattttagggagtttatatacggtttattttagagataagtaaattgatatttagaaaggaaagtaatttgtttaagattatttagttaggaaggggtaaatttatattgatcgaattttagtttttgtttttttaattattgatttgtatagtttgaattttgattttgggaattttttttgttttagttttttgtagggtttttgtgtcggagagttgggaaggtaattaagaaggagttaagtgtttttttaaggtattttatgaattttgagaaataggtttttttttaaggtaattcggtttttttataggtagaatttggttgttggagagaagggtagaaagggaggaggtggagtgaagattgagttttgtttgttgttagggttttttttagttgagttttttttttataggtagggttatttggaggggtttttttgtgggtagagggggataggattttatttataggtattgtttgaaattttttttggttagggatagagttattattttttattttaaggtaatagagttttgtttttttattgggtttttgaggggagattttttattttcgttttaattaaatgattaggtttaaaagagtagtttggttaagagacgttttgagtagattttttttattggtaggtttttgggttttatttattttttcgtttatgtttttgattttttggggttttgttggatgtgggtttttgatacggagttagggaaaataaggggaggtttgtatggagttgtgggttttttttagagggagaagggtttttgtgtttgtaataaaatagtgtttggaattggtttttaattatgtggttaggggaattttttttttttatgggtgtttttaggggtttgagtatgttttttgttggtttagggggttggaaaaggagaaggtcgaggaagagggttagtattgatgtattgtatgtttattatgagtagttttttttaaatatgtaagggttatagtatggtgattgggatttagaggatttaggaatagatgagtttgtattagaattttaggtttatttttttaagttgtgtgattataagtaatttgtttaatcgttttgagttttgtttgttttgtttgtaaggtgggtatatattttttattttgcgatgatgaggatgaaatgagatgatgtggttggtagtagtgatttatgtttataattttagtatattaggagattgaggtaggtagattatttgaggttaggagtttaagattagtttggttaatatggtgaaattttgtttttaataaaaatataaaaattagtcgggtatggtggtggtggcgggcgtttataattttagttatttaggaggttgaggtatgagaattgtttgaatttaggagatggaggttgtagtgagtagagattgtgttattgtagtttagtttaggtgatagagtgagattttattttgaaaaaataaagaaatgggatgatgtagatgagttatttgatgtatagtaggtatttagtttatggtagtgtgggtgttatggttgagttttaagggttatattgagttattttattagagggagaagagagtttgtgtgggtttgtataattggatatattatttataagagttttttaagtagatttttttttatattttattggttagaaatggttttagtttgtttttgatttagttattggtaagggaatggaatttttatggttggtttaggggatagaggttttgtttttttatttggggaaggggtatttttttagttatttaatggtttgaataaaatcggggttttgtagtaaggaagaagggggaaatggtcgatgattaggtcgattataatatatattgttgattgttgtttttgtttaattgttttttatatcgtacggtttttagttttaaatttttgtttgataagggtagttagtagtttttagtatagaaagaggttgaaggaatagtgtaatattagaggttgggaatggggattgtttttggatttgggggtttaggtcgtatgggttatttgaggaagatagagatggggatgtgagtagttatagaaatttttgcggggtatgttagcgatgtgtgggagtttgaggaagtgcggttgttttagaatttgggaaagggagaattgggtttatgtagtaggtatggtttatttagattttttagtattattaatattatttttttatagtaagttttgttttttagtttgtatacgtttattaagtatttttattaggagttaggttttgtagagatttattatgtagagaaaatggttttagaagttgtggttttcgatattagtgtattttttatttattttttagttattttttggttatttatatgaatagttacgtgttaagtgttatgtagagtatggggatagagtggtgaacgtgatttggatttttttttgagttgaggttcgtgttatttttaaatgggagttttttagtaatggagattgtatttttttttgtttttgatattgattttttagttgttggtgtaagttttgttattaggagggtgggttttcgttgttatatttcggtttttaatatttttatgtgataggtttcgtgagttttttttttaggtttttttgttttttgaggtatagatttttttgattttagtttttttatttttcggtatttttttgtgttttttatttattaagttttgggtaattttcggtattaagtttgtatttattgtaggtggtgttttgtatagttttttttttatgaatttttgttgaaagagttggaagggtggttttttttttttagttacgtttgttgagtgagcgagtgaaatggaaggagagaagtaggttttatttgttttttatatttattagtgttatttttcgtgttgttttgtggttacgtgggtattgatttgaggtattatttggatttttgtgtgttgtatatgtgttaagtattgtgttttgtttttgatatattatattttatttaattattagatatattcggtgaagtcgttatttttatttttttttttttttgagacggagttttgttttgtcgttcgggttggaatgtaatggcgcgatttcgatttattgtaatttttgttttttaggtttaagcgatttttttgttttagttttttgagtggttgggattataggtaggtgttattacgttttattaatttttttatttttagtagagataggtttttattatgttggttaggttggttttaaattttcgatttcgtgatttgtttattttagttttttaaagtgttgggattataggtatgatttattgtatttagtttttatttttatttaatagatatagaaattaaggtttggaaagattgattattttgtttaaggttatatagttaatgagtggtaggattaagattgagttaaatttgtatggtattaggacgttagttttgaattaatatttagagtattttaaagttggtttgggttatttgttttgtttgtttggggtgtttgttaaaaatttagatttaagtattttatttttttaagtattttatttttagaggttataatttattagatgtggggtggtgttattaaatttgattttgtaaaagttttttattttgaagtttgataattgttttgtgtgtttattttttgtttttttttttttttttttttttttttgagatagagttttgttttgttgtttagattggagtgtagtggtgttattttggtttattgttattttcgttttttaagtttaagtgatttttttgttttagtttttagagtagttaggattataggggcgtattattatatttggttaatttttgtatttttagtagagatggtgtttcgttatattggttagtttgatttggaatttcggaatttttgattttaggtggtttgttcgttttagttttttaaagtgttgggattataggcgtgagttattatgtttagttttgtatttaaaaaataaaataaaataaaaaaaattttttttttgtggtgagttatagtttatatataaaagtgtgtttaaaatttatatgtatagtttaaagaataattataaagtgagtttttatatgataattattttgagttaaggaaaaaaaaaaggggggggaaaaaaggggnaaaggggttttaaaattttttttgggggatttataaaggtaagtgttttattagtttttttggttttttaatttagttatggtttttttttttttttagaggtaatttttttaaggtaaaagtttgtgattattatttttttgtttttttgtagtaatttttttatttatatgtttattttttggtaatatgagtttagtttatttgtgaattttttataaatggatttgtatttttttagttttggtttgtttgttttttttatattttttttgagattcgtttatgttgacgtgtgtaggggtaggtagtttatttttattgtagttggagttttttttataaagtttgttttttttgttgatttatattttttagagtgtttagtatagggttgaaaatgtagtagttgttttgtaaagatttgttgattagattggggggaggaaattttcgagaacgtgcgaggttgttgtcgagagttagtagaaagtgttttgttaggtttggtggttttttaggtattttatttttgttttttttttttttggatttggttgttgtatttttgtcgtggataatttgagatgtttttatttttttgtaaaattaatttttatttttgtgtttttttttaga

SEQ ID NO: 498 - DNA, 15861 bp, Artificial Sequence
  chemically treated genomic DNA (Homo sapiens)
  unsure 640: n is a or g or c or t
tttgaaaagggatatagaaatgggaattaattttatagggagatggaaatattttagattgtttacgatagaaatgtaatagttagatttagaggagagaaagataaaagtagaatgtttggggggttattaggtttggtagagtattttttgttagttttcgatagtagtttcgtacgttttcggggattttttttttttaatttaattaataggtttttatagagtagttgttgtatttttagttttgtgttaggtattttaaaggatgtggattagtagaagaagtaggttttataaagaaggttttagttgtaataaaaatggattgtttatttttatatacgttaatatggacggattttaaagagaatgtggaagaagtagatagattagagttgggaaaatgtaagtttatttgtaggaaatttataaatgggttaaatttatattgttaagggatggatatataggtggaaaagttattatagaaaagtaagggaatgatgattataagtttttattttagaagagttatttttaagagagggaagggattatgattgggttgggagattagggaggttggtaaggtatttgtttttgtgggttttttaaaaaaaattttggggtttttttnttttttttttttttttttttttttttttttttaatttagggtggttgttatatggaggtttattttataattattttttgaattgtatatgtaggttttgagtatatttttgtatataagttatagtttattataagaaaaaagttttttttgttttgttttgttttttaaatgtagggttgggtatggtggtttacgtttgtaattttagtattttgggaggttgaggcgggtaggttatttgaggttaggagtttcggagttttagattagattggttaatgtggcgaaatattatttttattaaaaatataaaaattagttaggtgtggtggtgcgtttttgtaattttagttattttggaggttgaggtaggagaattatttgaatttgggaggcggaggtagtagtgagttaagatagtattattgtattttagtttgggtaatagaataagattttgttttaaaaaaaaaaaaaaaaaaaaaaaaaggtaggaggtaggtatatagggtagttattaaattttagagtgaggggtttttgtaaaattagatttagtaatattattttatatttaatgaattataatttttgagaatgagatatttgagagaatgaggtatttgaatttgaatttttaataagtattttaggtaaataaagtaggtggtttagattaattttgagatgttttaggtgttggtttagagttggcgttttgatgttatgtaggtttggtttaattttgattttgttatttattagttgtgtgattttgggtaagatagttagtttttttaaattttgatttttgtatttgttaaataaggataaaagttgggtgtagtgggttatgtttgtaattttagtattttgggaggttgaggtgggtagattacgaggtcgggagtttgagattagtttgattaatatggtgaaaatttgtttttattaaaaatagaaaaattagtggggcgtggtggtatttgtttgtaattttagttatttaggaggttgaggtaggagaatcgtttgaatttgggaggtagaggttgtagtgagtcgagatcgcgttattgtattttagttcggacgatagagtaagatttcgttttaaaaaaaaaaaaggataaaaatagcgattttatcgagtatgtttggtgattaaatgagatatgatatgttaaaggtaaggtatagtatttggtatatatatagtatatagaagtttaagtgatgttttaggttagtgtttacgtggttatagagtagtacggaaggtaatattagtgagtgtggagaatagatggggtttgtttttttttttttattttattcgtttatttaatagacgtggttgaaggaggaagattatttttttagtttttttaatagaagtttatgagggaagggttatataaagtattatttatagtgggtataggtttggtgtcgggggttgtttaggatttggtgagtaaaggatatagggaggtgtcgggaaataaaggggttggagttagagggatttgtgttttaggaggtaaaggagtttaaggagagagtttacggaatttgttatatggaaatgttgaaaatcgggatgtggtaacgagagtttatttttttggtaatagggtttgtattagtagttggagagttaatgttaagggtagagggagatatagtttttattattggagagtttttatttgagggtgatacgggttttagtttaagaagggatttaggttacgtttattattttgtttttatgttttgtatagtatttggtacgtggttgtttatataggtggttaggaaatagttgaggaatgaatgaaggatgtattaatatcgaaagttatagtttttggggttattttttttgtatggtgaatttttgtagagtttggtttttagtggaggtgtttggtaagcgtgtgtaggttgagaggtagagtttattgtggggaagtggtgttagtgatgttgggggatttaggtagattatgtttgttgtataagtttagtttttttttttttaggttttggagtagtcgtatttttttaggtttttatatatcgttgatatgtttcgtaggaatttttgtaattgtttatatttttatttttgttttttttagataatttatgcggtttgagtttttagatttagggatagtttttatttttagtttttgatgttgtattgtttttttagtttttttttgtattgaggattgttagttgtttttgttaagtaaaggtttggagttgaaaatcgtacgatgtgaaggatagttagataggaatagtaattagtaatgtgtgttatggtcggtttgattatcggttatttttttttttttttttgttataaaatttcgattttatttaggttattgaatgattggggagatgttttttttttagatggaggaatagagtttttgttttttaagttaattatggagattttatttttttgttagtggttggattaggaataggttgagattatttttggttagtgagatgtgaggggaggtttgtttgggaagtttttgtgaataatgtatttagttgtatagatttatataagtttttttttttttttgataaggtgatttaatgtgatttttggaatttagttatggtatttatattgttatggattgaatgtttattatgtattagatggtttatttgtattattttatttttttatttttttaagatggagttttattttgttatttagattggattgtagtggtataatttttgtttattgtaatttttattttttgagtttaagtaatttttatgttttagttttttgagtagttgggattataggcgttcgttattattattatattcggttaatttttgtatttttattagagatagggttttattatgttggttaggttggttttgaatttttgattttaagtgatttgtttgttttagttttttaatgtgttgagattataggtatgagttattgttgttagttatattattttattttatttttattatcgtaagataaagaatgtatgtttattttatagataagataagtaaggtttagagcggttaggtaagttgtttatagttatatagtttggagagatagatttgggattttaatgtaagtttatttatttttgaattttttgggttttagttattatgttgtggtttttgtatatttaagaggggttgtttatgataggtatataatatattagtgttggttttttttttcggttttttttttttttaattttttgaattagtaggggatatatttaggtttttaggaatatttataagggaggaaaatttttttagttatatggttgggagttagttttaagtattgttttgttatagatataaaagtttttttttttttgggggagatttatagttttatataggtttttttttgttttttttggtttcgtgttaggggtttatatttagtagggttttagggaattaagaatatgggcggagaaatgggtgaaatttaaggatttgttagtaaggaaaatttgtttaggacgttttttagttaggttgtttttttgagtttggttatttagttagggcgagggtggggggtttttttttaagagtttagtgaaaggatagggttttattgttttgagatgaaaagtgatgattttatttttagttaggaagggttttaggtagtgtttgtggatgaggttttgtttttttttgtttataagaggatttttttaggtgattttgtttgtggggaagaggtttagttggagggaattttggtaataggtagggtttagtttttattttattttttttttttttgtttttttttttaatagttaaattttgtttgtagggaggtcgaattgttttaaaaggaaatttgttttttagagtttatggagtgttttagagggatatttggtttttttttaattgtttttttagtttttcggtatagaggttttgtagaaggttgggataagagaagtttttaaggttagagtttaggttgtataggttaatggttaggaaaataagagttgggattcgattaatatggatttatttttttttagttgaatgattttgggtaagttatttttttttttgagtgttaatttgtttgtttttaaaatggatcgtatatggattttttaaaatttagttgtaaggattaaatgaggaggtatggaagtgatggttagtatattgtaagtgttcgtttttttgattattatttatacgattggattagttatacgtcgattttatattgttagatgtgggttagttatttatatgtagttagtttatatatggaaggagcgaggtttaagaagtattatgttaaatagggttaggaatttttgatttatttgttagtttagcgaatgagtttgggataagttatttgtttttttttggggtttagttttttttagttgtttgtgatgttttattttattttgttgattattttaatagagaatagagtttgaattttttattgaatggttggaaatatttggttagttgtttttttgaaacggttggcggttagaagtttgttgtgtttgttgttgtatttttttagtttggttgttttattaggattgtatttagatttttagttaggattgtatttagatttttagttttgagataagaaagttaaggtggtagtttttatagtagtagtaaaaggagaagaaaaaggttatagatttttagttattttaaattttatgaaagttaggttcggttgggtgtggtggtttacgtttgtaatttttgtattttgggaggttgaggtaggcggattatttgaggttaggagttcgagatcggtttggttaatgtagtgaaattttatttttaataaaaatataaaaattagtcgggtatggtggcgggtatttgtaattttagttatttcggaggttgaggtatgagaattgtttgaaataggagatggaggttgtagtgagtagcgattttgttattgtattttagtttgggtaataaagtaatatttagttttaaaataaattaatagatttataaataaattgataaataaagtttggtttaggtgataggttgaaggaattatcgtagagatgtaaaatttttaattgttagttattagtgtttgaaggtaagtttttttttattaaattttttaaaattattttatatttttatttttatagtggaaaaattttattttttttattttaaaattatttattttttagggttaaagagtgattgacggtatagggttaaagtttttatttatttgttttagtagaaatttgttagatgtttatttagttttttcgtattagttgagttgtttggtatttgttaggtggataggagggttggtattttttttaatttgtagttcggtttttgtttttacgttttagtgtttagagagtagttgagggtagagagaggagggggttgggttggttagggtttagagttaagttttagaagtgatatttgagagtttaggaaattagttttttttgaagtttagggttacgggtagggggagaatggttgttatggagatggggtaggtttggttttagttttttatgttttattttatgttttttttagaatcgtgtatatgattcgtttttttgaaaaggtaattagtattattgagttattattaatttaggttttatgggtttttagaatttgattgttattttaggttaggaatttttttttttattgaatgagttttttttttttaaatttatgtttagtggtttttgtgagattgtgagttgataagggcggtatatgtttttttttttttttatttgtttttagtgttttttagagtagagttttttatttttggagtttagaagtttgtagggcgtagtggtttatttttataattttagtatttggggaggttgaggtgggtggattatttaaggttagagtttgagattagtttggttaatagcgtgaaattttatttttattaattatttaaaaaaaaaaaaaaattagttgagtgtgatggtgtatattttgtattttagttatttgggaagttggagtaggagaattgtttgaattcggagtagagttgtagtgagttaagatcgtgttattgtattttagttgggggataaaagcgaaattttgttttaaaaaaaagaagtttgaaggttaatataggtagaaatggaggtcgatgatttttttgtagtattttaaaatttttataggaaattttgtattataataaagttttatagataaattaatagatggggtttttttgtttttatttagatttgtaatgatgttggttattttatgttgaataaaatggtttgaatgatttttttttgattaattttttataagttaaaatatattagtatttaggttttaaaaatataggtcgtttgtagttgatattttaggaagtattaatatacgttatttttgtataaagaaagttaggtatatagtcgggggtagggggtgttggttgtttagttggggttgagttttagttgttaattttttatttttttttttgttgttatcgttgaagatttagacgttgttttttggttttggggaagtattggaaatattagagtttggaaatgttagttgttttcgtatttatatattttattatatatgggaattatttagtgttggcgttagatatatttttgggtagttgcgtagtataggtacgttattattatataaatttttgataattagaaatagtagtcggaatttaggatttttttattttattttttttgttttttttttaagttttgttagtttttttttttttaagtacgtttttttttaggtttgttttttttttgtaaatttggttttgaaatttaaatatgtagagttggtgaaagtatatttattagtggttgggaattaatttttaggggttttttttgtttttatttggttatgtaatagattgaaaattcggaggttaggagttttaattttgatttatttaagtgaaagatattttttttaaatagtttataagttattgtaaagtattttgtaaagttgatgtgttttataaatggtagatatttttttagtgagttgatttggaaaaaggaaatgtagaggagtaaagaaaaataataaggtagtgattgagtatacgttttggaaatagttagtttatgtttgaatggtagttttataattgattagttgtgattttgagtaagttttttattatttttgagttttagtttttttatttgtaaaatggagagtattagtagttattttataaattgtttaagataatatatgtgaagtattttttatattgtttggtatattgtaagtgtagatatttggttatttttattttaaggagaggttaattttaatatttatcgtttaggtttgtattttttttgatatttgataatatgttttgagtaatgttaaatggttgatttggaggaaaaagttttatttttattagtatttttttggattttaaaatatttaacgtatgtgtttttatttagtaagttaacgttttataataagttaggtttatatatatatttaaaattttaataatttgttagaaaagtttttttaatttgttttttatattagggatggatagtgaattaaaaattatgttgttaggcgtagtgggttatgtttgtaattttagtattttgggaggttgagatggtggtggggatagggaggggattatttgaggttaggagttcgagattagattggttaatatagtgagacgttgtttttaaaaaaaaaaaaaatattaggtcgggcgtagtggtttatgtttgtaattttaatattttgggaggtcgaggtaggtggattatttgaggttaggagtttaaaaatagtttggttaatatggcgaaatgtcgtttttattaaaaatataaataattagttgggtatattggtagatatttgtaattttagttatttggaaggttgaggtaggagaatcgtttgaatttaggaggtagaggttgtagtgagttaatgttacgttattgtattttagtttgggtgatagagtaagattgttttaaataaaaatatataaaaaagtttaaaaaaaatttacgtttttttttttttatttgtttgttaatttatttaagtggaaaaattggttagtattatttgtaaggtttatgagtatttcgtaggttaatttagttgaaagattattgttattttatttatttattaaatgtttgttgattatttagttaagtgttattatatttttaggttgtaattttggtttagttaggatttattagttttagaggtagatgtatatgtgtgtaattaaaagagtaaatatttgggttaggaaggtaggtgttaagatagattataggtaaataggttatagtatttttgttttttttattttattagtaggttaattgtagagttgatgggttttttttttagttttttttttgtttttttttttttatattttttattttgggtattttaggttttgtagatagttttttttttttttttttttaatttatattatattttttgtaggataaattttttttttcgtttgattgttttcgtttcggatattttttttaaggtaaagagttatttattggaagatcgtgagtaggaggaggttggatttaggaaataatgggtaaaagttgttttttagtagttgagggttgaggatagttttttttaaaagaggtagttagaaattagttggagagttaggaggtagtagttgagtgagagtagttgaggggaggtttagtatttatttttaaattttatttggggaaaatttttaatatgtagtttgagaggatagagggagataattagtatttttagtttttttagtttttgggaggaaggtaagggatgaggggaggataagaaagatagtaattgagagattatttttgtgttggaggttttgtgtaatatgttttttaagtagtatttttgaaagaaattgagatattgagaagttaaatagtttgtttaaggaaatttgcgcgttaagtggtaaatttaagagttaaaattttgttttttaaataattttattaagattttaagttatttttttatgatatattgatatattttttattagggtttagtggattttttcggtgttattgtgatagtattttagcgtggggagagtttgtttatttatttatttttagggagtagttggtgggtggttggagtttagggttttaggtagagtttgagtttattattgttttagtcgatttttgggttttggttagtttataatagtattagaattagaagtatgtaaaatattttttagtttgtattagtagatataatatttgttttagagggttgattgttagttaatatattgtgatttgttttaaatgtgtttaatattagtttttttattatttattagttttaaaggattgagtttataaatattgattgtaggtttttttaggttttagtaattattattatttagtattaagatttggagtggagaggtttttatgtagttattttataagagggaaaatttatatttgcgtttaggaatatagatgtttaaggttaggttaagatgtttgttttatttcgttcgcgggtattttttttttagtaggagggtgagggagggggtggtacgtatgtttttatttttttgttatataatgagcgttagtggcgcgtagaatcgtcgattgttttgttcgatttgtaggcggttgcggggagtcgggtcgttttgggttacgtatacgcggaagttaattgtgtttaggaagtttaggaaggttcgggatggggacggatttagtgtttttagaaaagagtagtattgttcgggttaattgcggttattttttatagtttttcgtttgcgatagtttcggggttgcggcggggttggtaagatcgggaggcgttgagtgcgtgtttaggcgttttttcgcggcgggtagagtcgcgcgatttagggcgtatttatttggtagttggttcggcggcgtaggggcggtaggcgttttcggaagtggcggttgggtgcgttcggtttgcgcgtcgttttgtttcgtttcgcggaaggcgtgtttcgggttacgttaattagtgggttttgtatattgtattattttagggttgatgttatggcgcgaagttcggcggtgttgtttttttaggtttcgggaaggtcggtcggtaggggcgggggtaggagtcgtcgattttgggggtgtttcgagttcgtgttgcggttttattgtgcgttttgtcgtcgttatcgcggaaaacgttttgtacgtgcgaggggtattttaggagttttttgtttgttaggtgagaaggcggagatatgattttagaggttagatttatgataaatttgagtttttaacgaaagggtgtttcgaatttatttgttttggtggtagagggtgagggatatattttgggcgttagggtaagatagatttttttagggtaggtttgattttgtttatttatttattagttgggttttgggtttagatagtttttttgggtttagggttatttgtgaacggcgtgtaatttatagggatgtgaggggttaaaaggagattcgggtaggattcgtagatttttagtagtattcggtatgtaatagatatttaataaatgtaatttttttttttaatagtttttgttttttagttttttttagttttttttgttattttaaggataatatttggaaaaaggtgttttttcgtaaaagtagtagttttgaaaagtgggtgtttttatagaggtttttttttggggttttaatttttagtaggatagatataggtttaggttatttaagttgtttttggggtagtttttaggggatattttgtttatatttttttatttagtttttagttttttttgagtgtttcgtgtaggtattttagggagtagagaagtttatagtttttagttggttattttatattttaggtggtttatagatgtagttgttatgttttttattttgggtaggtgttaagggtttaggttttaatcggttttatttaaagttttggtttgttgaattaattttttgttaggaataaagttaagtattttatgatttagaaaatgaagtatttggttaggtattgtggtttacgtttgtaattttaatattttgggaggtcgaggtaggtagattgtttaaatttaggagttcgagatttggtgaaattttgtttttataaaaaaattaaaaaaattagttaggcgtggtggtgtgtgtttgtaatttaagttattcgagaggttgaggtggaaggattatttgaatttaggaggtagaggttgtagtgagttaagattgtattattgtattttagtttgggcgatagagtaagagtgttttttaaaaaaaaaagtgtttatttaggttttttttgttttttattataagtaatattttttttttggttaggtttattttataaataaggttttttaagattaaaatgtttagaagtatataattagtgttttttgtagattgggttatttttatttgatttaattaagatgaaggaggagaaattagaagaatttttggttacggttgtattgattaagtaatagttaaataggtttattaaattgtagaattattattagtgttagagattaagggttttcgtttaaagatggcgattttatgggatttttttttttttttttaatttttagtattttggagagatgagtttcggagttttgtttaggattttataaaagggtaaatttttatattattttttttggtttgggtttgttttttttggagttatgggattgttgatagatttttttgtgaggatatgttaatttgtgttgtgaaatggttttagggtagatttagaaaaagaagagtagttattgtagttatatttggattttttttagattttaaagtattttataaatagaatggttgtataatgtgttatttaaattagaatgttttggatagtaagtggtatgtggtagtattcgtaattatattaaggtaataggattattttaggtagtttagggtagatggttattttttttttttatttaaagattgttaggttatttgttttaggagttgtttacgtagagttatagatgaagttaagtaggatttgttttgtttggtgtttttttagaattttttattttttgattatattatttttttagtttgttgttagttatttgggtttggttttagatagtatatttgtagataaagaagatttgagggatgaggaagggttttgggattgagttgagttaaaggtgatgttggggttatttattatgtaaataggaataagtttgatgttgaaatgatagaaaaattagtaaatattattaatatttgggatatttttaaggtagagatttttattttgtagaggtttttattttggttgattttatttatataattatatttagattggttcgagttggttagtagtatttatatttgtagagataatgtagttagagtttattattaataaattatttgttaggggttttagaaggaggtttggtatatttaggggtttacgtgttttttaggatttttataaatgtttaatttttttagtatttttatgttttttttgtgtattttattttttaatatttttgggttggtatttgatggttgttaggaatgaagtggggtttgttataggtaggaagtagggtttttgttttttagtttttaattttgtttgttgttttttttggtatttttttttttttttttttttttattagtattttgatgttatattttttttttttttttttgtggtgaaatttttttttttcgtattgattttaagtgaagaggatttgagtgtgaggttgaggaaagagtaagggaatgtgtttggtttagttttgtttattattttagagaaattagagatttagtttgggttggagatttttttgtttatttttttatttatttgtttatttatttatttatttatttatttatttatttatttgtttatttatttgtttttttatttatttatttttttttttatttatttatttatttattcgtttatttatttgtttatttatgtatttatttaattatttatttagaagatatttattggggttttattttgtgttggtttttaggttttgggaatataaggaagtttataatttggattttgattttaagaagtttatttatttaatggtttaaaaaaagaaaaaaaaaatttagttttaaatttgtagtttgagttttagttttgttatttatgatttaaaatattaatgatggttggcgtagtggtttatgttttaattttagtattttgggaggttaaggttagtagattatttgaggttaggagtttaagattagtttggttaatatggtgaaattttatttttattaaaaatagaaaaattagtcgggtatggtggtatgtgtttgtaattttaattattgtggaagttgagataagagaatcgtttgaatttgggaggtggaggttgtagtgaggcgagatttaattattgtattttagtttgggtgatagagtgaaattgtgttttaaaaaaataaaaaataaataaaatattgttgataatgaggaataattataattattaagtatttattatttgttaggtattttatataattgttttttttaattttcgtagtagttgtatgaagtaaggattatttttattttttgttttgtatgtgaggagattagggtttatagtagtagttaatttagtagttttgtgattatggtttaggttttagttttttttatgtgtgaaatgggaggttggattaatttagtattttttaaaatttttattgaggtatttttgatagtaaagaagtaaatgtaaggaatttatagtgttgttagaattaatttatttttagtttttgaagttttggggtttattgtaaaaatttatttgaattttgtattttttttggtatataattgtatttgtttttataaaaagataatgtttaaaatgatttattggttaggtatggtggtttatatttgtaattttaattttttggaaggttgaggtaggtggattatttgagtttagaagtttgagattaagtttggtaatatggtaaaatttagtttttataaaatatataaaaattagttggatatggtggtatgtttgtagttttagttattagggacgttgaggtgggaggatcgtttgagtttaggaggtagaggttgtagtgagtcgtattatattttattgtattttagtttgggtgataaagtgagattttgttttaaaaaataaatgaataaataaataaaattatttattgtttagagaaatggagtttttaggaaatgtatcgtgtttggtgggtagtatttttgtgggtttttgggaatatgattaggttcgtttatttacgtgggtgatttgtaaggttttttttggttttggtattgttcggttgtgtttaggttaggatgaggtaagttaaagggggtttgtggaataaggtttagtatttgtttttagtttttgtatttatgttttttaaggaagatttttagaattttttagggtttgttggagaaatgagtttggtagttagaggtaaatgaaaatcggaaaaggtagtgtatatatgttataagaataaaatgtttagaggtaagaaaaggagaaatttatttagaaaggaataaaataaaaattttagggggtttttgatttagaaattttttttgatttttaggttgaaatttatattgtgaagttttaggggagtttgaaaggtgatatttagaaatgtattggggtggtttagggttgggtttttaagaatattgtgaaatagtttagataggtttttaaatgattattttttttttttttttttttggtttgaaattgatgtaaggttattttttttttgttttttttgtagttattgt

SEQ ID NO: 499 - DNA, 7571 bp, Artificial Sequence
  chemically treated genomic DNA (Homo sapiens)
tatttattaaaatggtaatggagatttgatttaagatcgtcgcgttgggggttaatatcgtcgtaataagagagagatagagtttaattttgaatataataagaataagtgggatttatagttaaggaatatggcgtggaggggtggtgttagtaggtggaaagttattaagtagatattaagggaagagagtgttggtttaattaatttagtaggattttgataagatgtagtaggaggtttggggttttagttttagtatttagtgagttagtttagtaggattttgggtaggaataggaattattttttcgggttattgaattttgttaagggaattgatatttaaggttgtagaaatattaagaggggaatgttataagaacgtgggtttagaaagtaaattgattatttagagatgttaaagggattgtttaatttttttagagttatttgtttttttcgtggttaggtttttgtagggagttaggtggagttttggtagtattagttagtagtttgtgtttttggaggttttttttttttttttttttatttagatgtggttttttagttattggttttgttttggtgaatgtattttttgagaaaataaatgttaattttgtaatttaaaatgatgagcgtcgtttatatatttgtttttgagtagaaatgttttaaggatttttatttttttatgaagtgtaaaatgggtcgtagatatcgggttttgttttttttcgttttagtttgtaaggttgttagtaggttttttagtgcggattagttttttaatgatgtggttttatttttattggagttaaatgtattattaatgttggtttacggtttagaagtatttgtattttttttatcgttggggagagagaggggagaaggagggagtttgtgtgtaagggataggtttgattttagaggatttcgggtattttataaggaaggtttttgggttttgtttttgagaggttattaaaattcgtggttgtttagtttaagttttttttatagatatcgagtgataattgtttaaaatttaaagtgtagaattttaatttttggttaatttgatttaattatttgtatttttaggtgttgtttatgtgtttggttatttatttattatagtattgtttagtgttgttattattgtttatttattatagagaatttttgttatttatttaattttttattttattaatttagatgatgagattaatagttaaaaaggtagtttgggagattacggtttttttttttattatttggtagaagggaaatatgtttttttttgggtagttggatttttttaagtatatgggtgttggaggttttaggtttagttttaggtttattgtttttttttgtgtttttgtagtatgtttttgaagttgtaggttgttttgttatttttaatcgtgtttaaatattattattgatgtttaggtataatagtttataaggtagtttatttttttagatatatgattatagagaaggtaaaatatttgtttaaggttattaaatattaggagtagttgtttagttattgtaattttttattttttattatagtatattgaatacggtttttgtagtttttgagagtattttatattggtgtttgttttataagggttagagaggtcgttgtattaggttagttgattttttttgtagtatgtgtttgtagggtacgttttgatagaggatgattatcggcggtggaattatatatagggaaataggttagtattttagtttttattttatattttatttattattatgtttttgttatttgggtgatttgtacgttttttttaatgataaaagataggggatttgtgtgtattttagtttattttttgtataatatatttttttgagattagagttttagtggttagggaaggtgggagttatagagaagaattaatttttatatttgggagatgattattttgtttataagtatttggttaggggttgtttttttttttttttttttgaaaatttttttttattttttgtttaattaggaggtatatgcgtaattttgtttgaagatttttttttttttatttagtagtaaatattatttgggttatttgttgtatttgttggggtgtatggtttttttagggacgttggattgatagtggggtgagatggttattgggtttcgggtaataaggttttttgttttattattgaatatgagtatttatgagtaatattgttttcgttgtcgggtttttgttgatttagttttagttatggcggagttttaggattatagtaggtttgggttgattttggttgatttttatttttattatttttaggagagttttttgggtgttttgtaaaggtttagagttttttggtgtttttggtaaagttgttatttcgttataagggtatttgttatagggttatttttaggtatggagggtggggttgagagaataaagggagtagttgtttgtttagagttttttttttattttcgttatttttggagttatattttagtttaggttcgtagtattttaagttggggattttgttattttatagggtatttagttgattaggtttttttagtttggggagaagaatttataattttggtaatgaaggaatttagggtttattggaaagttatattgagtaaaggataaagatatatttaggtttgttttgtaggattttatttttgggaagtttaaggataggcgataaacgagtttatagggtaggatgggggttgttagggtaggatgggtatgagggtgagttgtagaggtaggaggatatatcgtttggggtaaggtagatgttataggtttggataaagtggtaatacgggtatatgcgttaatgaaattttttagattagatattttgttgtttataaattttattttatttatagtgatgttttaaatttaggtgagttttttaagtagtgtagaggattagcgttagtagtatgacgtttagaggggaggagtaagagatattcgtgggtttttatatttattttgtggttgttgtttttttttttgatatttttattgtttgttaatgggttttattgtattttttattcggttttatttatagttattatgagattttagatcgtttttttttttgtttatattttttttaggagttttttttttttggagtaggtatgtttagtttcgttttagggtttttgtattggtttttttcgttgtttggggttgttttttgtttaggtagggttttttatttttttagttttatagagttttttttgattaggtttagtggtattatttttttttattttatatttttatttttaatagagagattaattttttgatattaattattgattattattcgttatttttttatatattttaatgttgggttgtgtagtgttatagttattagttatatgtggttatagggtgtttgaaatggggttagtataattgatatttatatatatagggaattttaaagatttagtatatatatttaaaataaaataatttatgttattaatgattttttttatgtgttgaaataatattttggatatattaggttaagtaagaaatattataaatattatttttatttgttttttttttattttttgaaatgtgttttttagaaagttttaaattgtttttgggttcgtgttatatttttgtttggtagtagttttgtaatgtagtgtttatggttcggttatttaggtttcgtttttagtttttagattatttggtgtagggggaagttggtgaaaagtttgtttattgaataatgagttgtgaaaggagaatttagagttttttatttaaataaaggttaatttttttgtttgaaaagttttttagtatagggtatggtttgagttttttgtggtttttggaattatatttttgttttagtgatttttagattttgattaaatgtttacggatatttaggatttttgaagatttcggaaggtcgagatttttattttttttttttttgaggaaatgaagttagggggtcgtatgtttttagggtttagggggttttgatatttttttggagggtagggtgatttaagtttgggaggagggataggtttttgggaagagatggagttgagggggtggagtgggtagaaggggggtataggtgtggaaggggtgggggaagaggggttaggagtggggtgagaagaggggaaagaagaggataggagggatagggatagggagaggttaggaatgggtaggaagggaagatagaggaggggcgggacgagggaggggcgatgaagaggggtcgagttggggtgggggcgaagtgggagtaaggataggagtggaggagggagatgaggggtatgggaggcggtgtttgggggttgaaaggggaaagggatagaggagaaggagtttgaagagtggcggtatggaggggttcgaagtggggaggtgggaatggtcggatggatggggaggaatggggaggataggagaggtaggggaggttggaagatagtaggagaggagggggaggggaggggaggggatggatgggaatggatagggaaggttagggagattggggggttaggggaggaggggagggagaggggaggcgggaagggagaggagaggtcgggaggggttgggaggggagggaaggggatggatggggaaggatagggaagtttggaggggtaggggaggttgggatgggaggagattgatagggagggatttggaggcggggagaggtaggggaggcggggagaggtaggggaggcggggagggagaagggaggtgggagggacgaggcgtttcggaaaagggagtgtaggtcgcggtggggtggggcggcgaaggtcggaagggataaaatcgtagtcgtcggtttcgcggggtttacggtttcgtttcggtatcgtagcgggttttttttatttagttttagtttttcgtttgcgttttatttttcgcgtttcgcgttttagtcgattatggtcgggtttttgcgcgtttcgttgtttttgttggttattttggtcgtggttttggtcgtgagtttcgcggtcggttttagtttcggtaagtcgtcgcgtttagtgggaggttttatggacgttagcgtggaggaggagggtgtgcggcgtgtattggattttgtcgtcggcgagtataataaagttagtaacgatatgtattatagtcgcgcgttgtaggtggtgcgcgttcgtaagtaggtgcgtgtcgtttttcgtagggttcgaagtttcggtttcgtcgttttagttttttttcgcgttgttttcggatttcgtgttgttttttttcggcgtttgggttttttattcggattttgttttcggttttcgttgttattttcgagtttttggcgggcgtgttcgggaatgttttgagtttggtttggtttggaatcgtacggatacgttaggttcgcgttcggcgtttaagattagtttttaggagttagttcgagttgcgtcgtagcgcgggggtaggtataggacgttttatatagttttgtttcgattttttgggacgttgggtttcgggtgcgttgttgaatacgtaggagaaggaaaaatagagttttttatttggttgtttttttgtttttttattaaataatttttaagtatttttgttttttttaattttttattttttcgtaattttagatttatagagtagttgtaaaatagtatagggtatttttgtagattttttatttagattttttagatgttagtatagatgttaatattttgttttgtttgttttttttagtttatttttcgaatgtgaatatgggtgtgtgtatatgtattgtatatgtattttttgtttgaattttttgaaagtaaatattttagtgtgttttttttaaaaataagggtaatatcgtatataattattattttattttgaaaattagtattgatatatttatgatttaatgtttagatttatttagttttttttgtttgttgacggttttcgtgttttaggacgtttttgggttatgagtgtatgagtttagttttgttttgttttttcggttttttttaatttgtagtagtagttgggtttgtgttacgatcgtgttattttttagggtttagtaggtgtggatggagattatgttgattttgggtgggtttgatgttgtttaagatgagatttaggttatgcggtttattttttttttagaatatttttcgtaggggttatacgtgagtttggtattttgttttgtagagttttgtttttttttttaagttatatttttgggtatagttttttaggattagcggtttttatttttaggtcggttgattattttttatattttagggtagttgagtttttgttggggtggagtatgtttgattttgtttttattagttgatgtagagttagattttagttagatgaagatatttagtagatcggagtagggggtcggatcgggagggagttttagtagggttattaggtttagtttgatttgtattttatggtagagtagcgaatagtgatatagattttagagtttttttatttttttttggaaatttagaggagtttagattagtcgcgtttttttcgtagtcgttagttggggttttttttttgtataggagggttattttttggtgtagggttttcgttggtttgtattttttttttattgggagtgaagtatggggtattgtagatcgttgggttttggagtttattttatagaggagtagattgatattagagggattataggttttgtttgtgtttttataggatttgtgtgtggttttatagggtaaggtttagtattttggttttagggttttttattttatgtttttttatagttttgataagttatgttttggggcggtattgtgtagggaaagtatttagtttttttttgaagttgtaattttaagatatgtaggtgtgtgatttattttagaaatattgttttgaaaattatatttggaatggaagtacgtgggaagtaatgtttattggtttaaaatattaatgtatgtgagtattttattttttagtgagaaatgaggaaaaatatttttgggttaaatggtaggaatgagatgttttgtggattgaatgttaggaattggaagtttgtcgaaattttattattatatgagaatttttttagaatagatttagtgtttttgttttttgggttataggtagcggaatttagttaatttttggtattggtatagagaaataagttatcggggaggtttggggtatggtatttttgttagttggtaggaggaggtggtttgtgtgttttgtaggtgataatgtgggtagtttatgaaggtaggtttgaagttttaggtaagtttagtgattcggttatagtgaagtgtttgtgtgtgtaagaaattgatagaacgtgttgtttttgttttttgtttttttatatgtgtaga

SEQ ID NO: 500 - DNA, 7571 bp, Artificial Sequence
  chemically treated genomic DNA (Homo sapiens)
tttatatatgtgaaagagtaggaggtagggatagtacgttttgttagttttttatatatataggtattttattgtgatcgggttattgggtttgtttggggttttaagtttatttttatgagttgtttatattgttatttgtaaggtatataagttatttttttttgttagttggtagggatgttatgttttaggttttttcggtaatttgtttttttatgttaatgttaaggattaattgaatttcgttatttatgatttagggggtagggatattggatttattttaggaaggtttttatgtgatgatgaaatttcggtaaatttttagtttttggtatttagtttatagagtattttatttttgttatttaatttagaggtatttttttttattttttattaggagatgagatgtttatatatattgatgttttaggttaataaatattgttttttacgtgtttttattttaggtgtgatttttaaggtaatatttttaaagtgagttatatatttgtatgttttagggttgtaattttagaagagaattgaatgttttttttgtatagtgtcgttttaaaatatgatttgttagaattgtggagaagtatgggatgagggattttgggattagggtgttagattttgttttgtggaattatatataagttttgtagaagtataagtaaggtttgtgatttttttggtgttagtttgtttttttgtaaaataggttttagggtttaacgatttataatgttttatgttttatttttagtgagagagaggtgtaggttagcggggattttatattagggaatggtttttttgtgtagggagagggttttagttgacggttgcgggagaaacgcggttggtttggatttttttgaatttttaagagaaggtggaggagttttaaagtttgtgttattgttcgttgttttgttatgggatgtaggttaagttgggtttggtagttttattgaagttttttttcgattcgattttttatttcggtttgttgggtgtttttatttggttgaggtttaattttgtattagttgatagaggtagggttaggtatgttttattttagtagggatttagttgttttgggatgtagggggtggttagtcggtttgagggtgaaggtcgttagttttaggggattgtgtttaggggtgtgatttggggagggaagtagggttttgtaggataaggtgttaggtttacgtgtggtttttgcggagagtattttgggaggaggatgagtcgtatggtttagattttattttgagtagtattaagtttatttagagttagtatagtttttatttatatttgttagattttgggaaatggtacggtcgtggtatagatttagttgttgttgtaggttaaaagaggtcgaggggataggatagggttgaatttatgtatttatggtttaggagcgttttagggtacgaaggtcgttaatagatagggaaagttgaatgagtttgagtattagattatgaatgtgttagtgttgatttttaaaatggaatagtgattatgtgcgatattgtttttgtttttaggaaaaatatattgaagtgtttatttttaaaagatttaggtaaaaaatgtatatatagtatatatatatatatttatatttatattcggaaagtgagttggggggaataaatagggtaaaatgttaatatttgtgttaatatttgagggatttgggtgaaagatttatagggatgttttgtgttattttgtagttgttttgtaagtttgaaattacgggagaataaaaagttaaaagaaataaaagtgtttaaaaattatttggtggaagaataaggaggtagttagatgaggggttttgttttttttttttttgcgtatttagtagcgtattcggagtttagcgttttaggaggtcgggatagagttgtgtgggacgttttgtgtttgttttcgcgttgcggcgtagttcgagttggtttttggaagttgattttaggcgtcgggcgcggatttgacgtgttcgtgcggttttaggttaggttagatttagggtattttcggatacgttcgttaagggttcgggggtgatagcgaagatcgggaatagggttcgggtgagaagtttaggcgtcggagaggagtagtacggggttcgggagtagcgcggggggaggttgggacggcggggtcggggtttcggattttgcggggggcggtacgtatttgtttgcgggcgcgtattatttgtagcgcgcggttgtggtatatgtcgttgttggttttgttgtattcgtcgacggtaaagtttagtgtacgtcgtatattttttttttttacgttggcgtttatggggttttttattaggcgcggcggtttgtcgggattggagtcggtcgcggggtttacggttagggttacggttaggatggttagtaggagtagcggggcgcgtaggggttcggttatggtcggttaggacgcgggacgcggggagtggggcgtaggcgagaggttggagttagatagagaggattcgttgcgatatcgaggcgaggtcgtgagtttcgcgaggtcggcgattgcggttttatttttttcggttttcgtcgttttattttatcgcggtttgtattttttttttcggaacgtttcgttttttttatttttttttttttttttcgttttttttgttttttttcgttttttttgttttttttcgtttttaggtttttttttattagtttttttttattttagttttttttgtttttttaggtttttttgtttttttttatttatttttttttttttttttttagtttttttcggtttttttttttttttttcgtttttttttttttttttttttttttttggttttttagtttttttggttttttttatttatttttatttattttttttttttttttttttttttttttttattgttttttagttttttttgttttttttattttttttatttttttttatttattcgattatttttatttttttatttcgggtttttttatgtcgttattttttaggtttttttttttttgtttttttttttttttaatttttagatatcgttttttatgttttttattttttttttttatttttgtttttgtttttatttcgtttttattttagttcggtttttttttatcgtttttttttcgtttcgttttttttttgttttttttttttatttatttttggtttttttttgtttttgttttttttattttttttttttttttttttttattttatttttggtttttttttttttattttttttatatttatgttttttttttatttattttatttttttagttttatttttttttaaagatttgtttttttttttaagtttaggttattttgttttttagagaggtgttaaggttttttgggttttaaaagtatacgattttttagttttatttttttagaaaagggaaagatagaggtttcggtttttcggagtttttagaggttttgagtattcgtgagtatttggttaaggtttagaaattattaaggtagaggtgtgattttagaggttataggagatttaggttatgttttgtgttagggaattttttaaatagaagaattaatttttatttgagtaaaaaattttgggttttttttttataatttattatttagtaaatagattttttattagtttttttttgtattaggtagtttaggagttagagacggagtttgggtgatcgagttatggatattatattgtagggttgttgttagatagaaatgtgatacgaatttaggagtaatttaaaattttttgggagatatattttaaaaagtaaaaaagaaataggtgaaggtaatgtttataatattttttatttaatttaatatatttaaaatattattttaatatataagaagaattattaataatataggttattttattttgggtgtgtgtattgagtttttgaaattttttgtgtatgtgggtgttaattgtattggttttattttaagtattttgtggttatatgtggttggtggttgtggtattgtatagtttagtattagggtgtgtgggaggatggcgaatagtgattaataattaatattaggaaattagtttttttgttggaagtgagagtatgggatagagagagatgatgttattggatttggttagggaggattttatgagattggaaaggtgagaagttttgtttagataggaaatagttttaggtagcgggaagggttagtgtaaaggttttgaggcggggttgggtatgtttgttttaggaagaggaagtttttggagggagtgtgagtagggaagggaacgatttggagttttatggtaattgtgggtggggtcgggtggaaggtgtagtgagatttattggtaggtagtgggggtgttaggagagggagtagtagttataggatgaatgtgggagtttacgggtgttttttgttttttttttttgggcgttatgttgttggcgttggttttttgtattgtttggaaaatttatttgagtttagaatattattgtgagtgaggtagaatttatagataataaaatgtttaatttgggggattttattaacgtatatattcgtgttattattttgtttagatttgtgatatttgttttgttttagacggtgtgtttttttgtttttgtagtttatttttatgtttattttgttttggtagtttttattttgttttatagattcgtttgtcgtttgtttttgagttttttagaaatggagttttgtagagtaagtttgggtgtgtttttgttttttgtttagtgtggttttttagtgggttttgagtttttttattgttaggattgtgagtttttttttttagattgagaggatttgattagttgggtgttttgtggggtgataaagtttttagtttgggatgttgcggatttgggttggaatgtgattttaggagtggcgagggtggaaaggaggttttgaatagatagttgttttttttgtttttttaattttattttttatgtttgaaggtgattttgtggtaaatgtttttatggcgaggtggtagttttgttagaaatattagaaaattttgggtttttgtagggtatttagaggatttttttgggagtggtggaggtgagggttagttagggttagtttagatttgttgtgattttggggtttcgttatggttggggttggattagtaggaattcggtagcgggaataatattatttatggatgtttatgtttagtggtgggataggggattttgttattcgaggtttagtgattattttattttattgttaatttagcgtttttagaaaagttatgtattttagtagatatagtaggtggtttagatggtgtttattgttgggtgagggaaggaaggtttttaaatagggttgcgtatatgttttttagttagataggaaatggggagagatttttagagaagggaaagagagggtagtttttggttaggtgtttgtgagtagaatggttattttttaagtgtgggagttggtttttttttgtggtttttattttttttggttattggggttttagttttaagaggatgtgttgtgtagagggtaagttgaaatatatataaattttttgttttttgttattaggaaggacgtgtaggttatttaaatagtaggagtatggtggtaggtggggtgtgaggtgggagttgaagtgttggtttatttttttgtatgtgattttatcgtcggtggttattttttgttaggacgtgttttgtaggtatatgttgtagggagggttagttggtttgatgtagcgatttttttaatttttgtaggatagatattagtgtagggtgtttttaggagttgtaggagtcgtgtttagtatgttgtaataggaagtgaaaggttatagtagttgggtagttgtttttgatatttggtgattttgagtaaatgttttgttttttttgtggttatgtgtttggagaggtagattgttttgtaaattgttgtgtttgggtattagtgatgatgtttaaatacgattaaaagtaatagagtagtttatagttttaaagatatgttatagagatatagagagaaataatggatttaggattgagtttggggtttttagtatttatgtatttggaggagtttagttgtttaggagggggtatattttttttttgttaggtgatgaaagagaaagtcgtggttttttaggttgtttttttgattattgattttattatttgaattagtagagtgagaaattaggtaaatggtagaaattttttataataaataagtaataataataatattaaataatgttataataaataaatgattaaatatataaatagtatttaaaggtgtaagtggttaaattaagttggttaagagttgagattttgtattttgggttttgagtaattattattcggtgtttatagagggagtttggattgagtagttacgggttttggtagttttttaaaggtaaagtttaggagttttttttatggagtgttcggagttttttggggttaagtttgttttttatatataggtttttttttttttttttttttttttttaacgatggaggaaatgtagatgtttttagatcgtaggttaatattggtaatgtatttggttttaatagagatgaagttatattattaggaaattgattcgtattgggaagtttgttggtagttttgtagattgaggcgagaaagggtagagttcggtgtttgcggtttattttgtattttatggggggatgagaatttttgggatatttttgtttaggagtaaatgtgtaaacggcgtttattattttggattatagggttaatatttatttttttaaggagtgtatttattagagtagagttagtgattgaagaattatatttgagtggaagggagagagagagaggtttttagggatataggttgttggttggtgttgttagggttttatttgattttttgtagaggtttggttacgaagaaaatagatggttttgagggggttgagtaatttttttggtatttttgagtggttagtttattttttagatttacgtttttgtaatattttttttttagtgtttttgtagttttgaatattagtttttttagtagagtttagtgattcgggagagtggtttttgtttttgtttaggattttgttaagttgatttattgggtgttggagttggagttttaggttttttgttgtattttgttagaattttgttaggttagttaagttagtattttttttttttgatgtttgtttagtaattttttatttgttaatattatttttttacgttatgttttttggttgtaaattttatttatttttgttgtgtttagggttgagttttgttttttttttattgcgacggtgttgatttttagcgcgacggttttgaattaagtttttattattattttaataagtg

SEQ ID NO: 501 - DNA, 5857 bp, Artificial Sequence
  chemically treated genomic DNA (Homo sapiens)
  unsure 2035..2036, 3690..3691: n is a or g or c or t
ggttggagtgtagtggcgcgatttcggtttatggttatttttgttttttcggtttaagcgattatttttgttttagtttttcgagtagttgggattataggtatgtgttattatgtttagttagtttttgtatttttagtagagatggggttttattatgttggtgttggttaggatggttttgattttttgatttcgtgatttgttcgttttagtttttttaagtgttgggattataggcgtgagttatcgtatttagtttaatttttgtatttttagttaagatggggttttattatgttggttagattggtttcgaatttttgacgttaagtgatttgtttattttagttttttaaagtgttgggattataggtgtgagttattgcgttcggttttaatttttttttttattttagtaagagtggtttatttttttagaaaattgttttttttttattttttaatattttgtaatttggttttagtttgaattatttaattgaaattgataaggttattaatgattttttaattgttaaatgtaatagatattttttattttagttttgttggtggtttggtgatataaggttattttttgttttgtagagtttttttattatttgttttttttttcgtttttggttatcgtttttagttttttcgggttttgtttgtttattgtttttataggatgggaaggttttgttttttttttttttttattcgtttatttgggtttataggtgaatttattgttatatttttaagatttaagtatcgattttatatttagtttatcgttttttttagattttagatttatggatttaattgttattgtttttattgggaagtttaaggggtattttaaatgtaattttaattatatttattagttttttttttaattttggttttttttttaagtttttttttttggggaagtttaattaaattattttattttttaaatttttttttaatttttatttttatttttattttatttttttgttatattagaatcgttcggttttggtttatgttattaaattttatttgtatttttttaaatttttttatgttatttatttttttgttttttttttttaaattttttttttttttgttagaatgggttttttgaaatgtagatatggttaggttttttttttttttgttttgatgagaatggaagaggattaagatttatgttttttgatttgtcggtgattttataggtttttttgttatttaatgggtttagaagaggttggagagttatttgaggtgtaatgagcgttttaattttttttttatggggtttggagtttagtagagtgtattagggtgaggaggtttttttgtgggtattgtttattttagattacggatttttaataacgtgtaattgggagatttcgggaggttatgtatatttttatagtatatttgatttttgagatggagttttattttgttgtttaggttggaatgtagtggtatgatttttgtttattgtaatatttattttcgggtttaagcgattttcgtgtttcgattttttaagtagttgggattataggtatataatattatatttggttaatttttgtataatgttttaatttgtatggattttgtattttttgtaggttgtggagatataattatagtttattttggtttatgtatagattatatttttttagttagagtttatattttttttttagggttatgtggttttgtttttttttagagtaagtttttttgttatatttttagtttttttttgtttagtttagtttttatttatatagattcggttatgttttatagaggtcgggatggttcggaagagttaattttttaggcgtaggttttggcggtagaagttttttatgatttggtggtttttatcgtagatgttcgtgggacgaagggtatacgttattaggggtagttttttacggatttggtggtaaaggtaggtattgttgagatttgggattcgatagtttgtttnncgtttcggtttttttgggttggtagggtaagggggtgtgtatggtaggagttttatttttgcgttttttttttttgggtttatttttttttcgttggtttttaggattagttattcggttagggttttgttgtaaggataggggtgtttgtgtattgtttcgtatggggtgttttcgttgtttttggtgggaggagaaggaagatttaatgttgagggaaatgggtttttagaggataagagggtttgttatttatttgtagaaggggtgatttttggtgttaggttttataatttttatgttgttggtgtagattaggaatcgtgtttcggtttgtatataagtttcgattacgtttcgggtatttggtagaggaggaggcgtatttaagttgtagttttttttttttttgtattttttttttttttattttaggtttagggaaaattatgataggttaggggaggcgggggtagggttgttaataggataatttgttttaggggagttatcggaggttaaggttaaagatagagtggggaataaataggtaagatggttaggagtgtttagagttttttattttgtacgttgattttatggatggttttgggattggttttgttaaatacgtttattagtttagtcgtgtggatgattatatgggtttcggttatagttgttgttattttatgggtttgggttacgtttttttggatggtagttatttttataggttttggtcggggttggaggatataggttatgttagagttggggttagagcgtagaggttgggtttattttttattttggagttacgtttttaatgtgatttattcgatttatttatgtggatagaaattagtattatttgttttattgtaggggtggggattttagtttgggaagggttggggaagcgtttatattttttttattataagtttttttaataagaatttgtttttagtttttttagttagggatttaggtgttggttaaagattcgtagtttttcgagtcggggttttcgttgtagtagtattcgtattacgtgtttttttaggaagttatagttttttgtgattaggtatattagtttttgggtttgtgtagagtcggttatgtttggttggggaagagattttggtttatttaggggttggttgttatttgttgtaattatttgttattgttggaggtgttttggagcggtgacgaggttggcgtttgcggggagggtagagttgattttgggagttgtagtaattaggttatttgtcgtttgtttttgttgatggttgagttacggagagaggggcgggtttggggtgtaggaaggggttagggtttagggagagagatttgaaggtagtaaaagggtggggaggttaggagttgagggaggtggagggaaggttataggaaggtgggaagggtcggatggagggaaaggttatttgggtattggtagcgttttgtttatttgtagtcgttattttagggtgtttagattggtttggaggggttttttttttcgtttagggttggtcggtcgtatatcgttttttcgttggttttttttttttttttttgttttattttaggaatagagatttcgttagtataattttattatttttgcgttaanngcgtttttgcgtcgttttgtgtttattggtatttgggttagcgagaaattggtggtaataaatatttatagttaatatatatgtgattgtgggttttattaattgtttggtttaattttatttgttgtgttttttttagttaaattttttttttttttattttagtaattgtttgtttacggtaatatatatatttatttatacgaatatacgtatatatatgtacgcgtatatgtatatacgcgtatatttgtatatttatacgtatataaatttattcgtatatacgtatgtttatacgtatatacgttcgtatgtacgtatatacgtagatatacgtaagcgtatatatatacgggttttttcgtttttatttataaattttattagtttttgttgtttatgggttttttcgatagatcgcgagtttttcgcggggcgtagaaattaagtatggattatttttatgtgttttttttttcgtttatattaggttaatggggttgacgtatgggtgtgattttttgtttaggtttttgtagtttgtttttttgggggtggggggcggggtgtgattgttattaggtttgttaagaagaggagagtagtgtatttgttttttttttggtgggtgtgataatgagattggaagttatttaagataggttaggagatgtatgtttggataaatatgttttaagtttgacggtttttatcgtagtttttttcgtaagtcgcgttttagattagagagagggtttgcgtatttttgttttgttagttcggtagtttttttttttgtttttttagttttatatttaaagtagtcgttgttttaggtttaagtttgagttcgcggtagaatattgggttgttttttaggttttgatatttttagtttcgaggttttgtttattcggtagataatttgttttttttttcgggtttttttttttattaggttttacggacgaggagttgagtttagggttaaggaattttgttttaaaagggggggtaggatgaaatgtttggggtttgggttttgattcgtgcgttcgggttacgtttttagttttttttttttttttttttttcgaaaggggggcgtgaagggagtcgggattagttaggggttagtatgagtcggagggagggaagtttgggtaaggggttgagggatcggacgtcgggtcgttgaggggcgtaggagttagagggattgggagttgggggtttgggttttcgttatttcgggttcgggaggggagcggttttggcggggaagggtagggtttcggtgttaggtaacgagtgagcgggtgagttgtgagaaatagtaggcgttagggtttagaggaggtttggggttgaggttttagggatttgggtttagggtttagattatcggttcgagtatatttagggggaggattggggtcggggttggggtaggatttttgcgtttattgagtttcgggaaagaattagagttggggggttgaaggaaggggtagagtaagggaaggtagttttggagttataggaagtagtgagtgataataggagacgaaagtttgggttgttgaggatcgcgattggtgttgggaaatttcgggggtggggcgggggcggggtatcgggttaggattatattttttagtacgtatcgggcgcgtttgtgcgtttcgggaaatggagttttttcggggcgttagatattggtttttgcggattttgattcgttgattagttaggttagcgttttgtatggatggggtattagggagagaaatggaaatggaagttagtttttttatttgtaaaatgggtttttaaggtatattttgatatgaagttttgtatttcgatgatgttgaagtttattagtagttattgaggtagaaatatgtaagttttgtttttaaagggtttttaggttaaggtagatatatatagaaaagtcgttaaaagagttattttggaatttatgtaaatggttttaagttaaaggaaggagttcgtttataaaggagaagtgattttggaggttttattgaggaggtagtatagttatgtattgtataataatatttggttaataggtggatcgtatagataatggaggttttataagattttatgtatttttagtttgggtaatat

SEQ ID NO: 502 - DNA, 5857 bp, Artificial Sequence
  chemically treated genomic DNA (Homo sapiens)
  unsure 2167..2168, 3822..3823: n is a or g or c or t
atgttgtttaggttaaaaatgtatagaattttatgggatttttattgtttgtgcggtttatttgttgattaaatgttgttatgtagtgtatgattgtattgtttttttagtgaagtttttagaattattttttttttataaacgaatttttttttttgatttaaggttatttgtatgagttttagggtagtttttttaacggtttttttgtgtgtatttgttttagtttgagagttttttgaagatagggtttatatatttttattttagtgattgttagtggattttaatattatcgaagtatagaattttatattaaaatgtgttttgaaggtttattttatagatagggagattgatttttatttttatttttttttttgatgttttatttatgtaaggcgttggtttggttagttagcgaattaaggttcgtaagagttagtgtttggcgtttcgggaggattttatttttcgaaacgtataggcgcgttcgatgcgtgttggggaatgtagttttgattcggtgtttcgttttcgttttattttcgaagttttttagtattagtcgcgatttttagtagtttagattttcgttttttgttgttatttattattttttgtgattttaagattgtttttttttattttatttttttttttagttttttagttttgattttttttcgagatttagtggacgtaggggttttgttttagtttcgattttagttttttttttgggtgtattcgaatcggtgatttaagttttgagtttaggtttttgaaattttagttttaggttttttttaaattttagcgtttgttgttttttataatttattcgtttattcgttatttgatatcggagttttgttttttttcgttaaggtcgtttttttttcggattcggggtggcggaaatttagatttttagtttttaatttttttgatttttgcgttttttagcgattcggcgttcggttttttagttttttatttagattttttttttttcggtttatgttggtttttggttgatttcggttttttttacgtttttttttcgaggggggagaaaggggaaagggttgggggcgtggttcgggcgtacgaattagagtttagattttaaatattttattttatttttttttttgagataggattttttggttttgagtttagtttttcgttcgtggggtttagtgggggaaggggttcgagggggaaggtaagttgtttgtcgggtggataggatttcggggttgggggtgttagggtttgggaggtagtttaatgttttgtcgcgggtttaggtttggatttgaggtagcggttgttttgggtgtaaagttgaggagataggagagggaattgtcggattggtaggataggaatgcgtaggttttttttttagtttggggcgcggtttgcgagggaggttacgatgggggtcgttaggtttggggtatgtttgtttagatatatattttttggtttattttagatggtttttaattttattgttatatttattaggagggagatagatatattgtttttttttttttagtaggtttagtaataattatatttcgttttttatttttaggagaataagttatagagatttggataggaagttatatttatacgttaattttattaatttggtgtagacggaaaggaaggtatatagggatgatttatatttggtttttgcgtttcgcgaggggttcgcggtttgtcgaggaagtttatagataatagaagttaatggggtttgtgaatgaagacgaggaggttcgtgtgtgtgtgcgtttgcgtgtgtttgcgtgtgtgcgtgtatgcggacgtgtgtgcgtgtgagtatgcgtgtgtgcgagtggatttgtgtgcgtgtgagtgtgtaggtgtgcgcgtgtgtgtatgtgcgcgtgtatgtgtgtgcgtgtgttcgtgtgagtgggtgtgtgtattgtcgtgagtagataattgttggaataaaagaagaaagagtttaattggagagggtatagtagatagaattgagttagataattggtagggtttataattatatgtgtattaattgtaaatatttattgttattagtttttcgttgatttagatgttagtgagtatagagcggcgtaggggcgtnnttggcgtaagagtggtggagttgtgttggcggggtttttgtttttggaatggggtaggagggagaaggaggagttagcggaaggacggtgtgcggtcggttagttttggacgaaagaagaggtttttttaggttagtttgggtattttgggatagcggttgtaggtaggtagagcgttgttagtgtttaggtggtttttttttttattcggttttttttatttttttataattttttttttattttttttaatttttggtttttttatttttttattgtttttaaatttttttttttaaattttgatttttttttgtattttaagttcgttttttttttcgtaatttagttattagtaggggtagacggtaggtggtttggttgttgtagtttttaggattagttttgtttttttcgtaaacgttagtttcgttatcgttttagggtatttttagtagtaataggtggttgtagtaggtggtagttagtttttggatgagttaaggttttttttttagttaggtatggtcgattttgtataggtttagaagttggtgtatttggttatagggggttgtggttttttgggagagtacgtggtgcgaatgttgttgtagcgggagtttcggttcggggagttgcgggtttttgattaatatttgggtttttggttggaggagttgaagataggtttttgttgggggagtttgtggtggagagggtgtggacgtttttttaattttttttaagttgggatttttatttttgtagtggaatagatgatgttggtttttgtttatatggatgggtcgagtgagttatattgggaacgtgattttagggtggaagatgaatttagtttttgcgttttggttttagttttgatatggtttgtgttttttaatttcggttagggtttgtgagggtgattgttatttagggggacgtgatttaggtttatgaggtggtagtagttgtggtcggagtttatgtggttatttatacggttgggttggtagacgtgtttggtagggttagttttaagattatttatgaggttaacgtgtagggtgaggagttttggatatttttggttattttgtttgtttgttttttattttgtttttggttttgattttcggtgatttttttgggataagttgttttattgatagttttgttttcgttttttttgatttgttatggttttttttggatttgggatggggaggaggaagatgtagagagggaagaagttgtagtttggatacgtttttttttttgttaggtattcggaacgtgatcgaggtttgtgtgtagatcggaatacggtttttggtttatattagtagtatggaagttgtggggtttaatattaaaggttattttttttataggtgagtggtaggtttttttgttttttaagagtttattttttttagtattgagttttttttttttttttattaggggtaacgaagatattttatacgaagtagtgtataggtatttttatttttgtagtaaggttttggtcgagtggttggttttggaggttaacgggaggaaggtgagtttagaaaaaggaggcgtagagatggggtttttgttatgtatatttttttattttgttagtttaaggaggtcggggcgnngagtaagttgtcgggttttaggttttagtagtatttgtttttgttattaggttcgtggggggttgtttttggtgacgtgtgtttttcgttttacgggtatttacggtgaaggttattagattatgagggatttttatcgttaggatttgcgtttgggaggttggttttttcgggttatttcggtttttgtggagtatggtcgggtttatgtgggtgaggattgggttaggtagggggaggttgagaatatggtaggaggatttgttttagaagggggtaggattatatggttttgggagagaagtgtggattttggttagaaaaatatggtttatatatgggttaaggtagattgtgattatgtttttatagtttgtagagaatataggatttatgtaagttgggatattatataaaaattagttagatgtggtgttgtgtatttgtagttttagttatttgggagatcgaggtacgagaatcgtttgaattcgggagtggatgttgtagtgagtagagattatgttattgtattttagtttgggtaatagagtgagattttattttaaaaattagatgtgttgtgaagatgtgtatggtttttcggggttttttagttgtacgttgttgagaattcgtggtttgagataggtagtgtttataggaagatttttttattttggtgtattttattaagttttagattttatgagaggggagttgaggcgtttattatattttagatgattttttaattttttttgggtttattgggtagtagaagggtttgtggggttatcggtaggttagaaggtatggattttagtttttttttatttttattagagtaggaaggagaggggtttgattatatttgtattttagaaagtttattttagtaggaggaggagagatttggaagagaggagtaaggaggtgggtgatatgaggaggtttgaaaggatgtaggtgagatttaatggtatgaattaaagtcgagcggttttaatgtggtagaagagtggagtggaaatgggggtgaggattggagggaaatttaggaggtaggatgatttggttaaatttttttaggaaaagaaatttgggaagaaaattaggattaggaagaaaattgatgagtgtagttgaggttgtatttgaggtgttttttgggttttttagtagaaatagtggtagttggatttatggatttggggtttggaaagaacggtaggttggatatgaggtcggtgtttaggttttgaaagtgtagtagtgaatttatttatagatttaggtaggcgagtggggggagagaaagggtagagtttttttattttgtgagagtagtgggtaagtagggttcgaggaggttgagagcggtgattagaggcgagaagggaagtaggtagtggagaggttttgtaaagtagggagtggttttgtattattaggttattagtaaggttgagataggaagtatttgttgtatttgatagttaggaggttattggtgattttattaattttagttgagtggtttagattgaagttaagttatagggtgttaaggaatgaggggagggtagttttttggaagggtggattatttttgttgagatagaaaggagagttggggtcgggcgtagtggtttatatttgtaattttagtattttgggaggttgaggtgggtagattatttgacgttaggagttcgagattagtttagttaatatggtgaaattttattttaattaaaaatataaaaattaggttgggtgcggtggtttacgtttgtaattttagtatttgggagggttgaggcgggtagattacgaggttaagagattaagattattttggttagtattaatatggtgaaattttatttttattaaaaatataaaaattagttgggtatagtggtatatgtttgtaattttagttattcgggaggttgaggtaggagtaatcgtttgaatcggggaagtagaagtagttatgagtcgagatcgcgttattgtattttagtt

SEQ ID NO: 503 - DNA, 7644 bp, Artificial Sequence
  chemically treated genomic DNA (Homo sapiens)
ttgttatatattaaatgtagtattagattaatgagggttttaataggtaatagggggtttaaataaaagatttaatgaaagaattattttgagaaatattaagaagggttaggggtggaggttcgtaatgtatttagatattagtaatagtggaagttgatagtatttttaggatggaaagatttttattttttttttaagattttttaagattttttaagaatttagggtaagatttttatttttattttaggggaggtaagagtaagaatgggtattatagaataagggttattaaataagagttgtatttgtggagaggtattgttattattagatatatggttttgaatttgggagagggtagggaagaaagatttggatttttattttgtgttttttgatgtgttgggaatttttaatgttaagtttttagaagttattttgatagggaattaatgagatattttttataggggtttgttttaggtggagtttggatttgaggaaaggggatggagaattattttcggtaagttattttttttttttaaattttagtttgtttatttttcgtttattgtttattatattattaataatataaatagttggttttataatttttatttcgaatttttttgaaaaattttaaatttataaagaatttgtaagaatagtattatgaatatatatatattttttatttagatttattaattgttaaaattttattattgttgtttaattttttttatttttttttgttaatatagatatatatttttgttgaattttttgagagtatttgttgatattttgatatttaaatttcgaatatttaagtattatttataaataaggatggttttttatataattttagtacgatgattatatttaggaaattaaatattaaggtaatgttattatgaaatataggttatatttaaattttttttagttttttagtaatttgttttgtattattttttttaattaataataatatattaaattttgttattatgtttttatttttttttttaatttagaatggttttttaggtttttttttttttaattttttgtgatgttaatatttttgaagaatttaggttagttattttgtagaatatggatttgtttgattatttttttatgtttagatttagttaaaataattttggtaataattatataaagttgttgtgttttttttagtgtattgtatttggaggtattttatgttagaatattttattatagtaatttttagttgggattatttggttaaagtagtatttgttagatttattaattattttttttttattgtaattattaagtaatttgtggggtggtatatgtgaatatatttttttttattaagatttttttatttagtattttttttataattatttgaatttttttgttatgatagaattagttttataagagtataattaaggaatttggtaagatgtttttgaaagttttaattataatttttatttttttttatgttaaattgtttttatttatttatttatttatttaataaatgtttaaagaatgttcgttttgtggtttggtttgtgatatttttattagtggttttatagttgtttaaattaatgtttttttttgtgttttagaattttattggtaattattttttatggatgttataaatttaatatatttagatgaaagttgttattttatttttttatttgttttttttgttatttattttagtaaattgtatttttgtttttttattgattttataataagaaaggtttatttattgagtggttatttgttataataggttttttatatatgttatatgtattattttatttaatttttttaataattttgagaattagatgttattatttggaggatattgggttttgagttttaggttaatagtaagtaagtttttatgttaggatataaatttagttattttgggttttaaaatttttgttttagtatagtgataaaggtattattggttttaaattttggttttgttattttttacgggtgattgggtaagttattttaatttttaatgttttgatttttttttttataaaatgggaaaaatggtaatttttgttttgtagggttgttatggatttgaaagaaataaaatttgttgggcgcggtggtttacgtttgtaattttagcgttttgggaggtcgaggcgggtagattatttgaggttaggaatttgagattagtttggttaatatggcgaaattttatttttattaaaataatataaaaaattagttgggcgtggtggtgggtgtttgtaattttagttatttgggaggttgaggtaggagaattatttgaatttaggaggtagaggttgtagtgagtcgagatcgcgttattgtattttaatttgggaaataagagtgaaattttgttttaaaaaaataaaaaagaaaagaaagaaaatttgatatttgaataatttttgtagtattatagtattttttaaattataattttggtgttatttattttaaatttttttttttatttattgattgtggattagttttatagggatttcgtttttatagttgttattattttagtttagattaggggttggtaaattatggtttataggttaaatttagattttatttattttcgtaaatgaagttttattggaatgtatatatatttatttgtttatatataatatatggttttttttattttaaaatgatagagttgagtagtggtaatagagattttatcgtttgtaaattataatatatttattattttgttttttttagaaagttttttaaattttggtgtttggcgtattttaatagttttttttttagtttttttggttatatttttttttgaatttattttttttatttttaaaattttttttaaatgtgaatttagttatattagtttgttttttatgttttattggtttttgttgttaagagtattcgtttgtattttttgtttatttttagataagttttgttttgtgattataatgaattttttatgtcgtttttaattttagtttatgttattttttttgtttgaatatttatttttttttttgtttttaataataagtttaggtttttcgttttttgagaagttttttttgatttttataggttgaattattggtttttgtttttttatataatattttaattttagtattgattttattttattatgattatgggtttagttgtttgtttttgttattgttgtgtgttttttttgagggtaggaatatttgttttttattttttaaaaaatttttgttgtttagtttggtattaggaagtgtttattaggttgttattgtttgttggcgtttgagttggggtttgaaggtttttataatgtgtagtagtgtatagaaaataggtaggttagaaaaggtttttgtgtattatattaatatggtatatgtatatatatgtaataaatttgtatgttgtgtatatgtattttaaaatttaaagtataataataataaaatttaaaaaaaaaaaagaagaggttttttggaggagatgatagttgagttaagttttggaggatgagaaggagtataaaataagataataggagaaaaaaggtagtaggaatagtatgggtaaaggtgatgaggtttgaaagaggtacgtggaaggaaagataaatgtaggaagggggaatgggagggaatgttggggtataggttaaagagggaggtatttggtgagtattttgtagagttttttttgttgtgttgaggtgtggataatgggaaattatggacggattggagtaggtaaatgttatattttttgttgtaattgtttgtttgtatgttagttttttagaagttttttaaggtattaattatgtttttgttttgttattatttaattttaagtgtatagaatttcgggtatattataggttttttataaatgtttttttttttattaaaatgtatgaaaattttttagatttaaggaaggtttttaatgttttaaattttttttgttagattattggttttgtttatagttgttataaatttaaggattttggttatatttaatttttatttttgaattttttgtttgaaaaatttgtattagaaaaaaaagtttatttttttatggacggttttaattttttgaattatttgggttggtttttttttggattttttttaattttgttttgtttttgttgagttaaggtttttaagaatatttgaattttttttttttgtaaaattagaggtagtttttttttcgtttatttttagtttattttttgtgattttagttttttttttttaattaaatgttaaatggatttaggagaaataaatttatttgtaaagttgttaagggattattagaaggatggtgttttatagatagaatatagtttttattaatgatgtttagataaattttgttattagtttaagggtttagaaagttagtagtttagtagttttggagatgttaatgaaatgaattggattggatggttaaggatgtttagaagattgaataaaattgggatttaggaggatttttgtattttaggaaattttttaagtttttatttagttatttagatttttaaagtgaatatgaagttttagttttaaattgaatatattttttatttatggattggtttgttttgtttagttgagtgtttgaggttgttttttcgacgtaatagttaaatttacggttttttttttcgtaaaattaaaataaaaaggttttttatttaagtgttttttgtgtgtgtatatgtgtaatatatatttgggattaaagttatttatataaagtttttgattttgtgtgggtttaaatatattttaaagttttaggattttgaaaggttttgttttattttttgaagatttgaatatcgtttttataaagttatggtttgttttggattttagcggtataaggtttagttgaatttggttgttaggatttggttttgtatttttttgtttttttttttttttatttttgttttttgtaaaggtgagtgagatttttggagtatgaagatggaggaggtgttttttttatttgggttttatttgttttagtagttaagggtagtgatttatagtaaagttagaagttaaaggtaaaattttaatttggtttggttggttttgtattttagggttagtagggagtagttgggcggtagtaaataaggtaaagagatagtttagaatagagcgttaggtatttagtaggggttttatgaatgtatgtgagttggtttagtagagagatataggtaattttagatttttttatgagattggaagtgatttaagagggaaaggatagttatagttttgaatatatttgagttgggttttaggatgagtttataagtttttttaaaaaaaattgatttaagtaaattttgggaagagtttttttgttatataatttaaggttttaaggttttcggatttatatattttataaatgaattagttagtttgtttaaaatgtagggaaattgtgggaagaatgttttttttatttaatttaaggttttaaggtttttttaattaattttattagttaattagttaattatttaaaaataaaagtttgaaattgttaaaaaaaaaagataaggaaaaggaaagaaagaaagttattagtttgtttggtatataatatttaattgttgtttgatttacgtgtgggttttagatgtagatttttagtttttagttttttagagattgatattaggtttgttatacggtttaaaatgatgagtatatttattgaattttaattttatttttttttagatttttttggttaagaaattatgtagtttgtatgaagtaggtatttaaaagatatttgatgatttaatttttattggagaagaaatatttatatatgtttttttatttttatatgttttaaatatgtaaagattaaataaatatttttagaagtatttaaattttttaaagtaaatttattttaattagtaataggatttttttaatattggaaagttgagtgtgatcgtatttagtggtgataagtgtgagtttgtttggggagagggtaggatatttaggattttttaagtttagagttaatataataaagattattgagtgtttatttgggtgggttataattattgtttataggagtttatgaattataagtaaaagagtgaggagatatgattagtttataaataattttaatatagagtagaaagtaatgaattattgtaatggagttattatagtgttaaggatgtttagagggtatttttgataggtagaggtgagggttagggaaggaagttgtagtttagttagttagagttgttggaatagatatgataatggttgttgttaaattgtttttttttttgaggatagatgtttcgtgtaagtggtttggtggaagggattagtgtttttaatatagggtgatttataagtaggaaagtgtgttttagaaatttagattagagtgatagattggaattggattatgggggatttattgaatgttatttattgtatttgtttttgcgattagtgttagtaaagtgttaaagggattgagtagatgagtgatattatgtaatataagttttgagttttatttgttagattgattggagaggggtttggttagttataggaaggtaatttggtatgtagttattatttttgagttgatgtaagtttttttgtatggagagttggttttttttattttgtgggaaaagagaataaaggagtatgggagtgtttaagggaaggagaaataaagggtagagaggtagcggtggtgttaggggaagtttataggagttaatagtagggttgttttaatttagagaggaagcgatttggtgttttcggttttgtggttttttttatttaataatattttttattttataataatgttagggaaggcggaggttggtatagtgtattaagatatagttatttttgggtgatagaggtttagggttagtttattaagtaggtagaagtttttgatatatattttgagagataaagtaagattttgtattttaatttttagaattttttttattatttattatagtttcggagttatatagtttttattattttattataattttagaatattagagaatatattattttatttaattattttttattatatgtgaaaaaaatgaaggatatgggggaagtgtgatttgttttaaattatatattttatggtagagttaggttttttgtttgttatattagtgttttttttgttataattattttgaagaatttattttttagtaagaaaatatttttatggagagtagttggaaaatagttgagagatggaggggaggttgggggtgtggagaggggaaggggtaagtgatagattcgttgaaggggggagaaaaggtcgtggggatgaagttagaaggtagaagggtttgtttgggtttggttatgaaggagtatgagtttattgagttttttttggtttttttatgttagt

SEQ ID NO: 504 - DNA, 7644 bp, Artificial Sequence
  chemically treated genomic DNA (Homo sapiens)
gttagtatggaaaagttaaagggaatttagtgaatttatgtttttttatggttaagtttaggtaagtttttttgttttttagttttatttttacggtttttttttttttttttaacgaatttattatttatttttttttttttttatatttttagttttttttttattttttaattgttttttagttattttttataaagatatttttttattgagaaatagattttttaagatggttgtggtaggaagaatattgatatgataaatagaagatttggttttattatgaaatatgtgatttggggtaagttatattttttttatgttttttattttttttatatatagtaagagataattagatgagatgatatgttttttggtattttaaggttatgatagaatgataggagttatatagtttcggaattataatgagtggtaggggaaattttgaaggttgaggtatagaattttgttttattttttaaagtatatgttaaaaatttttgtttatttagtgagttggttttgaatttttgttatttaggagtagttgtgttttgatgtattgtattagttttcgttttttttggtattgttgtagagtggaagatgttgttagatgaaggaagttatagagtcgagggtattaggtcgttttttttttaggttgaggtaattttgttgttaatttttgtgggttttttttgatattatcgttgtttttttgttttttattttttttttttttgaatatttttatgtttttttgttttttttttttataggataaaggagattagttttttatatagagagatttgtattaatttaaaaatagtggttgtatgttaaattatttttttgtaattaattaggtttttttttagttagtttgataagtgaaatttaaaatttgtgttgtatgatgttatttatttgtttaatttttttgatattttattaatattgatcgtaaaaataaatataataaataatatttaatgagttttttatgatttaattttaatttattattttggtttgaatttttaggatatatttttttgtttataaattattttatattagagatattagttttttttattaagttatttgtacgggatatttgtttttagaagagaaaatagtttggtagtagttattgttatgtttattttagtagttttagttagttagattatagtttttttttttaatttttatttttgtttattagagatgttttttgagtatttttagtattgtgataattttattgtagtagtttattattttttgttttgtattaaagttatttgtgagttaattatatttttttatttttttatttgtggtttatgaatttttgtgagtagtgattatagtttatttaagtgagtatttaataatttttattgtattgattttaagtttaagaaattttaaatgttttgttttttttttaagtaagtttatatttattattattaaatgcggttatatttaattttttagtattgggagggttttgttattggttgagataaatttattttaggaaatttaaatatttttaagagtgtttatttaatttttatatatttaaaatatgtaaaaataagaaaatatatatgaatattttttttttagtaaaaattaaattattaaatattttttgagtatttattttatataaattatatggttttttagttaagaaggtttagagagagataaggttgagatttaatggatatatttattattttaagtcgtgtaataaatttggtgttagtttttgaagagttgaaaattgaggatttgtatttgaaatttatacgtaggttaggtaataattaagtattgtatgttaaatagattggtggttttttttttttttttttttttgttttttttttttggtaattttaaatttttatttttaaataattggttaattagttagtagaattgattaagagaattttaaaattttgaattaagtaaagaaggtattttttttataatttttttatattttaaataagttggttaatttatttataaagtatatgaattcgaggattttaaaattttgaattgtatagtaaaaaaattttttttaggatttgtttaagttaattttttttaaaggaatttgtgagtttattttgaaatttagtttaaatgtatttaggattatggttatttttttttttttaaattatttttagttttatagaagggtttgaaattgtttgtgtttttttattaaattaatttatatgtatttatgaagtttttattaaatatttggcgttttgttttgagttatttttttgttttatttgttgtcgtttaattgttttttgttggttttggaatatagagttagttaagttagattggagttttatttttaatttttggttttgttataaattattgtttttgattgttgaaataaatgaaatttaggtaggagaaatattttttttatttttatgttttaaaagttttatttatttttgtagaagatagggatgaagagaagaaaaaataggagagtgtagggttaggttttggtagttaggtttagttgagttttgtgtcgttgaaatttaaggtaagttatggttttatgggagcggtgtttaggtttttaggaagtagagtaaaattttttaggattttgaagttttgaaatgtgtttgaatttatatagaattaaggattttatatagatagttttgattttagatatgtattatatatgtgtatatatagaaggtatttgaatagaaagtttttttgttttggttttacgagaaaggaagtcgtgggtttagttgttacgtcgaaaagataattttaagtatttaattgaataaaataagttaatttatggatggaaaatgtatttaatttgaaattgaagttttatgtttattttgaggatttggataattaagtggagatttggagaattttttggagtataagggtttttttaaattttaattttatttaattttttgggtatttttaattatttagtttaatttattttattgatatttttaaaattattaggttgttaattttttgagtttttgggttaatggtaggatttgtttaggtattattaataaaaattgtattttatttgtgaagtattatttttttaatggttttttgatagttttataaataagtttattttttttaaatttatttagtatttggttaagagaaaaaaattaaaattataagaaataaattgaaaataggcggaaaagaagttgtttttggttttgtagaaggaaagaatttaggtgtttttaaaagttttaatttaatagagataaaatagagttgaagaaggtttaaagaaaagttaatttaaatgatttaagagattagagtcgtttataaaaggatagatttttttttttaatataaattttttaagtagaaaatttaaaagtgaagattaaatataattagagtttttaaatttgtgatagttgtagataggattaatgatttaataaaaagaatttgaaatattgaggattttttttaaatttggagagtttttatatattttaataaagaaagaaatatttatggggaatttgtaatatgttcggaattttgtgtatttaggattgaatgatgataaaataaaaatatagttgatattttaaggggtttttagaaggttgatatgtaaatagatagttgtaatagggaatatgatatttgtttattttagttcgtttatggttttttattgtttatattttagtatagtagaggagattttgtagaatatttattaaatgtttttttttttggtttgtattttagtatttttttttattttttttttttgtatttgtttttttttttacgtgttttttttaggttttattatttttatttatgttgtttttattgtttttttttttttattattttattttatatttttttttattttttaggatttagtttagttgttattttttttaggaagtttttttttttttttttttaaattttattattattatattttaagttttagggtatatgtgtataatatgtagatttgttatatatgtatatatgtgttatgttggtgtgatgtatagaagttttttttgatttgtttgttttttatatattgttatatattatagaaatttttaagttttagtttaagcgttaataagtaataataatttaatgggtattttttaatgttagattgggtaatagaggttttttaaaaagtgaaaaataaatgtttttgtttttaagaggaatatatagtagtggtagggatagatagttaaatttatgattatgatagagtgagattaatgttggaattgaagtattatgtagaggagtagaagttagtggtttagtttgtggaagttagaaagggttttttagaagacgaaaagtttgaatttattattgagaatagagaaaagggtggatatttagataagaagaataatatgggttaaagttggaaacggtatgaagagtttattatggttataggataaagtttgtttggggatgagtagaaggtgtaagcggatgtttttagtagtaagggttaatgaaatataaggagtaaattggtatgattgagtttatatttgggggaaattttagggatggggaggatgggtttagggagaaatgtaattaggaagattgggaagaagattattggaatacgttaggtattaggatttggaaagttttttgaagggggtaaaatagtaaatatgttatgatttgtaaacggtggggtttttgttgttattatttaattttgttattttagaatgaaagaagttatatattatatgtaaataaatgggtgtgtgtgtattttaataaaattttatttacgaaaataggtgaagtttggatttggtttgtgggttatggtttgttaatttttggtttaaattaaggtaatgatagttgtgaagacgaggtttttatgggattagtttataattagtgagtggaaggagaagtttagaatgaatgatattagaattatggtttgagaagtattgtggtgttgtagaaattatttaaatgttaagttttttttttttttttttttatttttttgagatagagttttatttttgttttttaggttggagtgtagtggcgcgatttcggtttattgtaatttttgttttttgggtttaagtgatttttttgttttagttttttaagtagttgggattgtaggtatttattattacgtttagttaattttttgtattattttagtagagatggggtttcgttatgttgattaggttagttttaaatttttgattttaggtgatttattcgtttcggttttttaaagcgttgggattataggcgtgagttatcgcgtttagtaagttttgttttttttaagtttataataattttataagataagagttattattttttttattttataaagaaggaaattaaggtattgaaagttaaggtgatttatttaattattcgtaggaagtggtagagttaggatttgaagttagtgatatttttattattatgttaaagtaaagattttgaagtttaagataattggatttgtattttagtatggggatttgtttattgttgatttggggtttaaagtttaatgttttttagataatggtatttaatttttaagattattgaaaagattaaatgagataatgtatgtaatatgtataaaaggtttattgtaatagatagttatttaataaataggttttttttattatagggttaatgagaagatagaggtgtaatttattggaataaataataggaagagtaggtgagaaagtgaaatgatagtttttatttgagtatgttgagtttatggtatttatggaaaatagttgttaataggattttggagtataggaagagatattagtttaggtaattatgaagttattgatgaaaatgttataggttaagttataaaacgagtattttttaaatatttgttaaataggtaggtaaatgaatgaagatagtttaatataagaagagatgagggttgtaattagaatttttaaagatattttattagattttttaattatgtttttatgaaattaattttgttatagtaagaaaatttaaatggttgtaaaaaaaatgttgggtaaaagaattttggtgagaaaagatatatttatatatattattttatagattatttgataattataatagggaaaagataattgataaatttagtagatattgttttaattaagtgattttaattgaagattattgtgatggagtgttttgatatagggtatttttagatataatatattgagaaggatataataattttgtgtagttattgttaaaattgttttaattgaatttaagtatgaagaaataattagataaatttatattttgtaaaataattggtttagattttttaaaaatgttaatattataaaagattaaaaagggaaaagtttggaaaattattttagattaaaggagaaaatagagatatgatgatagaatttaatgtgttattattgattgaaaaaaataatataaagtagattattgagaaattgggggaaatttgagtatagtttatattttataatagtattgttttaatgtttaattttttgaatgtgattatcgtattggggttatgtagagaattatttttgtttatagataatatttaggtattcgaggtttaagtgttagaatgttagtaagtatttttagaaggtttagtaaaaatatgtgtttgtgttagtagagaaagataaaaagaattaaatagtagtgatggaattttaataattggtgaatttaggtgaagaatatgtgtgtatttatggtattatttttataaattttttgtaaatttgaggttttttaaaaaaattcgaagtaaaaattataaggttaattatttatattattgataatatggtaggtaataaacgagggatgagtaaattgaaatttagagaggaaaagtgatttgtcgaaggtgattttttattttttttttttagatttaagttttatttgggatagatttttgtagaaaatgttttattagttttttgttagggtggtttttgagggtttagtattggaagtttttagtatattagaaagtataaggtggaagtttaggttttttttttttgtttttttttaggtttagggttatgtgtttggtagtaatagtatttttttataagtatagtttttgtttggtggtttttgttttatgatgtttatttttatttttattttttttagggtaagagtaagaattttattttagatttttaaagaattttaaagaattttaaaaaaagagtaagaatttttttattttaggggtgttattagtttttattgttgttagtgtttgggtgtattacgaatttttatttttaattttttttaatattttttaaagtagtttttttattgaattttttatttgaattttttgttgtttgttgagatttttattgatttagtgttatatttggtatgtggtaa

SEQ ID NO: 505 - DNA, 5386 bp, Artificial Sequence
  chemically treated genomic DNA (Homo sapiens)
tttaaatttttggttttagggatttatttatttcggttttttaaagtgttgggattataggtgtgagttatcgtatttagttttgattattatatattaaattgataatgtgttggatatattgggttaaataaaatatgtaattaaaattaattttatttgtttattttaatagggttgttagaaaattgaaaaggttacgtttggttttatttgtaggttatatttttttttttttgagacggaattttattgttattaggttggagtgtagtggtgtgattttagtttattgtatcgtttgttttttaggtttatgcgagttttttgttttagttttttaagtatttgggattataggtgtgcgttattatattcggttaatttttgtatttttagtagagacggggttttattatgttggttaggatggtttcgattttttgatttcgtgattcgttcgtttcggttttttaaagtgttggtattataggcgtgagttatcgcgtttggtttgtaggttatatttttattggatagagttagtttaaagagtttttttagttgggcgtagcggtttacgtttataatcgtagttattgggaaggttgaagtaggagattatttgattttagaattttgagattagtttgagattagttttagtaatatagtaagattttatatggttatggggtggtgtgttattttaggatagagttgttgttttaaatggttttagggtgagtgggtgcgtgagttgtgtggggggagatacgggaagaagtaagtaggttggatgtggtaaagataaggaggtagtgtttagtagttagaaatagttttaggggcgggtgtgattggggagtagtttttggatagatttttagtgtaataggaatagatattgtttttattttttggtttagaatattagttggtttatatttacgtcgaattttcgcgttttagatttgtatatagtatttagaagtttattaaattttattttttaggtttttttttatagcggaggaaattgatgtttaaagaggaaaaataaatataaattgtgaaagggttatagaattgttttcgaaaattttgtattttaaatgggtaaatattaaaaattgattgtttgtatagttgttaagtttgattttggtatagttaatatttatgagtgaaaagtatgaatttgaggaaagaatatagttagtagatattattttttttttttttttttttttttggagatagagttttattttgttgtttaggttggagtgtagtggtatgatttgggtttattgtaatttttgtttttcgagtttaagtaatttttttgttttagttttttaagtagttgggattataagtacgtattattacgttcggttaatttttgttattttgtagtagagatagggttttattatgttggttaggttggtttcgaatttttgattttaagtgatttatttattttcgttttttaaagtgttgggattataggtaagagttatcgcgttcggttatagatatgattatagattattggtttttattcggggtggttttgttatttagggaatatttggtaatatggagatatttttggttgttatatttggggaagaggggtaagcgtggttggtatttagtgggttagagatgttgttaaatattttataatatgtaggatattttttatataataaaaattatgtagtttaaaatgttagtagtattaaggttgagaaattttgttatatagattaatttatagtagtgttgtttgttttagagtacgatttatatgtggtgtgggggggttaatgattggttttcgttaagtattttattaaataggtgtgatatattgggtgagtttgtaagtatagaatagtttgttgaaagttggggagggagggtagaaaagtttttaagaagtggtcgtgttgtcgtttttattgggaagtgaggagtttttttgttcggttattatttcgtttgggtagtgtatttaatagtttattgagaatgggttatgatgataatggcggttttgtggaatagaaaagggggaaaggtggggaaaagattgagaaatcggatggttgttgtgtttgtgtagaaagaagtagatatgggagattttttattttgtttcgtattaagaaaaatttttttgttttgggattttgttgatttgtgattttatttttaattttgtgttttttgaaatatgtgttgtgtttatttagggttaaatggattaagggcggtgtaagatgtgttttgttaaatagatgtttgaaggtagtatgttcgttaagagttattattattttttaattttaagtatttagggatataaatattgcggaaggtcgtagggttttttgtttaggaaaattagagatttttgtttatttgtttatttgttgattttttttttattattgttttatgattttgttaaatttttttttgcgagaaatatttaagagtgattaattaaaaaaaaaaaaaaagtggttatgttgggtgcggtggtttatatttgtaattttagtattttgggaaatcgaggtaggtagattagttgaggttaggagtttgagattagttttgttaatatggtgaaattttatttttattaaaaatataaaaaaattttttaagtatggtggcgtatatttgtaattttagttattcgggaaattgaggtacgaaaattatttgaattcgggaggtagaggttttagtgagtagagattgtattattgtattttagtttgggtgatagagcgagattttgttttaaaaaaaaaaaaaaaaaaaaagaagtgttttattttaggagaaattggtattttttgagtttatttttttttaatgttagtttttttgtttattttattagggttagagttaattttgtttttaatttatagttttttaagtaagaatttttttaatatgttttaatgttttaattaaattaattttgaaagtttttatgtagatataaagtgtttttgaaatttttatttttagaaatgtttttgagttaaatgggttttgaattttaaataatcgtgtttatgtatgtggtaagagtttgtgaaaaataaagttgggttaggcgtagtgatttataattgtaattttagtattttgggaggttgaagtgggtagattatttgaggttaggagtttaagattagtttggcgaatatggcgaaattttgtttttattaaaaatataaaaagtagtcgggcgcggtggtttatatttgtagttttagttattcgggaggttgaagtaggagaattatttgaatttagttggcggaggttgtagtgagtttagattacgttattgtattttagtttgggtaatagagcgagatttggtaagaaagagaaagaaaggaaagaatgaaggaaggaagaaaggaaggaaggaaggaaggaaggaaggaaggaaggaaggaaggaaggaaggaaggaagggaaggaagggaaggagtttcgttttgttatttaggttggagtgtaacggagcgatttcgatttattgtaagtttcgtttttcgggttcgcgttatttttttgttttagtttttcgagtagttgggattataggcgttcgttattacgtttcgttaattttttgtatttttagtatagacggggttttatcgtgttagttaggatggtttcgattttttgatttcgtgattcgttcgtttcggttttttaaagcgttgggattataggcgtgagttatcgcgttcggttgattaaaggttttttggttcgtattttgtttttgtggaatgagttaggagttagttaggtttgatttgatatttgattttcggaggaaaatttagattttgttttgggtaataaattgaattttgaatttgaggttatagggtaggtgtgaggagcggagagtagtaagagtgaaagggaggtttgtggttattttatatatataagagattagtttttttaaggttaggggatagagagtatagggatttagcgttaagcgtaaggtttttagaagaagttagagagtcggggagggggcgggggggaatcggttcgattaggtgggaaggattttgggattagatttaagggattatgagtatagttgttgtaggtagacgggtttttggagaagttggggataagttggaatagagattttattgcgggaagggttgttagggaggttttttggggtggaaaagggtggttaggaggtttttggaggcggcgcggtttcgggggtttaatttatttggggttcggttatcgcgttttcgatcgtcgtttttgttcgcgtagtacgggtatagttcgttagtattgcgaattcggatgggtcgtcgggcgcggtttttagtagagttgtttttatagatgtggtgtttaggttaatgtcgagggtgatcggtcgcgtagttattatttttttgattcgcgtagttttagtttgtagttagcggttttataagttcgcgtttttcgtttaggggggcggggtaggggcggggagtcgtttgttaattttttagttatatttaatatggaggtttttcgtttttttattggtcggggaaggcgagtttttacgtaatttttcggcgggtttcggttataggcggagaggcggcggaaggcgggatttaaagggggtttcgttttacgggttttgattttcgtttaatggagggcggtttgagtttcgtttacgaaaggagtcgggaggcgttggcggttttaagagtttttgtgtttttggtagcggattttatttttttttacgtcggagtttcgatttttgcgtttcggttcgatttagttgcgttttgttcgtttaagacgcgcggaaattataatttttagagtttatttcgtcgagattcggttttacgagttaggtggcggaggttaggtgatagcggattcgttttttttaaagtttagtcgggtaggggaacgcggtgtatttttgatcggtatttggcgaggtttatgcgtttcgtgagggcggtttttcgagtttgggggcgtttaggtgagagcggacgcggttttttttgttttttaggcggattttttgaggtatagtaggttagcggggtagtttgtcgggggtttagcgtttttagtcgcggcgggttttttttttcgttattagtgttggtttcgcgatacgggataattttcgggtggaagggttcgagcggtggttagtcgaggtaggggtagcgggttgtcggggtgggtgtcgtttttagttttttattttttgtttagttgtcgtttgggtttcggttggggaatttgtaga

SEQ ID NO: 506 - DNA, 5386 bp, Artificial Sequence
  chemically treated genomic DNA (Homo sapiens)
tttgtaaattttttaatcgagatttaggcggtaattgagtagaaggtaaggggttgggaacggtatttatttcggtagttcgttgtttttgtttcggttgattatcgttcgggtttttttattcgggggttgtttcgtgtcgcgaggttagtattggtggcggggaaaggagttcgtcgcggttgagggcgttggattttcggtaggttgtttcgttgatttgttgtgttttaaggggttcgtttgggaaataggggaggtcgcgttcgtttttatttgagcgtttttaggttcgaggaatcgtttttacgggacgtatgagtttcgttaggtgtcggttaggaatgtatcgcgtttttttgttcggttagattttgggagaggcgggttcgttgttatttgattttcgttatttgattcgtggggtcggatttcggcgagatgagttttgggagttgtagttttcgcgcgttttagacggatagagcgtagttgggtcgggtcggggcgtagagatcggggtttcggcgtgagggaagatgaggttcgttgttagggatatagagatttttggagtcgttagcgtttttcggtttttttcgtgagcgaagtttagatcgttttttattgggcggaaattagagttcgtggggcggggttttttttaggtttcgtttttcgtcgttttttcgtttatagtcggggttcgtcgagaggttgcgtggaagttcgtttttttcggttagtgggaagacgagaagtttttatgttgggtgtggttgaaagattggtaggcgatttttcgtttttgtttcgtttttttgggcgaagagcgcggatttgtggggtcgttggttgtagattggagttgcgcgggttagggagataatggttgcgcggtcgattattttcggtattgatttgggtattatatttgtgaaggtagttttgttgagggtcgcgttcgacgatttattcgggttcgtagtgttggcgagttgtgttcgtgttgcgcgggtagaggcggcggtcgagagcgcggtggtcgggttttaggtgagttggattttcggggtcgcgtcgtttttaggagttttttgattatttttttttattttaggaggtttttttgatagtttttttcgtaatgaagtttttattttagtttgtttttagtttttttaggggttcgtttgtttgtagtagttgtgtttatgattttttaggtttggttttagaattttttttatttggtcggatcgattttttttcgtttttttttcgattttttggttttttttgggggttttgcgtttggcgttggatttttgtgttttttgttttttgattttggaggaattgattttttgtgtgtatggaatgattataggttttttttttatttttgttgtttttcgttttttatatttgttttgtgattttaagtttaggatttagtttgttgtttagggtagagtttgggttttttttcggaaattagatgttaaattaggtttaattggtttttggtttattttatagaagtagaatgcggattaagaaatttttggttagtcgggcgcggtggtttacgtttgtaattttagcgttttgggaggtcgaggcgggcggattacgaggttaggagatcgagattattttggttaatacggtgaaatttcgtttgtattaaaaatataaaaaattagcggggcgtggtggcgggcgtttgtagttttagttattcgggaggttgaggtaggagaatggcgcgaattcgggaggcggagtttgtagtgagtcgagatcgtttcgttgtattttagtttgggtgatagagcgagatttttttttttttttttttttttttttttttttttttttttttttttttttttttttttttttttttttttttttttttttttttttttattttttttttttttttttttttttattaagtttcgttttgttgtttaggttggagtatagtggcgtgatttgggtttattgtaattttcgttaattggatttaagtgatttttttgttttagtttttcgagtagttgggattataggtgtgagttatcgcgttcggttattttttgtatttttagtagagatagggtttcgttatgttcgttagattggttttgaatttttgattttaagtgatttgtttattttagttttttaaagtgttaggattatagttgtgagttattgcgtttggtttagttttgttttttataagtttttgttatatatatggatacggttgtttagggtttagagtttatttggtttagaagtatttttgaggatagggattttaggagtattttgtatttatatagaagtttttaagattagtttggttgggatattagggtatattaaaaggatttttatttaaaggattatgaattggaggtaaagttggttttgattttggtggggtgagtaggagagttggtattaggggagagtaggtttagaaagtgttagttttttttgaaatagagtatttttttttttttttttttttttttgagatagggtttcgttttgttatttaggttggagtgtagtggtgtaatttttgtttattgaaatttttgtttttcgggtttaagtgattttcgtgttttagtttttcgagtagttgggattataggtgtgcgttattatgtttggagaatttttttgtatttttggtagagatggggttttattatgttggtaaggttggttttaaatttttgattttaattgatttgtttgtttcggttttttaaagtgttgggattataggtgtgagttatcgtatttagtatggttattttttttttttttttaattgattatttttgggtgtttttcgtagagggggatttggtagggttataggataatagtggagggaaggttagtagataaataagtgaataaaggtttttggtttttttaggtagaggattttgcggtttttcgtagtgtttgtgtttttgggtatttgagattagggagtggtgatgatttttaacgggtatgttgtttttaagtatttgtttaataaagtatattttgtatcgtttttaatttatttaattttgagtggatatagtatatgttttagagagtatagggttgggggtaaggttatagattaataggattttaaggtagaagaattttttttagtacggaataaaatgaaaagttttttatgtttatttttttttatatagatatagtaattattcgattttttaattttttttttattttttttttttttttattttataaaatcgttattgttattatggtttatttttaatgagttgttgggtatattatttagacggggtggtggtcgggtagaggggttttttattttttagtaggggcggtagtacggttattttttgaaaatttttttgttttttttttttagtttttagtaggttgttttgtgtttataggtttatttagtgtgttatatttatttaatgaagtgtttagcggaggttagttattaatttttttatattatatatgaatcgtgttttgggataaatagtattgttgtgagttagtttatatagtagggttttttaattttggtgttgttgatattttgggttgtatagtttttgttgtgtgaggggtgttttgtatgttgtagaatgtttagtaatatttttggtttattagatgttagttacgtttgttttttttttttagatgtgataattaaaaatgtttttatgttgttaaatgttttttaggtgataagattatttcgagtaggaattagtgatttatagttatatttgtggtcgggcgcggtggtttttgtttgtaattttagtattttgggaggcggaggtgggtggattatttgaggttaggagttcgagattagtttggttaatatggtgaaattttgtttttattataaaataataaaaattagtcgggcgtggtgatgcgtgtttgtaattttagttatttgggaggttgaggtaggagaattgtttgaattcgggaggtagaggttgtagtgagtttagattatattattgtattttagtttgggtaatagagtaagattttgtttttaaaaaaaaaaaaaaaaaaaaaaagtaatatttgttggttgtgttttttttttaagtttatattttttatttataagtattagttatattagggttaagtttggtagttgtgtagataattagtttttggtatttgtttatttaaaatataaggttttcgagggtagttttgtgatttttttatagtttatatttattttttttttttgggtattagtttttttcgttgtaaaaagaggtttgaggagtaggatttaatgagtttttaagtattgtgtgtaagtttaaagcgcgaggattcgacgtggatgtagattaattgatattttgagttaaggagtgggggtaatgtttatttttgttatattgggggtttgtttaagagttattttttaattatattcgtttttaaaattgtttttaattgttgaatattgtttttttgtttttattatatttagtttgtttattttttttcgtgtttttttttatataatttacgtatttatttattttgggattatttgaaatagtagttttgttttgggatgatatattattttatggttatgtggagttttattgtgttgttgaggttggttttaggttggttttaaagttttgggattaagtgattttttgttttaatttttttagtggttgcgattataggcgtgagtcgttgcgtttagttgggaggattttttaaattagttttgtttagtagaaatatgatttgtaggttaggcgcggtggtttacgtttgtaatgttagtattttgggaggtcgaggcgggcgaattacgaggttaagagatcgagattattttggttaatatggtgaaatttcgtttttattaaaaatataaaaattagtcgggtgtggtggcgtatatttatagttttaggtatttgggaggttgaggtaggagattcgtatgaatttgggaggtagacgatgtagtgagttgagattatattattgtattttaatttggtgatagtgagatttcgttttaaaaaaaaagaaatgtaatttataaatggagttaggcgtggtttttttaattttttagtagttttattaaaataaataagtgaaattaattttaattgtatattttatttaatttagtgtatttagtatattattagtttgatgtgtgataattaaggttgggtgcggtggtttatatttgtaattttagtattttgggaggtcgaggtgggtgaatttttgaggttaggagtttgag

SEQ ID NO: 507 - DNA, 8605 bp, Artificial Sequence
  chemically treated genomic DNA (Homo sapiens)
aatttgagtttaatttggataatatggtaagatttagtatttgtaaaaataaaataaaaaataatagttaggtatggttgtatgcgtttgtgattttaggtagtttagaggttgaggtgggaggattgtttgagttcgggaggtgaaggttgtcgtgagttaagattttgttattgtattttagtttgggtgatagagcgagattttgttttaaattttttttttaattaaataaatgaaaaataaaaataaataaaattataagggtaattgaaattttaagtgagataatatatttgttttttatggaagaggataagtgagtaaattttgtttttttgtggtggggaggttatagttagaattgaaggggttttattagaaatagaaatggtgggaagtggtggtttttggaggtaaagttttgggggttgtggatatttgttgagattttggttgtagatatggtttttttttcgagggagtttatgtgaaagtcgaggtttttatcggtattagaggagtagttattttttttgttcgtagttaaataagtgttttcgtagtaggataagttataaaggagatattgtaggagaataaagaggaatttttttggaagttaatagaaaaaaaaaaaaaataatgtggttagtttttataaggttagaattagaaatttagttttttgaagttaaggtattgtaatttttttttttttgatgatagttatattatagaaagggagttgtcgggaggaagaagaaggagtttagaggtacggtttatatttttttgttggaaggaggggtaaagggtacgaaagttttttgagaagagaggaaggagaaatagaaatgaataagatagtattttatattaattaatttagagtttagataggaatggagatatatttttgaaaatattggaaataattatagttaaataagaaatttagtttattttaatattgaatagttgggtattgtagcgtatttaaggataatttttaaaaattaaaaagttaaattaggttgggcgaggtggtttatatttgtaattttagtattttgagaggcggagatagtaggattatttgagtttaagagtttgagattagtttgggtaatatgggaaaatatcgtttttataaaaaatataaaattaggttgggttttgtggtttacgtttgtaattttagtattttggggggtcgaggtaggtggattacgaggttaggagttcgagattagtttggttaatatggtgaaattttgtttttattaaaaatataaaaattaggggagtgtggtggcgggtgtttgtaattttagttatttaggaggttgaggtagaattgtttgaattcgggaggcggaggttgtagtgaggcgatatcgtattattgtattttagtttgggcgatagagcgagattttgtttcggtaaaaaaaaaaaaatttatattagtttttagagaaattttatattttttagttgttatttatttaattttttatgtggattttacggaattatataatattgagttttttggatttggttgattttatttagtaaacgtttttaaggtttatcgatgttgtagtatgtgttattattttatttttttttacgattgaataaaattttatttggtggatttatgatagtttgtttattcgtgtaatggtttttaatggatggatatttgagttgtttttattttttggttattgtaaataatgttgttataaatatttggtgtaagtttatatatacgttattaatttttgttttagagttggggttttattatgttttttaggttggttttgaatttttaggtttaagtaatttatttatttttgttttttaaagtgttgggattataggcgtgagtttattgtgttcggcggatttttgtgaggacgtatgtttttattttttttaggtgttaatttaggttttttttacggatgtttaataagtaaatagtttttatatacgtgagttaaggtttttttgtaagttttgagagttgttttttaggttttgaattttgatttttaaatttagtaggttaagttaaaattttttttaattttaaggtttattttatttattatgtatttatttaatttatatttttttattttttgttatgggttagatattttgtaatgagttgggatgaagtaggggaatatcgtaggtaaaaatgtttgtttgggtggggtttaagatttagtgagggtaggaaggaatatatataagtaaatatgttgtatgtttttttttttatgaagtttttttggatgttttaggaagggacgaattttattttggtagtaatatatttttttttttgttttttgaggagttttgtttatgttggagtgtaatggcgtgatttcggtttattataatttttgattttttggtttaagggatttttttgttttagcgttcgagtagttgggattataggttcgtaacgttatatttagttaatttttgtatttttagtagagacggggttttattatgttggttaggttggttttgaatttttaacgtcgtgattcgtttgttttggttttttaaagtgttgggattataggcgtgagttattgcgtttggtttattttttttttttttttttttttttttgagatggaattttgttcgggttggagtgtaatggcgtgattttggtttatcgtaatttttatttttcgggtttaagcgatttttttgttttagttttttaagtagttgggattataggcgcgtgaattattacgtttagttaatttttgtatttttagtagagattgggttttattatttgggttaggttggtttggaattttcgattttaggtgatttgtttgttttagttttttaaagtgttaggattatagtggtgaattatcgcgtttagtttgttttttttgttttaaaagtgatttttattttttaaaagtgatttttataatgatattgatggaaaattttattaaatagttataacgtatgttaagtattttgttttgtatattttttgttatattttaaggatgagagaggggagagttattttggttttggttgtgttttttttattttggttattttatgagttttttatagaggtttgaaatgatttggagtttagagtttatggttgttaggatatgattagggtgagtaggtagttgggattattttgatttttagttttttggtttttagtttttcgggtattttattttgttgggggtttagtgattatgtttgggttttagagattattttttttttttatttttatttttagtttgttattaattaggcgggagtataggtatgtttttgaagataggtttagggttgtgtgatagttgacgattaggttgtagggaattaggttttatgtagttttattgttttttttttttttttttttttttttttttttgaggcggagtttcgtttttcgtttaggttggagtgtagtggtacgattttagtttacgggtttacgttatttttttgttttcgtttttcgagtagttgggattataggcgttcgttattacgttcggttaattttttgtatttttattagagacggggttttatcgtgttagttaggataattttgattttttgatttcgtgattcgttcgtttcggttttttaaagtgttgggattataggcgtgagttattgtattcggttattgtttttttattgtcgttatagtttggataaaatacgatttttttgagttttttttttttttttaatatagagttttatttttgttgtttaggttggagtgtaatagtgcgatttttggttatcgtaattttcgtttttcgggtttaagcgatttttttgttttagtttttcgagtagttgggattattgatacgcgttattacgttcggttagttttgtatttttagtagagacggggtttttttatgttggttaggatggtttcgaattttcgattttaggtgatttatcggtttcggttttttaaaatgttgggattataggcgtgagttatcgaatttagtttttttgagttttttgaatataattggggttatgtttgttttgtaggtttgttttaaggattaaagttgtttggggagtgtttggaggagggtgagttttgagttaatttttgtattttttttttagggtttttcggtaataaattttaagtaaatgtgtattttgttcgttttttcggagtaggttttcgggtatttttgtgttaaatcgattttcgtttttaaggtttttttttttttagaaattttgacgtagtttttaggttttttcgtagtgatagttatttttttttatttgtacgtagttgtagtgttttgtgggtacgttttttgaataataaagtggtttttttaaaggttgttttgtggggtttatagtttcgttatttttagtttttgtagcggtttttgaatgaatgaaataagcgacggcgttttttttattattttattttcgttaattcggtaggtagggattttaggcgcgggttttggcggaggcggtttcgcgaggcggggggatttttttaggcggggtgggggttttgggattatttttaggggttttttttttattttttggttttaattcgtagcgtttcgttatttagggttcgtagggttttaagttttttttttttagttcgcgcgtttaggttttcgttcgttttcggcggtggtttcggatttcgagcggaagggggcggggggtgtgcggggtcgggaagcggggagcgcgggcggcggaaggtggcgggagggggtgggggttgggaagtatcgtgcgcgggcggcgggagggttcgggcggggttgcgcggtggttacgtggggcggggtcgggagggtatttagggtcggggttggtttaggttacggcggttgtagggtttcggtaatcgtttcggtaacgttaatcgtttcgttgcgcgtaggttgggttgtaggttttcggttgtagcgttgggtgagtgttggggattcggggttatcgtagcgtaagtgattttggcggggacggtgttattcggtcgtcgagacgggtttttttgcgtttttagtcgggtttaggcgcggtttcgcggcgtatttgggggtcggcggggagtcgggattttcgggattgtttttgacgggcgggttggggtgggagttcgcgcgtttcgaagcgtcggcgagaaaagtagaaaataatttcgttcgttagttttttgtttttcgttttttttttcgggttgtgcgtcggatttcggttttcggagcggggacgcggttaggatcgtcgagggaggcgtttgcgaggaagagttcggtcgggttcggagattgttgtttgggatcgcgtttttagcgtttgggtttcggtgttttcgggttaaattgtcgatataatcgtatttgtcggtatttattttcggtttattttttttttattgcgaaggatttgtttggttaattttttgcgtaagattttacgtaatttttgggattttagaagataggttttgttgaagaataggaatttggtattgggtgggttggggaggaagtcgtacggtgttaaatttataaataggaagagaaattagatagcgaaattaagaggcgaatgggcgattggatgtcggtggggagaaggtcgggggcgtattttgtttttggattttagtaaagggaggtcgggtagagtttttggggcgttatttttttttcggttagtagttttggaggtcggggggagttggtttttggggagtagtgggtgttgggtgtggggcgttgtaggtaggttggggtgggcgatttaggtggaagtgaattgtatttggttttttggtgggtttttgttattttttttttaggcgttgagaaagttagtaggttggtaaagaaaaggattttagcgtaggttttatatttttttttttaacggacgagagattttttaaatttattggagaagtgacgttgtggggtttaaatgtagatttggtatttttttgtagtttggaaaaatatttttattgtttgttgtcggaggagaggatagttgagatgtattttttttgaatttaaacgtttaggaacgtaaggcgaagaggtttaagagggcgttggttggttttgttttttaggttggagtatagtggcgcgatttcggtttattataattttcgttttttaaatttaagttatttttttgttttagtttttcgagtagttgggattataggtgttcgttattacgtttagttaatttttgtatttttagtagagatggggttttattatgttgattaggtagattttgattttttgattttaggtgattcgtttgtttcggtttttcggtgagttacggtgtttggttaagaattgttttttgttggttttggtgttggtgatttagaattcgttagtttttggagaaaggggttgggtcgtttattttgtgtagtttttttaaagatagagttaaacgttttttggagaatagaggttttttttcgtttttggttatttgttttttagttgggggtattttttggtggaaaggtataggttttttgttttttaggtggtaacgtaggttagatacggttttggtatagtttttttgggtgttggtttaggatagttttgtttttaattggttaggcggtgaggggtggtggttttttggttttaggttgaaattgtttatgtggtgttgatttagtagattggggaggttttttttgtaggtaggtttttttttttttttagttgttggatttgggagttggaagagaagttgtatttattttaggggtaatagatattttttgttgtttttggttggattgggaagtgaattgaagggaggttacgttttaggggtgttttgggatgtttgttagtgattttttttttttttttaattttttttttttttttttttttttttttttgagatatattttttttatcgtttaggttggagtgtagtggtgcgatttcggtttattgttattttcgttttttatgttgaagtaatttttttgttttagtttgttttttaagtagttgggattgttagtgtttattattatatttggtttttttttttttttttgtatttttagtagagacgggtttttattatgttagttaggttggttttcgaatttttgattttaagtgattcgttttagttttttaaagtggtaggattataggtatgagttatcgcgcggtggaggggtaatttttttaaatttggtaatgagttgtggttgtgtagagtaatatatcgttttttcgagatatggattgaaatattgagagggaggagttataggtatgtcgatttttttttttttttttttttttttttttttgaggtggagtttgatttttttatttaggttggagtgtagtggtaagattttagtttattgtaattttcgttttttgtgtttaagttatttttttgttttagttttttaattagttgcgattataggtatgtgtttttatatttagttaatttttttatttttagtagagattttttgttttttttaaaaaaatttaatgtaaaaaaattttaatgtgggggttttgttacgttggttaggttggtttcgaatttttgatttcgtgattcgtttatttcggttttttaaagcgttgggattataggtatgagttattgcgtttagtttgttgtttttttttaatggtttggtttaaggaaattattggaaatatgtgcggttgagtgatatttattgggtatttttatatggtttatgtaaagggagatggttggggtgataggtagttgagtttaggggaggtatgtatagatgtgttgtgtttttgggatattagggtggtaggtagtagtttttacgtttggttttaggttgtttgagaaagagtatgtgggaggtaaattttgcgttttggtatggttgttaatgtttatatttattttagtttgtgtggggtaggaggtttagggattaaattttattttgtgtttagatatttttttttttttttttttttttgagatagagttttattttgttatttaggttggaatgtcgtggtataattttagtttattgtaattttattttttaggtttaagtaatgtttttgttttagttttcggagtagttgggattagaggtatgtattattatgtttggttaatttttgtatttttagtagagattttaaatgatttgttcgtttcgttttttaaagtgttgggattataggtgtgagttattgtgtttagttatgtgtttagatttttaattaattttttttttagttttaagttttatcgttcgtttttatagattatttttgtgtttgttttttgatttttttaagggttattgtattttttgtttgttgttttttttttggatttttttgtatatttttttgtttatgtatttatttatttattgtttgattaatgatagggttttgttttgttttttagg

SEQ ID NO: 508 - DNA, 8605 bp, Artificial Sequence
  chemically treated genomic DNA (Homo sapiens)
tttgggagataaagtaagattttgttattaattaaataataaatgaatgaatgtatgaataaaaaaatgtgtaggagaatttaaaagaggggtagtagatagggaatataatggtttttggaaggattaggaaataggtataggagtggtttatagaggcggacgataaggtttgaaattaaaaaagagattagttaaaagtttaaatatatggttgggtatagtgatttatatttgtaattttaatattttgggaggcgaggcgggtagattatttgaggtttttattaaaaatataaaaattagttaggtatggtggtgtatgtttttaattttagttatttcggaggttgaggtaggaatattgtttgaatttgggaggtaaggttgtagtgagttgagattgtgttacggtattttagtttgggtgatagagtgaaattttgttttaaaaaaaaaaagaaagaaaaaaatgtttaaatatagagtggaatttgatttttaaattttttattttatataagttagggtaaatataaatattaataattatgttagggcgtaaggtttgttttttatatgtttttttttaggtagtttgggattagacgtagagattgttgtttgttattttgatattttagaggtatagtatatttgtatatgttttttttagatttaattgtttgttattttaattatttttttttatatggattatgtggaagtgtttagtaaatattatttaatcgtatatgtttttaataatttttttaggttagattattgaaaagaggtagtagattgggcgtagtggtttatatttgtaattttagcgttttgggaggtcgaggtgggcggattacgaggttaggagttcgagattagtttggttaacgtggtaaaatttttatattgggatttttttatattggatttttttaggagagataaaaaatttttattaaaaataaaaaaattagttgagtgtggaggtatatgtttgtaatcgtagttagttgagagattgaggtaggagaatggtttgaatataggaagcggaggttgtagtgagttgagattttgttattgtattttagtttgggtgagagagttagattttattttaaaaaaaaaaaggagagagagaaaagaagaatcggtatatttgtaattttttttttttaatgttttagtttatatttcgaaaggacggtatgttattttatataattataatttattattagatttaagaaaattatttttttatcgcgcggtggtttatgtttgtaattttattattttgggaggttgaggcggattatttgagattaggagttcgaaaattagtttggttaatatggtgaaagttcgtttttattaaaaatataaaaaaaaaaaaaaaagttaggtgtggtgatgggtattggtaattttagttatttgggaggtaggttgagataggagaattgttttaatatgagaggcggaggtggtagtgaatcgagatcgtattattgtattttagtttgagcgatagagggagtgtgttttaaaaaaaaaaaaaaaagaaagaaaaagaaattaagaaagaaaagaaaattattgatagatattttaaggtatttttgaaacgtgatttttttttaatttattttttaatttaattaagagtaatagaaaatatttgttatttttaaaatgggtgtaattttttttttaatttttaggtttagtagttggggaaagaaaagaatttgtttataaaaagagtttttttagtttgttaaattagtattatataggtagttttaatttggaattaaagggttattattttttatcgtttaattagttggaaatagggttgttttgagttaatatttaggagagttgtgttagggtcgtgtttggtttgcgttgttatttggggagtaagggatttgtgtttttttattagggggtatttttagttagaggataaatgattaaagacgaagggaagtttttgttttttaggagacgtttgattttgtttttgggaaagttatatagggtgggcggtttagtttttttttttaggagttggcgggttttaagttattagtattagagttaataagaaatagtttttggttaggtatcgtgatttatcgggaggtcgagataggcggattatttgaggttaggaggttaagatttgtttggttaatatggtgaaattttatttttattaaaaatataaaaattagttgggcgtggtggcgggtatttgtaattttagttattcgggaggttgaggtaggagaatagtttgaatttgggaggcggaagttgtagtgagtcgagatcgcgttattgtgttttagtttgagagatagagttagttaacgtttttttaggttttttcgttttacgtttttgaacgtttggatttaaagagagtgtattttagttattttttttttcggtagtaggtagtgggaatgtttttttaggttataaaaaggtgttaggtttgtatttgaattttatagcgttatttttttagtgggtttggggggtttttcgttcgttaggaggaggagtgtggggtttgcgttagggtttttttttttgttagtttgttggtttttttagcgtttgggaagggggtgatagaggtttattaggaagttaagtgtaatttatttttatttgggtcgtttattttagtttgtttgtaacgttttatatttagtatttattgttttttagaggttaatttttttcggtttttagggttattaatcgagggggaggtggcgttttagggattttgttcggtttttttttattggagtttaggagtagggtgcgttttcggttttttttttatcggtatttaatcgtttattcgttttttggtttcgttgtttggtttttttttttgtttatggatttaatatcgtgcggttttttttttagtttatttagtgttagatttttgttttttaataggatttgttttttggggttttaggaattgcgtgggattttgcgtagaaagttggttaggtaaatttttcgtaatgagggggaaataaatcgaaaatagatgtcggtagatgcgattatgtcggtagtttggttcggagatatcgaggtttaggcgttgggagcgcggttttaggtagtagttttcggattcggtcgagttttttttcgtaggcgtttttttcggcggttttggtcgcgttttcgtttcgagggtcggggttcggcgtatagttcggggaggggagcggagggtagagggttggcgggcggagttgttttttgtttttttcgtcgacgtttcggagcgcgcggatttttattttagttcgttcgttagggatagtttcgagggtttcggtttttcgtcggtttttaggtacgtcgcggggtcgcgtttgggttcgattgagggcgtagaggaattcgtttcggcggtcgggtagtatcgttttcgttaaggttatttacgttgcggtggtttcgggtttttagtatttatttagcgttgtagtcgagagtttgtagtttagtttgcgcgtagcggagcggttggcgttgtcggagcggttgtcggagttttgtagtcgtcgtagtttgggttagtttcggttttaagtattttttcggtttcgttttacgtgattatcgcgtagtttcgttcgggttttttcgtcgttcgcgtacggtgttttttagtttttattttttttcgttatttttcgtcgttcgcgtttttcgtttttcggtttcgtatatttttcgttttttttcgttcggggttcggggttatcgtcgggggcgggcgggggtttgagcgcgcgggttggggaagaggggtttggagttttgcgggttttgggtggcgaaacgttgcgaattggggttaggggatggggaaaaagtttttaaaggtggttttaaggtttttatttcgtttagaaaagttttttcgtttcgcgggatcgttttcgttagaattcgcgtttgggatttttgtttgtcgagttggcgggggtggggtggtggagagggcgtcgtcgtttattttatttatttagaagtcgttgtagaggttgggggtggcgaggttgtggattttatagaatagtttttagaagggttattttgttgtttagagaacgtatttataaaatattatagttacgtataaatagaaaagagtggttgttattgcgaaggaatttaggagttgcgttaggatttttaagaggagaaggattttgggggcggaaatcggtttggtataggagtattcggagatttgtttcgagaggacggataaagtgtatatttatttggggtttattatcgggaggttttggaagggagatgtaggggttggtttaagatttatttttttttagatattttttaaatagttttaatttttaagataaatttgtaaagtaggtatgattttagttgtatttaagaggtttagaggggttgggttcggtggtttacgtttgtaattttagtattttgggaggtcgaggtcggtgagttatttgaggtcgggagttcgagattattttgattaatatggagaaatttcgtttttattaaaaatataaaattagtcgggcgtggtggcgcgtgttagtaattttagttattcgggagattgaagtaggagaatcgtttgaattcgggaggcggaggttgcggtgattagagatcgtattattgtattttagtttaggtaataagagtgaaattttgtattaaaaaaaaaaaaaaggtttagaagaatcgtattttatttaggttgtggcgatagtaagagggtagtagtcgggtgtagtggtttacgtttgtaattttagtattttgggaggtcgaggcgggcggattacgaggttaggagattaagattattttggttaatacggtgaaatttcgtttttagtaaaaatataaaaaattagtcgggcgtggtggcgggcgtttgtagttttagttattcgggaggcggaggtaggagaatggcgtgaattcgtgagttgagatcgtgttattgtattttagtttgggcgaaaagcgagatttcgttttaaaaaaaaaaaaaaaaaaaaaaaaaaggaaggtagtaggattgtatgggatttggttttttgtagtttggtcgttagttgttatatagttttgagtttgtttttagagatatgtttgtattttcgtttggttagtaataaattaaggataggagtggaaggaaaaaataatttttggagtttaaatatggttattaagtttttagtagagtgggatattcgaggaattgaggattaggaggttggaggttaaggtggttttaattgtttgtttattttagttatattttgatagttatggattttggattttaaattattttagatttttataaggagtttataagatggttaaaatggggaggatatagttagaattaggataattttttttttttttatttttagagtgtgatagaaggtatgtagagtagagtgtttgatatgcgttatggttatttgatggaattttttattagtgttattatagaaattatttttgagaggtaaaaattatttttgaaataaaagaaataggttaggcgcggtggtttattattgtaattttagtattttgggaggttgaggtaggtagattatttgaggtcgggagttttagattagtttggtttaaatggtgaaatttagtttttattaaaaatataaaaattagttgggcgtggtggtttacgcgtttgtaattttagttatttgagaggttgaggtaggagaatcgtttgagttcgggaggtggaggttgcggtgagttaaaattacgttattgtattttaattcgggtaagattttattttaaaagaaaagaaaagaaaaaaagaaataggttaggcgtagtggtttacgtttgtaattttagtattttgggaggttaaggtaggcggattacgacgttggaagtttaagattagtttggttaatatggtgaaatttcgtttttattaaaaatataaaaattagttgggtgtggcgttgcgggtttgtaattttagttattcgagcgttgaggtaggaggattttttgaattagggagttagaggttgtagtgagtcgagattacgttattgtattttaatatgggtaagattttttaaaagataagaaaagaaatatattattattagagtagaattcgtttttttttggaatatttaggaaagttttatggagaaaggaatatatagtatatttatttgtatatgtttttttttgtttttattggattttaagttttatttaggtaagtatttttatttgcggtgtttttttgttttattttagtttattgtagggtgtttggtttatagtagaggatagagaaatgtgagttgagtggatgtataatgaatgaagtaggttttgaagttgaggagaattttggtttaatttgttagatttgggggttagggtttagggtttggggaatagtttttagaatttatagagaggttttgatttacgtgtgtaaaagttgtttgtttgttgaatattcgtaaaagaggtttaagttaatatttgaaagaggtgaaaatatacgtttttataaaaattcgtcgggtatagtgggtttacgtttgtaattttagtattttgggaggtagaggtgggtggattatttaagtttaggagtttaagattagtttggggaatatagtgagattttaattttaaaataaaagttaataacgtatgtataaatttatattagatgtttatagtagtattatttatagtaattaaaaggtgaaaataatttaaatgtttatttattaaaaattattgtacgaataaataaattgttataaatttattaaatggagttttatttagtcgtaaaaaggaatgaagtagtgatatatgttataatatcgataaattttgaaaacgtttattaaataaaattagttaggtttaaaggatttagtattgtatgatttcgtgaaatttatatgggaggttaggtaggtgatagttaaagggtgtggggtttttttgggggttaatatgaatttttttttttttgtcgagatagagtttcgttttgtcgtttaggttggagtgtagtggtgcgatatcgttttattgtaattttcgtttttcgagtttaagtaattttgttttagttttttgagtagttggggttataggtattcgttattatatttttttaatttttgtatttttagtagagatagggttttattatgttggttaggttggtttcgaatttttgatttcgtgatttatttgtttcggttttttaaagtgttgggattataggcgtgagttatagggtttagtttaattttgtattttttgtagagacggtgtttttttatgttgtttaggttgattttaagtttttgagtttaaatgattttgttgttttcgttttttaaagtgttaggattataggtgtgagttatttcgtttagtttgatttaattttttaatttttaaaaattatttttgaatacgttatagtgtttaattatttagtgttgaaatgaattggattttttatttggttgtgattgtttttagtatttttagaaatatgtttttatttttatttaaattttaagttggttggtgtagggtgttgttttatttatttttattttttttttttttttttttaaaggattttcgtgttttttatttttttttttagtagggaggtatgagtcgtgtttttgggtttttttttttttttttcgatagttttttttttgtggtgtgattgttattagagggagggaaattatagtgttttggttttagagaattaagtttttggttttagttttatgagggttgattatattgttttttttttttttttattggtttttagaaggatttttttttatttttttatagtgttttttttgtggtttattttattgcgagagtatttgtttaattgcgagtaaaagagatggttgtttttttaatatcggtgggggtttcgatttttatatgaattttttcgggagggaagttatgtttgtagttagggttttagtagatgtttatagtttttaaagttttgtttttagaggttattattttttattatttttgtttttggtggggtttttttaattttaattatggtttttttattatagaagagtagggtttatttatttgtttttttttatgaagagtaaatgtattattttatttggggttttagttgtttttgtagttttatttatttttattttttatttatttaattaaaaaaaaagtttgagatagggtttcgttttgttatttaggttggagtgtagtggtaggattttggtttacggtaatttttatttttcgggtttaagtaatttttttattttagtttttggattatttgggattatagacgtatataattatgtttggttgttgttttttattttatttttatagatattgggttttgttatgttgtttaggttggatttaaatt

SEQ ID NO: 509 - DNA, 5391 bp, Artificial Sequence
  chemically treated genomic DNA (Homo sapiens)
tttaatagtatgaaatagttagtttattttttgttttttttttttatatttttttgttgtttattgcggttaatttagtatagtgtttttgaagttgattgagggtttttttatttataggtagagatgagttcgtggttacgggtggtgaatgtagttattgttatagcgttttttgtttttggagagtttgaagagtcggtggtgtttagtattattcggggtatgattcgggttatgattatgtttttagtgttattcgtcggggttgaggggtttgttgtgtttcgtagtaaagacggtagagaacgagagcgagaaaaacgttttagtttttttaagaagaataagtagttgggggtaaggttttaggttaatttttttttttcgtttaggaaattgttagggatagtcgatagggatcgtttttttgttaggataattgtttgttgttagggtttgttgttaaggttaatttattattaggaattgttattggggacgagtttatgtttttaagggtagttttttttttttgttgtttaattttagattggtggtgggatttaggtaatttttttttttattttcgtcgattttttttttttttttagtttcgtgtttttgttttttattacggtgtggatagtgtcgtatttttaatataggttatgtggggagtggttgtttttgttttagggttatttttttgttatgcgagggtattcgttttttgttttttggttttttattttttagattagttaggaattttttagagttgaagtaggttttgggggtagaagtgttagatgatagttagaggcgtaggagttttttttttttatttttattttgtaattttagttgttattttatttttagttgtttttaatggtttttaggtgtgttgttcggggatagttatcgttttgagtttggttaaggatttatgtgaagttttttttggattaggaaaaagatttagaaatggaaagggattttggagaatgtagattttttttatagggatagttttgtagggttattttaaagtatgttaaataagtatattttagggtaaaatatattaatatttattatgtgatattaaagttaggatagtgttttttttttttgagatagagttttattttgtcgtttaagttggagtgtagtgttgcgattttagtttattgtaattttcgttttttagatttaagttttagttttttgaatagttggggttataggtacgtattattatgtttcgttaatttttgtattttattttattttatttttttttgtagatggagttttgtttttgttatttaggttagagtgtaatggcgtaatttcggtttattgtaattttcgttttttgggtttaggtgatttttttgttttagttttttgagtagttgggattataggtatgtattattatgatttattaatttttttttttttttgagatggagttttattttgttgtttaggttagagtgtagtggcgtaatttcggtttattgtaattttttacgttttggatttaagtaatttttttgttttagttttttgagtgtttgggattataggtttgtgttattacgttcggttaatttttgtatttttattagagatagggttttattatgttggttaggttggtttcgaatttttgattttaggtgattcgtttgttttggttttttaaagtgttgggattataggtatgagttatcgcgtttagtcgaatttgatgttttattgttatatttttgaatgtattgtaaaaaagttttaagatttttggttttttttttttttttttttttggagatagagttttgttttgttatttaggttggagtgtagtggcgtaatttcggtttattgtaagtttcgttttttaggtttacgttatttttttgttttagtttttcgagtagttgggattgtaggcgtttgttattacgttcggttaattttttgtatttttagtagagatggggttttatcgtgttagttaggatggtttttattttttggtttcgtgatttatttgtttcggttttttaaagtgttgggattataggcgtggttattgcgttcggttttttttttttgttttttttgaaatagggttttgttttgttatttacgttgtagtgtagtggtataattatggtttattgtaattttaattttttgtgattaagagatttttttattttagatttttaagtagttgagattataggcgtatatcgttatgtttggttaacgtttgtattttcgtagaaatggggttttgttatgttgtttaggttggttttaaatttttgggtttaagtgatttttttaattttgttttttaaagtgttgggattataggtatgagttattatgtttagtttaaaatttttgttgtaatgttaatgttggttagttgtgttttaattttaaagggaggagagtataatgaaatatgtttaatttttattttttattatggtttgaattattattattgttgaggttaacgttggaatgtttttgattgggaggaagggtttatttagatggttggaggggattagaattttatttttaatttatagagggaagagtataattaaggaaagattagtatttgttgtaattttttagattttttttttttagattttagttggtaattggaagtattgagatggttttattttggttttagtattaatgtttgagtagttggaatgttattttgtttttttagatttttgttgttgtagtaattttggtttgaattagatgattttgtaatttttagatgggttttttttgtttattgtataaataaaattaatttagagattatagtattgtagaaaagaacgagtttaattgatataagatttgttatgttatataggagatagggttattatttaattaattttattgaaggtttggaggtcggggttttttaaagatagtttggtaggtaggcggttaggatatgggtgttattgattgtttgggaatgaaattatagtagtgtggaaaattgtttttttgtattgagtttgtttttgggtaggggttataggattggtggagttatacgttagtgtggggttattttatagttataaatgtaaaagtttggaagagatagtttaaaagattagttttatattttatgatagtgatgttaattataggagtaattggtaaagttgtaaattttgtgatttttagaataatggttggtaattttttaattatgtttatattttagtagaatttaggttttttttatttttttaatttggtggttttttattagttttataagggtggtttagtttttaggaaggcgtattttaatttaaagtataagttaaatttatttaaaagttattttggtttatgtttaggaataagtgaagatagttagtttgtgaggttagaaagtaagatgtagttagttatgttagattttttttattgttataattttgtaaaggtagttttaattttttttttttttgagatggagttttattgttttattaggttggagtgtaatggtgcgtttttagtttattgtaatttttgattttttggtttaagcgatttttttgttttagttttttgagtagttgggattataggtacgtgttattatgtttagttaatttttttgtatttttagtagagatagggttttattatgttgtttaggatggtttttattttttgatttcgtgattcgtttattttggttttttaaagtgttgggattataggcgtgagttattgcgttcggtttaaaaatatttttagtagtgacggggttttatttcgttggttagattggtttcgaatttttgagtttaggtgatttgttcgtttcggttttttaaagtgttgggattataggcgtgagttattgtatttagtttatttgtcgtttttttttttagattgtgagttttaagaacgtagtattatttttgtaatgtatttgtgtatgtttttttttggtagattttggaatatagtaggtgaatgttttaagggatagttttaattttgtgtattttgttttagtggttattgaatgtttgtatgattgtatttgaattttataatagtttgagacgttgttagtatttaaaaaattatttgttatttcgttgttgagaagaggggtttgaaagaggcgattaagttgtaaatttaggtttagaagttaattgtttggatttaagtttagtttaattttttattagatatttggtaagttatttaatattttttttttttttttttttgagacggagttttgtttttgtcgtttgggttggagtgtaatggtacgatttgagtttattgtaatttttgttttttgggtttaagtgatttttttggtttagttttttaagtagttgggattataggcgtttattattacgtttagtttttttttgtatttttagtagatatagggttttattacgtgtgttagattggttttaaatttttgattttaggtgatttattcgttttggttttttaaagtgttgggattatagggttgagttatagagttcggttacgttatttaatttttttaagtttcgttttttttattgtacgatggggatagtatttattttagagattgttacgtcgaataaaaggagttggtatattatgtttaatatataataagtacgtgatagaggttagtgattagttttagttttaggttagtagtttttcgttttttttattttgcgcgttttacgtgttttttgtaaataagagaacgcgtaggcgtcgtaaattagcgtttattggtcggcgtgtcgtcgtttcgttggagggaggatttaggtttcgttggtcgcgggttcggtattcggtgggtcggtggagcgtttgttgggttcgggtcgtcggtttcgttttcgttatggcgttttggttgtagtttttgtcgttgttggggttgttttcgggcgtagtggtcgttttcgtttagtttcgagtcgttagtttttaggtttgggggtcgtcgttttcgtagttgttggcgtttattcgtttcgcgttggagatgtttaatcgcggtcgggttgcgggacgcgggtcgtgttgggttttgtgcgcgatcgttcgtcgggtgaggaacgttcgggggcgggggcgttaggttcgggtttaagggataggagttttgatttaatattgggatggggtttgttcgttggacgaatcgatttttggtgatggggaatgggtagcgtcgtacgggcggggttttgggcgtcgttaagggtcgattgtttcgttttatttatttttttttttagg

SEQ ID NO: 510 - DNA, 5391 bp, Artificial Sequence
  chemically treated genomic DNA (Homo sapiens)
tttggagagaggagtaggtgaggcgggatagtcggtttttgacggcgtttaaggtttcgttcgtgcggcgttgtttattttttattattagagatcggttcgtttagcgggtaggttttattttaatgttaggttaaagtttttattttttggattcgggtttggcgttttcgttttcgggcgttttttattcggcggacggtcgcgtataaggtttagtacggttcgcgtttcgtagttcggtcgcggttgaatatttttagcgcgaagcgggtgggcgttagtagttgcggggacggcggtttttaggtttgaaagttggcggttcggggttgggcgggggcggttattgcgttcgggagtagttttagtagcgataggagttgtagttagggcgttatggcgagggcgaagtcggcggttcggatttaatagacgttttatcgatttatcgggtatcgagttcgcggttagcggggtttgagttttttttttagcggggcgacggtacgtcgattaatgggcgttggtttgcggcgtttgcgcgtttttttgtttataggaggtacgtggggcgcgtagggtagggagagcgggaggttgttggtttgaggttaaagttagttattgatttttattacgtgtttgttatatgttaggtatgatatgttagttttttttattcggcgtagtaatttttgaagtaggtgttatttttatcgtatagtggaggaaacgaggtttggagagattaaatggcgtggtcgggttttgtgatttagttttgtaattttagtattttaggaggttaaagcgggtggattatttgaggttaggagtttgagattagtttggtatacgtggtgaaattttgtgtttattaaaaatataaaaaagagttgggcgtggtggtgggcgtttgtaattttagttatttgggaggttgagttaggagaattatttgaatttaggaggtagaggttgtagtgagtttagatcgtgttattgtattttagtttaggcgataagagtaaaatttcgttttaaaaaagagagagagagaaatattaagtggtttgttaaatatttggtaaggaattgagttaaatttaaatttaggtagttggtttttgagtttgggtttgtagtttgatcgttttttttaggtttttttttttaatagcgagatggtaggtaattttttgagtgttggtagcgttttaggttgttgtgaggtttaaatgtaattatgtaagtatttagtagttattaaggtagggtgtatagggttgagattgttttttgaagtatttatttgttgtgttttagggtttattaagggaaagtatgtatagatgtattataggaatagtgttgcgtttttggagtttatagtttagagagaagaacgatagatgggttgggtgtagtggtttacgtttgtaattttagtattttgggaggtcgaggcgggtagattatttgagtttaggagttcgagattagtttggttaacgaggtgaaatttcgttattattaaaaatatttttaggtcgggcgtagtggtttacgtttgtaattttagtattttgggaggttaaggtgggcggattacgaggttaggagatggagattattttggataatatggtgaaattttgtttttattaaaaatataaaaaaattagttgggtatggtggtacgtgtttgtaattttagttatttaggaggttgaggtaggagaatcgtttgaattagggagttagaggttgtagtgagttgagagcgtattattgtattttagtttggtaagatagtgagattttattttaaaaaaaaaaaaaattgaaattgtttttgtaaaattatgatagtaagagaaatttgatatggttgattgtattttgttttttagttttataggttggttgtttttatttatttttgggtatgggttaaggtaatttttggataaatttagtttatattttaaattagaatacgtttttttgaaaattaaattatttttgtaaaattaatgaaaggttattaagttaggaggatgagaggggtttgaattttattaagatgtaggtatagttaaaggattattagttattgttttggaagttataagatttgtaattttgttagttatttttgtaattaatattattattatggaatgtaagattgattttttgagttattttttttaggtttttgtatttgtgattatggaatggttttatattgacgtgtgattttattagttttgtgatttttatttagaagtagatttagtgtaggagggtaattttttatattattgtgattttatttttaagtaattagtagtatttatattttagtcgtttgtttattaaattatttttgaaaaatttcgatttttaagtttttagtgagattgattgagtaataattttgttttttgtgtggtatggtaggttttgtgttagttaaattcgtttttttttgtaatgttatggtttttgaattgattttgtttgtgtagtaggtaggaagaatttatttggggattataagattatttagtttaaattagaattgttatagtagtagaggtttagagagataaagtgatattttagttatttagatattagtgttggagttagagtggagttattttaatgtttttagttgttagttgaggtttgagaggagaggatttgagggattgtagtagatattaatttttttttgattatgtttttttttttgtaaattaaaaataaaattttaattttttttaattatttgaatggatttttttttttagttaaagatattttaacgttaattttaataatgataatagtttaggttataatgggaagtggaagttaggtatgttttattatatttttttttttttggaattgaggtataattgattagtattaatattataatagagattttaggttgggtatggtggtttatgtttataattttaatattttgagagatagagttgggaagattatttgaatttaggagtttgagattagtttgggtaatatggtaaaattttatttttacgaaaatataaacgttagttaggtataacggtgtgcgtttatagttttagttatttgggagtttgaagtgagaggattttttaattataggaggttgaggttgtagtgaattataattatgttattgtattatagcgtgagtgatagggtaagattttgttttaaaaaaaataaaaaaaaagggtcggacgtagtggttacgtttgtaattttaatattttgggaggtcgaggtaggtggattacgaggttaggagatggagattattttggttaatacggtaaaattttatttttattaaaaatataaaaaattagtcgggcgtggtggtaggcgtttgtagttttagttattcgggaggttgaggtaggagaatggcgtgaatttgggaggcggagtttgtaatgagtcgagattgcgttattgtattttagtttgggtgatagagtaagattttgtttttaaaaaaaaaaaaaaaaaaaaagttagagattttaagatttttttgtagtatatttaagaatgtagtaataagatattaaattcggttgggcgcggtggtttatgtttgtaattttagtattttgggaggttaaggtaggcggattatttgaagttaggagttcgagattagtttggttaatatggtgaaattttgtttttaataaaaatataaaaattggtcgggcgtggtggtataagtttgtaattttagatatttaggaggttgaggtaggagaattgtttgaatttaagacgtggaaggttgtagtgagtcgagattgcgttattgtattttagtttgagtaatagagtgagattttattttaaaaaaaaaaaaaaattagtgggttatggtggtatatgtttgtagttttagttatttaggaggttgaggtaggagaattatttgaatttaggaggcggaggttatagtgagtcgagattgcgttattgtattttaatttgggtgataagagtaaaattttatttataaaaaaaaataaaataaaataaaatataaaaattagcgaggtatggtggtgcgtgtttgtaattttagttatttaggaggttgaggtttgaatttgggaggcggaggttgtagtaagttgggatcgtagtattgtattttagtttgggcgatagagtgagattttgttttaaaaaaaaaagatattattttgattttagtattatatgatagatattgatgtattttattttaaaatatatttatttgatatattttgaaatggttttgtaaagttgtttttgtggggaaaatttatattttttagagtttttttttatttttaggttttttttttgatttaggagagattttatataaatttttggttagatttaaggcggtggttgttttcgaataatatatttggaagttattgagagtagttggagatggagtggtagttggagttataggatgggggtggggagggagggtttttgcgtttttgattgttatttggtatttttgtttttagggtttgttttagttttgagaggtttttggttggtttgaggggtgaggaattagaaggtagaaggcgagtgttttcgtatggtaggagaatgattttgaggtaggggtagttattttttatatggtttatgttgagggtgcggtattgtttatatcgtggtgagggatagaggtacgaggttggggaaaggggagaagtcggcgggggtgggagagggggttatttgggttttattattagtttggaattaaatagtagaagagaagggttgtttttgggaatatggattcgtttttagtgatagtttttggtgatgggttgattttggtaatagattttagtagtaggtagttgttttgataagagggcggtttttgtcgattgtttttggtagttttttgaacggagggagggagttggtttgggattttgtttttaattatttgttttttttaaagaagttgaagcgtttttttcgttttcgttttttgtcgtttttgttgcggagtataataggttttttagtttcgacgggtgatattgggggtatggttatggttcgggttatgtttcgggtggtgttgggtattatcggttttttaggttttttagaggtagaagacgttgtggtaatggttgtatttattattcgtagttacgagtttatttttgtttgtggatggaaagatttttaattagttttaaggatattgtgttgagttggtcgtagtggatagtagggaagtgtaagaggaggaggtagaaagtgagttgattgttttatgttattagg

SEQ ID NO: 511 - DNA, 5820 bp, Artificial Sequence
  chemically treated genomic DNA (Homo sapiens)
gttgttatgatttttttggatatgtatttggtagaaatttgtattcgatgtttttttagggtatatatttaggattgggaaaagagttaatatggtagttgtaattgttattgtattttttttttttttttttttttgagatagggttttgttttgttatttaggttggaatgtaatggtataattatggtttattgtagttttaatttttattttagttttttaagtagttgggattataggtatatgttattatatatagtttcgaatttttgggtttaagtgatttttttattttggttttttaaagtgttgggattataggtatgagttattatacgtggtttttattgtgttttaaatgggtgtttttttaatatttagttagagtaatatttttttatgtttattgattatttcgattttttgttttgagataaaattgtttaagttttttggttattgttttattaagttaattgttttttttattgtaagtttttgttttgttttgttttgagagttttattttgttgtttagtgaggtaatttttatttatagtaattttagtttttttagttttttaagcgatttttttgttttagtttttcgagtagttgaagttataagtatgtgttattattttggttaatttttttgtgtatgtttttagtagagataggtttttattatgttggttaggttggtttttaatttttgattttaagtgatcgattcgtttcggttttttaaagtgttgggatatgggtgagttattgtatttggttagatttttgagttttttatgtaatttgaatataagttttttgttgtttatgtgtattttaagtatttttgtttattttatgaatggttttttgttttttttaatttagatgtgttaaatttattagtttttttttttattattagtattttatatatagtattaaaatttttatttattatgaagatatttttttattatatatttaaattattatttttatttggatttataatttatttagaataggttttttgatattttgggagaagaaggttaagttttatttttttatatagaaaatatttgtttttataggatattataaaggtaatttattattttagtattatttattggggataaaaaaagaaaatagttttttttttattatgatgaaagatgtaatatttattataaattaatttatttatgtgtatgttagcgtttatatgcgtgtggagtttttatttttggtttattagtttatgtttttatgttttattaatattacgttatttttatttttatggttttgtttgtaaaagtaagttttttattttatttttattttttaatggtgatttggttattattagttttttgttttttaaatatatttataattagttaagttttataaaatatcgttcggtgtaatgaatttatatagattaattttgggagagttgatatttttataatatttagtttttttttaatttatgaatatggaatttttttatgtttaggtttttttgaatgtttttttatttagttttataatttttattaaagaggttttttatatatttttttagatttatatttagttatttgattatttttatgttatttaagtattattttttaaaaatttttttttaatagtgttgtagtatatgtagaaatatgattaatttttaaattgattttttttagtaaatttgtaaaatttttattaattatggtaatttatttgtagatgattttggattgtttacgtatattattatttttttaaattattataattttgttttttttttttttgtttttatattttttatttttattttttatttaattgtattggttaaaattgttaatgtattgtttgttgaatagaattgataataatttgtatttaggtattattgtaatgttttgtttttaaaaaaaggttttaatatttttttattaggtataatgattgttgtgggaattttgtgataatttttattagattaaagatattttttttatttttagtttgttaagagtattttttaagtaaataagggtaaattttaggtttttattgttttaattaaataattatatgatgttttttttttagttagtttatatgatgtgttatagtaattttgttttttaaatgaaaagttaattatgtgtttttagaataaatttaaattatttatgatatattaatatttatttgtttattgattgatttggtttgtattaatatttaaaagtttattgatttataatgttttatttttatattgtttttattgggtttggtatggaggttatgttagttttataaagggaagggtagtattcgttttttagaagaaattatatagtatattttaaatattttttatagatttttttttaatgtggttattaaaaataaaagttgaaattttgtggatttagtatatttttttggaataatagtagttttttaattagatttttattatttttttaatttgatttgatagttattttaatgttggtagtttttcgaggtttgtaagttttttagatattttaaatagttttgattatttttaatgagaagattgtatgaaattttaggttattattaatgaaattttttaattaatttttattatatgagtgaatgtatatattttatttttttttttttatatgtgtaggtttttttttattttttttttttatttttaagttaaattaatatttttaaaataaaataaaatgttgaaaatttttaataaattaaattatgttaaatgttaaggtattaataaaggtgttatattattttttttttgttttttttttttttacgttattttttagatgtataaagacgttttatagagtttgtataagagaagaggttaagttttgtgtagttttaaaaataagtgaaaaaattatatatttatgtataaggaaaggaattttaatttttatgagatttttaagagggtttattatattttataaagattgggaattgtattttatattaattagaatggttattattaaatagttaaaaaataatagatgttggtaaagttgtagataaaagagaatatttatatattgttggtgggagtagtttaattattgtggaaagtagtatggtgattttttaaagagttaaaagtagaattattattcgatttagtaattttattattggatatttatttagaggaatataaattattttattataaagatatatgtacgtaaatgtttacggtagtattatttataaaagtaaagatacggaattaatttaattgttcgttaatagattagataaggaaaatgtggtatatatatattgtggtatatatatatatgtagttataaaaaagaatggatttatgatttttgtagggatatgggtggagtaggaggttattagtaaattaatgtaggaaattaaataatatatgttagttagtaaattaatgtaggaaattaaataatatatgtttttatttataagtgggagttaaatgataagaattgtgaatataaagaagaaaataatagatagtggggtaagaggagggagaggagtagaaaagataattattgagtgttgggtttaatatttgggtgataaatatgtataataaattttcgtaatatgtgtttatttatgtaataaatttttatatgtatttttaaatttaaaataaaagttaaaaataaatatttaagtaaaagatttttaaaataaaagatagaaaaaaagagattgggaattgtattagtttttaattttgttatttttgtaaaaattatattggattataacggttttttgtgtatatatagaattttttaaatattttaagtgtttttaataatttattgtgttattttgtagtaatttgttgttttttttttttattgttgagtatgcggttttaatttttttataggtagtatagtaatgaatgtattttttttttagaagtttttgtttttgggattaggttgatgggtttttaatgttattagtgaaatgggatattagatattttttagttaggatacgatagtttttaataaaattaaattattaagttttttttgtaagtaaggagtcgtttggaatataaggattttaattttgggtaggagataggtaagtagaagtttttaattgtgttataatttttattgaggatttaagtgatttaagaaagtaattgtgattgttagagttttgtttttttttttttttttttagtcgtacgttttatttatttaggagagtgtttacgtaatttgatttgatagtttttagaaagaaattagagtaataggggttttagtagggtggttttgggttaaatattgaaagtaggtaggtttattttttttttttttgttttttttaatttttttttgatgtttttatttatattttttattatattatatttttttatttatttttgttttagatttattaagtatatatagataagtaatttagggaatttgtatttattaggagaaatttagaaatttaaaagtaataatgatttaattttagaggagtagaaaataggaagtgggtagttgttagtttttttgttttgttggagtattttggaatttgatgggttgagggttttggatataatgttttaagttttttttttgttgtgttgggtttttatttttgttttcggtattgatttagtagttgtttaagagtttattatgttggtttggattatacggttttatttatattttcggtagtttgtgggtaaattttttgagtagttttgggtgatgaaattttttatggtagtaggagaatgggattgtgaatttttaattttttgtttttattttttttttttttttttagggttttaaagtttaggaggaggaagtatagtagtaattgattgggtagttttttaggaaagatgtagttatttttgtttttgttggttttttttttatttattggggttgaggtaggtgagtgattatttttatttttagaggtttgattttattttatagatttttgagttaaattgttttggtatattttaattttgtattgttgagtaagttatttgaatttgtgtttttttatttataaaatgagaataatattaatatcgattttgtagagttgttatgagagttaaataagttagagtatttaaatgttttggaattgttcgtatattataagtgttataaaaatatgttttgtgtaaataatttggtagtatgtgttagattttatttaggaggtaagaatatagtaataatagtattattagtttatgtttagatttttaaatattagttttacgtggttttgaattggatttagagggttttgggaagttttatgaggataaaagtataagggaattttaggaataattttgtatttatagtaaagtattttttttaatatttgaggttgaagttggttttgtttggaataagggttgtttttttttttttggagaggaggagggaggtgaggtttaggatggggaaaagggttttttttaagatagtagtgttttttgtagaattttggagtttttttttaatttgttgttttatagattttaagttttagtattatttttttttttttttgtatttttttttttgtcgtttttattttttagtttttttggagttattaatttggtatttatattgtaggtttagtaagtatagagttaagtgttaaatgtttttttttagg

SEQ ID NO: 512 - DNA, 5820 bp, Artificial Sequence
  chemically treated genomic DNA (Homo sapiens)
tttggaaggaagtatttggtatttagttttatgtttgttgaatttgtaatgtgggtattagattggtggttttagaaaggttggaagatggggacggtaggagagagggtgtaggagagggaggagatggtgttgaggtttggagtttatggggtagtagattgggagggggttttagggttttataggaaatattgttgttttgaaaggagtttttttttttattttaggttttatttttttttttttttttaaaagagggagaataatttttgttttaggtaaggttagttttagttttaggtattgaggagaatgttttgttgtaagtataggattgtttttgaagtttttttatatttttatttttatggagttttttagagttttttgagtttaatttaagattacgtgggattggtgtttaaaaatttagatatgagttgatggtattgttattgttgtatttttattttttaggtagggtttgatatatgttgttaaattatttatataaagtatgtttttatagtatttatagtgtgcgggtaattttaagatatttaaatattttaatttatttaatttttatggtaattttgtaagatcggtattaatattatttttattttatagatgaggaaatataaatttaaataatttgtttaatagtatagaattaggatatattaaggtaatttggtttaagaatttatgggatgaggttaggtttttgagggtggggatggttatttatttgttttagttttagtgggtaggagaaaggttagtagaagtaggagtggttgtattttttttgaaaggttgtttagttagttgttgttgtgttttttttttttagattttaaggttttgagagaggaaggaaggggtggggataggggattgagaatttatagttttatttttttgttattatgaaaggttttattatttaaggttgtttaggaagtttgtttataaattgtcggagatgtgggtgagatcgtgtaatttaagttaatatagtgagtttttgagtagttgttaagttagtgtcgagagtagaaataggaatttagtataataaggaaggggtttggggtattgtgtttagaatttttaatttattaaattttagaatattttagtaaagtaagaaagttggtagttgtttattttttgttttttatttttttgggattagattattattgtttttgaatttttgggttttttttaatgaatgtaagttttttggattgtttatttgtatatatttaataagtttgggataaggatgaatgaaagggtgtggtgtggtgagggatgtgggtaagaatattaggaaaaagttgaagggggtagaagaggaaagggtaagtttgtttgtttttagtgtttggtttaagattattttgttgagatttttgttgttttaatttttttttagaagttgttaagttagattgcgtaggtatttttttgagtaggtgaagcgtgcggttggagaaagaaaaggaagaataaggttttgataattataattatttttttaggttatttgagtttttagtgaaaattgtgatataattgaagatttttgtttgtttgttttttatttaaggttaaagtttttatgttttagacggttttttgtttgtagaaaaggtttagtaatttggttttattgggagttgtcgtattttagttggaaaatatttaatattttattttattggtgatattagaggtttattaatttaattttaggagtaaaagtttttgagaaggaggtatatttattgttgtgttatttataaaagaattagagtcgtatatttaataatgggagaaaagaatagtaaattattgtagagtaatataatggattattaaaaatatttaaaatatttagaagattttgtgtatgtatagaaaatcgttataatttagtataatttttgtagaaatagtagaattgaagattaatataatttttaatttttttttttttgttttttattttgaaaattttttatttaggtatttatttttaatttttattttaggtttgggggtatatgtgaaggtttgttatataggtaaatatatgttacggggatttgttgtatatatttattatttagatattaagtttagtatttaatagttattttttttgtttttttttttttttttattttattgtttgttgtttttttttttgtgtttatagtttttattatttagtttttatttataagtgagaatatgtattatttggttttttgtattagtttgttaattaatatgtattatttggttttttgtattagtttgttaatagttttttgttttatttatgtttttgtaaaggttatgagtttatttttttttatgattgtatatgtatatgtattataatgtatatgtattatattttttttatttggtttattgacgggtagttagattgatttcgtgtttttgtttttgtgaatagtgttgtcgtgaatatttgcgtgtatgtgtttttatggtagaatgatttatatttttttgggtaaatatttagtgatgggattgttggatcgaatggtagttttgtttttagttttttgaagaattattatattgttttttataatggttgaattgtttttattaatagtgtataagtgtttttttttgtttgtaattttgttagtatttgttattttttggttgtttagtaatagttattttgattggtgtgagatataatttttagtttttatggagtataataggtttttttgaaaattttatgaaaattagggtttttttttttatatataaatatataatttttttatttatttttagagttgtatagagtttaatttttttttttgtataggttttataaaacgtttttatgtatttgaaaagtaacgtgaagaagaagggagtaaagagagaatagtatagtatttttattagtgttttagtatttggtataatttaatttattaaaaatttttaatattttgttttgttttaaaaatgttagtttaatttaaaaatagaagaaagggataaagaaaaatttgtatatatgaaaaaaaaggagtaaaatatatgtatttatttatgtaataaagattgattaggaaattttattaatagtgatttagaattttatgtaatttttttattaaaagtaattaaagttatttaagatatttaaaaagtttataaatttcgaagaattattagtattgaagtgattattagattaagttgaaggaataatgagagtttagttaggaagttgttattgttttaagggaatgtgttgaatttataaaattttaatttttgtttttgatgattatattaaggagaaatttgtagaaaatatttaaagtatgttatatagttttttttgaagaacggatgttatttttttttttatgggattagtataatttttatgttaaatttaatagagataatatagaaatgaaatattataggttaataaatttttgaatattgatgtaaattaaattaattaataagtaaatagatattaatatattataagtaatttgggtttattttaggaatatatagttgattttttatttgaaaagtaaaattgttgtaatatattatatgaattgattaaagaagaaatattatgtgattatttaattgaaataatgaaggtttaaaatttatttttatttatttaaaaaatatttttagtagattaggaataaaaagagtgtttttaatttgatagaagttattataaaatttttatagtaattattatatttaatggaaaagtgttaaaatttttttttgagagtaaaatattataataatgtttgaatataaattattattagttttgtttaataaatagtatattagtagttttagttagtgtagttaggtaggaaatggaaatgaaaggtataaagataggaaaagagaaaataaaattgtaatgatttgaggaagtgatagtatacgtagataatttaaaattatttataggtaaattattataattaataagagttttatagatttgttagaaaaaattaatttaaaaattaattatatttttatatgtattgtaatattgttagaaagaaatttttagaaagtaatatttaaatggtatggaaatgattaaataattaaatgtaaatttaaaagaatatgtgaaagatttttttggtgaaaattataaaattgaatgaagagatatttaagaagatttaaatatgaagagattttatgtttatagattggaagaagattaaatattgtaaaaatgttagtttttttaaaattgatttatatagatttattgtatcgagcggtattttatagaatttaattgattgtaagtatatttggaaaataaaaggttaatgatagttaggttattattagagaatgagaataagatggaagatttgtttttgtaaataaagttatgggaatgaagatagcgtggtattgatgaggtatagaaatatggattaatggattagaaataaggattttatacgtatgtggacgttgatatatatatggatggattgatttatgatggatgttgtattttttattataatagggaaaagattattttttttttttatttttaataaatggtattgggataataaattgtttttatggtgttttatagagataaatattttttatgtggaaaaataaaatttgattttttttttttaaaatattaaaaaatttattttaggtagattatggatttaagtaggaataatgatttgaatatataatggaagaatatttttatgataggtaaagattttagtattgtatataaagtattaataatgaagaaaaggattgatgaatttgatatatttaaattgagagaaataaaagattatttatggagtaggtaaagatgtttgaaatatatataaataataaagggtttatatttaaattatataaagaatttagaaatttggttaggtgtagtggtttatttatgttttagtattttgggagatcgaggcgggtcgattatttgaggttaggagttggagattagtttgattaatatggtgaaaatttgtttttattaggaatatatataaaaaaattagttaggatggtggtatatatttgtaattttagttattcggaaggttgaggtaggagaatcgtttggggaattggggaggttgaggttgttgtaagtggagattgttttattgggtaataaagtgagatttttaaaataaaataaaataaaaatttgtaatgaagaagataattaatttaataaaataatagttaaaagatttgaatagttttattttaaaataggaaatcgaagtggttaataaatatgaaaaagtgttattttgattagatattagagaagtatttatttgaagtataatgaaggttacgtatggtggtttatgtttgtaattttagtattttgggaggttaaggtgaggggattatttgagtttaagagttcgagattgtgtgtgatggtatgtgtttgtagttttagttatttggaaggttgaagtgggagttgaggttgtagtgagttatgattgtgttattgtattttagtttgggtgataagataagattttgttttaaggaaagaaaaaagaaaaaagtgtaataatagttgtagttattatgttggttttttttttaattttaggtatatattttagagaaatatcgggtgtaaatttttattagatatatgtttaagaaggttatagtagt

SEQ ID NO: 513 - DNA, 6476 bp, Artificial Sequence
  chemically treated genomic DNA (Homo sapiens)
tttgtagttttttttttttttttttttttttttttttttttattgtttttttttttttttttttttttttttttttttttttttttttttttttttgtttgtttgtttgtttgtaaagttagattaattagtttaagttgttataaaattagaaaatttgaattaagtagaaattatgaattgaatatgttttagagggaaggaattaaatttagttttaaatgagaagtttattttttaaaatatgaaagtttttaaaaattatggttagtattgtttttgtttttttattaggatattaaaattaagtttacgggtgtttgatttttagattttaaagattttggggtatgttttagtatttagttttatttttttttttttttttttggatttagtttttttttttgagttgggaggttgtttggatagtgtttttgttatttgcgttgtttttttttttattatttatgtgtatttgtttttttgttttttagtgtattttttttaggatgttttggttaaattgattaggtgtttttatttttgtttttttttttttttttgaatgttgtttagtgttttttggaatttgtgaatttttcgtgaatgataaatattaagagttttttaaaatgagattttatgttttaaatagaatttgtagttaggattttagggaaggttagtaggtttttatttttagaagtattttgtcgtgtaagatattgtttatggaatattaatgttatttagggttttggaaagatatttaggaagggagttattacgtttgaatttttggagatgtgtttagtagggaagaatttattataatttatgaatgattgattgatttttagaaaggtttacgtatgtttttttttgttatttaggattggatttttgaattagtgcggaatatgaatgagagcggttaggggagaattggaggatgttggtggaggttggaaggtttgtagttatttgtttgtgtttatttaagtgatgagaatgtaggagtagtaggatttggtttattattattttatgtttgttataggagagaggatcgtttttttataggttagagttattgttaattaaggtgatagtgtaagatgtatttttatttttgatttttcgttgtaaataggttttttgagtggtgttggtttatttttaatttggaagttagtttaattaaatgttttattagatttaagtttgatgaaaatattagtaaattttttaattaacgagttattataagtaatttaaggtattagttttgttttttatataagggagtattggttttgaggaaatgggattatatatatagggaataaaagtgatataatgggttatgagggtgtgatgagtattttagtgattgttttgggtaaattttgttggttatatcggttttagtttttttatatagataaggaaatgttttttatgatcgataatagttttttttgtatcgaggttgtttagttattagaatggtttttagaagataatattattagtaattattgttagtaaggagttggtttttgtggtattatgttgttgttaatagtttttgttagagtaattgtattgtgggagatttgatttagggaaggtagaaattaaagtttgtgtttttaaggaggttatggaaaatgaagaaaaatattagtttttttgtaggaggaagttggaaatggttggaaggattatttatggttagagttttagtatttgggttatgatttattttgggtaggttaagtataggttttatttttttaggttttggttgtggattagattttggatttttttttttcgggtatagtttagttgttatgatgttttttgagttaatgagttttttggtttgattttttgtttaagtaaagaaagggttcggttttagtttttagaggttgataagtattaaggtggtagaatatgggagtattttgtaggtgtttttagtatttgttttggtttaggtgttagaggtttgcgattttttagtttttgattttatattttcgattgtttgttttttaatttttttttgaataacggggtgaatatgttattttttttggtggcgaatggggttttttagaattgggaggttatagtttagattttgaggttttttattaagtaagtgttggagagtaaagttatttatttataatttttttttttttttttttaaatttggggaaggggaggttatttgagtagttttttttatattttttagtaaggaatttatgaaggattaagtgagttttaagttttcggtagaaatatttagttgttttaatgaattttttgtgattttgaaatttgtaaagttagaattaaggtagacgtaggtattttagttatttaatattatagaaatattgtttttattttataaaataataaatttaaatattgttatggtttttttgtttgttttttttaaaatttttgttggaatttatttttaatgtggtagtattaaaatgtggggtttttaagaggtgattaggatatatgagtttttttttaatgaatatattaatttatttatggaataatgggtttatagattaataggttattttgggaatgggattgatggttttttttttttttttttttttttttgagatggagtttcgttttgttatttaggttggagtgtagtggcgtgatttcggttcggtttattgtaatttttattttttaggtttaagtgattttttcgttttagttttttaagtatttgggattataggtgtgtattattacgtttggttaatttttgtattttagtagagataggattttattttgttggttaagttggttttaaatttttgattttaagtgatttgattgtttcggttttttaaagtgttgggattataggtgtgggttattgcgtttaggtaggattgatggttttaaaagaagaggaagagatttgagttaggatatttagttttttcgttttgtgatgttttatattattttgggtttttgtaaagaatttttataagtaagaaggtttttataagatatattttttggattttagattttttagtttcgaaaattgtaagaaataaatgttgtttttataaattatatagttttaggtattttgttattagtaatagaaaagagattaggatagatattatagttagattgtattttatatattgtgattggttttttagagaagtaatgtataaaaagaggaataatcggtcgggtacggtggtttatatttgtaattttagtattttgggaggttaaggtaggcgaattacgaggttaggagtttaagattagtttggttaatatggtgaaattttatttttattaaaaatataaaaattagttaggcgtggtggtgcgcgtttgtagttttagtttttttggaggttgaggtagaggaattatttgaatttaggaggtagatattgtagtgagttgcgattgcgttattgtattttagtttgaataatagagttagatttcgttttaaaaaaaaaaaaagaggaataatttttaaaatagtaaataaatttttgtagataggaaatataatggtagatatttgagttaggagagggggaatggggaattattatttaatggatatagttttagtttaggaagataaataagttttgggaataaatagtagtaatggttatataatgtgaaggtatttaatgttattgaatttaaagttggttaaaatggtatttgttatgtgaggtatattttattatttaaaaaattataggtgattgtgtttttaaaagagttattagtttaatttttaatagaaattaatggattttgtttatttttaataaagttaaaatatgtatacgaaaaggttatggggtaaaggtagaggtaattattttttttttcgaaaggtattttttataatgaatgtttttatgtaataaaaaatgaaatgataaaagtttagaatgtttgtgggttttgttttttaaatttttaattatataaattaatatttatattatatagattaagatatatattttttttttatttataatatttttttattttttgtattttaaattttgatattaaatgttattaaattttttaaattttaagagaacgatttggttattaaggaagatataatttatagtttagagagtgggcgaataaaagtagtttttaatgtttttaattgttttttttttgttaattaaatgtttttgtaaataatttatttttgttggttttgggtaagacgtgggagaaggaagaatttttgaatggaggagtttggaaaggatgtttgataaaacgttcgcgttttttggagacgtagttagtttttttttttttagggtttggttttgacgatagtatttcgtgttttggggatgtttttttttattagatttttttaaagtttagttgtatttatttttaagtgggagataaggtttttgttcgcgggttttgcgttcgtttattcggttttacgtttgttgtggattaaataggagttattggattagagtatatttgattttcggttttgcggattaaaaattttaggattaaggaatagtaaggttaggttgaaatagtttatatagggtttgcggtaaacgtttttttaggagttattcgtttagtgtagtaagtcgtgtatttagttgattcgagcgttttagggagacgttcgattttattttgcgtcgtttcggggtattagttttgttttttttaggtttattgaggtaggtacgtttagttttgggatagttagtaaataagttacgaatcgcgttagggattagagtatttagagttttcgtttagttgtcggtatagttaatcgtagcgtagttaggcggcggggcggtgtcggtcgaatttagattcgaggttttagaagtagagttaggcgaagttgggttagaatcgcgattttcgtaattttgagcggtattcgtggagtgcgtttgcgtagttacgatcgtagtaggaaagcgtcgtcggttaggtttagttgtggtcggatagggattggaagagaggacgcggtcgagtaggtgtgtattagttttggtaacgagagcgtttatttcgaattttgttggttttgaggtggggaagtcggggagggtagttgaggatttcgcggaggcgcgtgattggttgagcgggtaggttagttttcgagtcgggtggatataggtatcgtagttaggtcgcgtcgcgtcgatttagggtttggttcggttagatagggaagtttagttttcgtacgttagatagcggtatttttgttggcgttatcgtaaatattttttgatcgttatagttagtgtgtggcgtaggcgttatgttttcggttttgttacgtttggagttttggaagttggttgtagggcgttggtttttcgcgtgcggttatatgatttcgtttttgatttaggggagtagtttggggtgtcggtagtataggtttaagtgaatgaaggagggagtagtgcgtgtttttttttttagttttttttgggaaagtattttagaaaggttttatttaaggagaggttggggcggcgcggtggtttatttttgtaattttagtattttgggaggttgaggtgggcggattatttgaggttagtagttcgagattagtttggttaatatggtgaaatttcgtttttattgaaaatataaaattagacgggcgaggcggcgtacgtttgtagttttagttatttaagaggttgaggaagaatggtttgaattcgggaggtagaggttgttgtgagtcgatatcgcgtcgttgaattttagtttgggttatagagtaagattttattttaaaaaataaataaataaataaataaataaataaataaataaataggagagattggaaaatttattttagtttttggtgtttgttagttaggaagatgtgtgaaggttttttaatttttggggatttttttgtttttatttgggaattttattttattattagtgaggttttgtttgggtacgaaatttggattttttgcgattggtataaaatttggattaatcgtttttcggttttttagttgttgttttaagttttttatatataaggtagttttatatcgtttttataatttaaattgttatcgtataaattgttttagtttttatagttttggataggttgttttttattttggtgagtttatttagtatttttacgtgttttgtttttttttaggtatatttttggttttttttatagtttttgggtaaatgtttgggagaataatttaaatatttttattttattatggtggttttaattttttagggggtagtaagatggttttttaggattggtttaattagatttttatttttgttttttttttagg

SEQ ID NO: 514 - DNA, 6476 bp, Artificial Sequence
  chemically treated genomic DNA (Homo sapiens)
tttaggaagggaataaaaatgaggatttgattagattaattttaaaaagttattttattgttttttgaaaaattagggttattatggtagaataaaaatatttaaattatttttttaagtatttatttaaggattgtggaagaggttaaggatgtgtttggagaaaaatagggtacgtggaggtattggatggatttattaaaatgaaaagtagtttgtttagagttgtaggagttgaaatagtttatgcgatgataatttaggttatgagaacggtatgaaattattttgtgtgtgagaagtttaaggtaataattaggaaatcgggaaacggttgatttaggttttgtattaatcgtaaaaaatttaggtttcgtgtttaggtaaaattttattaatgataaggtgggatttttaagtagggataaagagatttttaagagttaggaggtttttatatatttttttgattaataaatattaaaagttgagataagttttttaattttttttatttatttatttatttatttatttatttatttatttattttttgagatggagttttgttttgtggtttaggttggagtttaacggcgcgatatcggtttatagtaatttttgtttttcgggtttaagttatttttttttagttttttgaatagttggaattataggcgtgcgtcgtttcgttcgtttaattttgtatttttagtagagacggggttttattatgttggttaggttggtttcgaattattgattttaggtgattcgtttattttagttttttaaagtgttgggattataggagtgagttatcgcgtcgttttaatttttttttaaatgaaatttttttgaaatgtttttttaggaaaaattgggaaggagagtacgtattgtttttttttttatttatttgggtttgtgttgtcgatattttaaattgtttttttaaattagggacggggttatatggtcgtacgcgggaagttagcgttttgtagttagtttttagggttttaggcgtggtagggtcggggatatgacgtttgcgttatatattggttgtagcggttagaggatgtttgcggtgacgttagtaggagtatcgttgtttggcgtgcggggattgagtttttttgtttggtcgggttaggttttgagtcggcgcggcgcggtttggttgcggtatttgtgtttattcggttcggaggttggtttgttcgtttaattagttacgcgttttcgcggggtttttaattgtttttttcggtttttttattttaaggttagtagagttcggggtagacgttttcgttgttagggttggtgtatatttattcgatcgcgtttttttttttagtttttgttcggttatagttgggtttggtcggcggcgtttttttgttgcggtcgtagttgcgtaggcgtattttacggatgtcgtttaaggttgcggaggtcgcggttttggtttagtttcgtttgattttgtttttaaaatttcgggtttgggttcggtcggtatcgtttcgtcgtttggttgcgttgcgattggttgtgtcggtagttgggcggggattttgggtgttttgatttttggcgcggttcgtggtttgtttattgattgttttagagttgggcgtgtttgttttagtggatttggaggaagtagagttggtgtttcggggcggcgtagagtagggtcgggcgtttttttggagcgttcgagttaattaagtatacgatttattgtattgggcgagtggtttttgaaaagacgtttatcgtaagttttgtgtggattgttttagtttaattttgttattttttagttttggaatttttggttcgtagagtcgagagttaagtgtattttagtttagtggtttttgtttagtttatagtaaacgtggggtcgggtggacgaacgtagagttcgcgggtagaagttttattttttatttaagggtgggtgtagttgggttttagaagaatttggtaaggaaaggtatttttaaaatacgagatgttatcgttaagattagattttaggagggaggagattggttgcgtttttagagagcgcgggcgttttgttaagtattttttttagatttttttatttagggattttttttttttttacgttttatttaaaattaatagaaatgagttatttatagaaatatttggttgataggagaaaagtagttgagaatattagaagttgtttttattcgtttattttttaggttatggattatattttttttggtaattaagtcgtttttttgagatttaagaaatttaatgatatttaatgttaggatttaagatatagagaatggagaaatgttgtagatagaggaaaaatatgtattttaatttgtataatgtagatattaatttatgtaattaaggatttaaggaataaaatttataaatattttaaatttttgttattttattttttattatataaaaatatttattgtagaaaatatttttcggggaaaaaaataattatttttgtttttattttataattttttcgtatgtatattttgattttgttaaaaatgaataaagtttattgatttttattgaagattaaattgataatttttttagaagtataattatttatagttttttaagtggtaaaatatattttatatagtaagtattattttaattaattttgagtttagtagtattaagtatttttatattgtgtaattattattattgtttatttttagagtttgtttatttttttaaattgaaattgtatttattgaataatagttttttatttttttttttttagtttaggtatttattattatattttttgtttgtaggaatttgtttattattttggagattatttttttttttttttttttgagacggagtttggttttgttgtttaggttggagtgtagtggcgtaatcgtagtttattgtaatgtttgttttttgggtttaagtgatttttttgttttagtttttagaggagttgggattataggcgcgtattattacgtttggttaatttttgtatttttagtagagatggggttttattatattgattagattggttttgaatttttgatttcgtgattcgtttgttttggttttttagagtgttggaattataggtgtgagttatcgtgttcggtcgattatttttttttttatgtattgtttttttggagaattagttataatgtgtagaatataatttaattgtgatatttgttttagttttttttttgttgttaataatagaatatttggaattgtgtaatttatgagaataatatttattttttatagttttcgaggttgggaagtttgaggtttaggaagtgtattttgtgagggtttttttgtttgtggggattttttgtagaggtttaaggtggtgtagggtattatagggcgagagggttgagtgttttagtttaggtttttttttttttttttaaagttattagttttgtttgggcgtagtggtttatatttgtaattttagtattttgggaggtcgaggtagttagattatttgaggttaggagtttgagattagtttggttaatagggtgaaattttgtttttattaaaatataaaaattagttaggcgtggtggtgtatatttgtaattttaggtatttgggaggttgaggcgggagaattatttgaatttgggaggtggaggttgtaatgagtcgagtcgagattacgttattgtattttaatttgggtgatagagcgagattttattttaaaaaaaaaaaaaaaaaaaaaaaaagttattagttttatttttaagataatttgttggtttatgaatttattattttatgaatagattaatgtatttattagggaagagtttatatgttttaattattttttaaaggttttatattttaatgttgttatattggagataagttttaataagagttttggagggggtaaataaggaaattatagtagtatttaaatttattattttatgaaataaaaataatatttttgtggtgttaggtaattggagtatttacgtttgttttggttttaattttgtagattttaggattataagaagtttattggaatagttgaatgtttttatcgggggtttagagtttatttggttttttatgagttttttattggggagtgtgagagaaattgtttagatggtttttttttttttaaatttgaaagagaaagagagagagttgtgagtgagtggttttgttttttagtatttgtttagtgaagagttttagaatttggattgtggttttttagttttgaggaattttattcgttattaggaggggtggtatgtttatttcgttatttaggaaggaattggaaaataaataatcgagggtgtgaggttaagagttagaaaatcgtaagtttttggtatttgagttagggtagatgttgggagtatttgtaggatatttttatattttgttattttggtatttattagtttttgagaattgaagtcggattttttttttgtttgagtagaagattagattaaagagtttattgatttaaggagtattatggtaattgggttgtattcggaggggaagaatttagggtttgatttataattaaggtttgaagaagtggggtttgtatttgatttatttagggtgagttatgatttaagtgttggggttttagttatgggtggtttttttaattatttttagtttttttttgtagaggggttggtgtttttttttattttttataatttttttgggagtataggttttggtttttgttttttttggattaggttttttataatgtagttgttttaataaaaattattagtaataatatagtattatagaagttagttttttgttagtagtgattgttgatgatattgttttttagagattattttaatgattagatagtttcggtgtaggaggagttgttgtcggttatgaggagtatttttttgtttatgtagaggaattgaaatcgatgtggttagtaaaatttatttaaagtaattattgggatatttattatatttttatggtttattgtattatttttgttttttatatatgtggttttatttttttaggattagtatttttttatgtggggagtaggattgatgttttgagttatttatagtgattcgttagttgggggatttgttagtatttttattaaatttgaatttagtgaaatatttgattgaattggtttttaaattgaaaataaattaatattatttaggaaatttatttatagcgagaagttaggagtgggaatgtattttgtattgttattttgattaataatagttttgatttgtgggaggacggtttttttttttgtaataaatatagggtagtgatgggttaggttttgttgtttttatatttttattatttagataagtataggtaggtgattgtaagttttttagtttttattagtattttttagtttttttttgatcgtttttatttatatttcgtattgatttagaggtttagttttgagtggtaaaaagaaatatgcgtgagtttttttagaaattaattaattatttatggattatagtgaatttttttttattaaatatatttttagaaatttaggcgtagtaattttttttttgaatgtttttttaaggttttaagtgatattgatgttttatagataatgttttatacggtaaagtgtttttgggggtgggaatttgttgattttttttggaattttgattgtaggttttgtttagaatatggggttttattttgagaagtttttggtatttattatttacgggaagtttataggttttagaaaatattggatagtatttaggggaaagaaaaggggtagagatggagatatttggttagtttggttagagtattttgggggaaatgtattgagggatagaggggtaaatgtatatgggtggtggggagaggagtaacgtagatagtaaagatattgtttagataattttttaatttaggagaagggattgaatttaagaggagaagaggagggatgaggttgggtgttgaggtatgttttaaagtttttgaagtttgaaaattagatattcgtagatttgattttggtgttttgatagaaaaataaaaataatgttagttataatttttaaaggtttttatattttgggaaataagttttttatttgaggttagatttagttttttttttttgaaatatgtttaatttatgatttttatttaatttagattttttagttttgtaataatttaagttggttgatttagttttgtaggtaggtaggtaggtaggaaggaaggaagaaaggagggaaaagaaggaaggaaggaaggaaagaaatagtaaaagaaaaaaaaggaaagaaggaaggaagaagattataaa

SEQ ID NO: 515 - DNA, 11790 bp, Artificial Sequence
  chemically treated genomic DNA (Homo sapiens)
attttggatttatataaatgttttatataattataaaatgaaattatataagtgtaaaaagtaagttttaaaaggaagaagtgaaatgaaataaataaatttgtgtatggaggtggagtataattatatagggaattattttaggtgattttaaaatatagtaattgatttatatcgttagcgatatttggtttaatggagaaaaatttgtttttttttattttaaaatttttaatttgtttttattaataattttattggcgtaggtttgttgttgttattttgtaattttataggataaattaaataagtatttgagttgatattttagagaatttagattttttaagtatgtttgaaaagaagtgtagatataagattgatggggtgagtaaattttatagttttgaatttgaatttgaagtattagtgttagtttgtgatttatttaatttttttaaaaaagatattttttagttttagttattgaaaaggtttagtaataatggttaatttgttattttaaatattgttagtttttagattatggtatttaaatattgtttttattaaaaggaattagagttttttggagaaatggttgattttaggtttggggtaggaattgtttaagataaatttgtaatagtttgttatattagaaagaaaggaagtttttaaagagtattaatattatgttaaatatataaattttgtttgtattaaagagttagtttgaataaatttttatagattaaaaatgagataatatgagtattaataaggataaaattggaatggattgaaatatattaaatatgtttaaatttatgaatttataatgatataaatataatttaatggttttataatatatggagtttatttaaattttaatttaaataaattattaaaaaatgtataagatagtttagaaaatgtgaatattgataggatgtttgatgatattaagaaattattgttttaattttttatgataataaagtggtttatatttgtaaatttagtatttagggaggttgaggtgggtagattatttatggttaggagttcgagataagtttggttaatgtggtgaaattttatttttattaaaaatataaaaattagttgggtgtgatggtatatgtttgtaattttagttatttgggaggttgaggtaggagaatcgtttgaattcggtaggtagagattgtagtgagttgggattatattattgtattttagtttgggtaagtgagtgagattttgttttagaaaaaaaaaaaaaagaaaattattgtttatttattttagatgtgatgatggtattgtggtattatatttgtttaatagtttttgttttttaaagatatatatagggatatttacgtatgaaatgatagaatgtttagaatttatttaatataatttaggtagtgagagtgggaatataaataaaataagattggttatgtattgattattgttgaaataagataatggttttacggtagtttattttattattatttttatttttatatgtgttttaaattttttataagtagtatttttttaaaaaaaattgtatggttataaatataaatatgtttattatagttgagatgaattaatattataatgatgttatttttttttaaatttatgtatatatttaaataaaaattttaatagttagatgtgggggtttatgtttgtaattttagtattttaggaggttaaggtgggtagattgtttgagtttaggagtttgaggttagtttgggtaatatggtgaaattttttatttataaaaaataaaaaataaaattagttaggtatggtggtgtgtatttgtagttttagttattttagaggttgaggcgggaggattatttgagtttaggaggttaaggttgtagtgagttatgattgtattattgtattttagtttgggtgatagaatgaaattttgtttttaaaagaaaaaagtaaaaaattttaatagagttttttagggaatttgataaattgatttaaaaaatttatataaagaagagttaataagtataaaatataaagataatgtttaaaaagaagaataaagatagggtggtttagatgatttgttttattatacgtggagatatattataaagttgttttaattaaaattgtgtgatattgaagtagtaaaagataaaaagaatagttttatgagtttagaaattgatttatttatgtatgagaatttggtgtataatagaggtagaattaaaattggaaaataaagaaaataagttttttacgttatattatatataaaattaaattttaggtgaattaaatatttaaaagtagtagttatagaaaagataaataaaatattttttgaaagtataaaaataagatgagtgtatttttattatatttggatgaggaaaatttttttatataaaaatagtatagattgattatacggaaaagttgaataaaatgttttattttaatataaaaaaattttatatagaaaaatttattataaataagattaaaggataagtggaattttataggtttatgtaaaggaagaaaaaataaaataaaagataagtggaagattaagggaggatgtttttaagggtatataattgttaaagattagaagttagaatatatttttaaaatatatatattttggtcgggtacggtggtttatatttgtaattttagtattttgggaggttgaggcgggtggattacgaggtgaagagtttaagattagtttggttaagatggtgaaattttgtttttattaaaaatataaaaattagttggatatgttggtaggtgtttgtaattttagttatttgggagtttgaggtagagaatcgtttgaatttgggaggtggatgttgtagtgagttaagatcgtattaatgtattttagtatgggagataaagtacgatttcgtttcggaaaatatataatatatatatatatatatattttttataaattattaagaaaatgtaataatataatagaaaaatgagtaaaaaagatgaataggaaatttatagaaaatttaaacggttaataaatgtgtgaaaagatttttaattttattagtaattaggaaaatgtaaatttaaaagatgatagttcgttttgtttttattttatttaggtaattatttttaattggatatatttgagtgtatttttttttttatgaatatattaatatatatatatatatatatatatatatacgtatattattaaattatatatatagtatatattaataaagatattttgagtttgatgaacgaaggaatggttgagtgagaattagataatattagattatgaatgagttgtgttaaaagtagtaagataggtttttttaggaaattatataaggagttgggatttggggagttttatttaaatttttttataattaaatgttttttatgtaaaagttggtgtttttaaaatttaatttaattttttttttgagatagggttttgatatgttatttaggttgaaatatagtggtataattatggtttattgtagttttgtttttttagatttaagtaatttttttattttatttttttttttagttgggattataagtatgtattattatgtttagttaattaaaaaaaatttttttgtagagatagggttttattatattgtttaggttggttttgaatttttggttttaagtgattttttcgttttagttttttaaagtgttgggattataggtatgagttattgggtttagataagggttttttttgatggtttattgtatttattttgtttttaagattatagggaaatgattagaggtgattgtattagttagattttaaatgaaattgaaatgaaagtttatttttttattttgagtattttatgtgataagttttaatttttttttaagttaattgaattgaaatttttttgttgttttgaaattttagaagagagtttattaatttaaggatttttattgtgggagtaattgttggttttattacgtatgtattttttgtttttttttttttatttggtttttaaatattttgtgtttgtaatttgttttgtttgttaggttttaaatttttggttttaggaagtaaattaaaaaatcgtgtcgtttaatttgttttttttttatttttaaaaagttaatgtttgtttgagtatttaagtatttaagttgagattgaaatatggttttttttggaatataatttaaaggtttatatgtttaaaattttagatgtttttaattaaaaagaaatggaaaagaaagtagaatttagtttgagggagttagtcgttgaatttttgttgatgttttttgaattaaatatagaagtggtattttaaagagtagttaattgttttatttgaaatagatgtttgattattaaaaaaaaaaaaacgtaaaaaggaaaattatttatttaaagatgtgaaagtaatagatgagaattgttttttaattatttgtaaagattgtggatatttaaataggttagttaagaagagtttatgtatttaaaaatttaggagataaattgattttttagaggtttgttttttttaaggatgatttttttttttttttgagagagagagaaagagattttttttgattagatttgttggtaaattttggaaagtttttgttttttaattttttagatgtgtttggtttattagatattgggaaatttttggaaattattttttaaagtgttattaagtattggaagtagtatttttgatataaatttgtagttgttttttgtgattatatattttaggaatttttttgtataattttgtttataatagtttgtttttttgatagattttgtattgttatttttttttatgaaaatatgtggttataatatatgtagttaatagtaatattttttatgttatttttttttatatagaatgaaacggttggtttgtgtgtttttggtgtgtttttttgtagtggtatagttgtataaagattttattttggattattattggtatttttggaagaaaatttatggtaaataatataaggaaaaggtagattggattgttattcgagcgatatgtttttaaaggagtattgttttttattttttaaaattgtgtttttataggtagtgtttttagtaaatatttaagttgggtgtggtggttcgcgtttgtaattttagttttttggaaggttaaggtgagcggattatttgaggttaggagttcgagattagtttagttaatatggcgaaattttatttttattaaaaatataaaaattagttggatgtggtggtgggcgtttgtaattttagttattcgggaggttgaggtaagagaattatttgagtcgggaaggcggaggttgtagtgagttaagattgtgttattgtattttagtttgggtgatagagtgagattttattttaaaaataaataaataaatattatgtatttgttttttgttagatattgtttttggtattatatagtaggaattaaaataaaatttttgttatggagtttatattatagtgagagagataggaaataagaaaataaataagtagatatgtagtatgttagatggtgataagtgttgtagataaaaataatagaaggtatggagagtaggaagggttttgggtggtggtggtggtaagaagtttatttatatgataggagggttagggaaggttttacggataagggtgttatttgagtagagaattgatggaagttagggagtaagtaaaatatataatagagtgaaggttttaggttaagggtaaattagtataagtttttgaggaagggttatatttgggatggttgaggagcgaaaaggcgttaatatttatatagtgtggttagatattgttttttgattattattttttattttgtatttttgtttttattttaaagtatatttgttgatgttaagattttaattttattgttttaaataattaagttttgtaattatgtaatatttttgtttgtaagttagtattatatatttatttatttgatatattattttgtataaaaatgatatttttaggttatatattttaagttttatttttatttatttataattaaataataattgtgtttatttatggagtataatgtgatgttatgatataaatatatattgtagaatgattaaattaggttaattaatttatttagtattttatatatttatttttttattgtgataagaatatttaaaatttatttttttagtaattttgatatataaaatatattattattattatttgtagttattatgttatgtaatagattgttagaatgtagtttttttgttaaatgaaattttgtattttttgtttaatattttttttttttttgtttatttttcgtttagtttttgttaattattattttattttttatttttatgagtttaattgttttagattttatatgtaaatgagattatgtagtatttgtttttttgtgtttggtttattttatttagtataacgttttttagatttatttatgttgttgaaaatgatagaattttttttttttttttttaaggttaaatagtattttattatgtatggaatataatatgtattatatttttttatttattcgttttttaatggatattttataaggttgatttcgtattttggttattgtgaataatgttataatgaatatggaagtgtagttattttattgatatattgattgcgtttttttgggatatatatttagaagtgagattgttggatgatatggtaattatatttttagttttttgaggaatttttatattgtttttttaaatggttgtattaatttatatttttattaaaagtgtatgagggtttttttttttttatatttttattaatatttattttttatcgttttgataatagttattttaatagatgtgaggtgatattttattgtggttttattttatatttttttgatgattggtgatgttaagtatttttttatatatttgttggttatttgtatgtgttttgttttgagaaatgtttatttaggttttttgtttatttttaaatagggttgtttttttgatagttattttgagttttttttatatttgggatattagttttttattaaatgtatgatttgtaaatatttttttttaatttatgagttatttttttattttgttaattgttttttttattgtacgaaagttttttagtttgatggagtttcgttcgtttatttttgttattgttgtttgttttttaggggttatatttaaaaaatcgttgttcggattaatgttgtggagtttttttttatatttttttatagtggttgtatatagttttaggttttatgtttgtgttttaatttattttgagttgattattgtatatggggtgatataagggtttaattttatttttttgtatttggatagttagtttttttaatattatttattaaatagattattttttttttattgtgtgtttttggtatttttgttgaaaattgattgattataaagttgtaggttatttttgggttttatattttattttattggtaaatgtgtttgtttttatgttagtattatgttgtttaaattattatagttttgtaatatattttgaaattaggtattttgtaatgtttttagttttgttttttttgttaaagattattttgattatttaaggatttttgtagtttcgtatgaatttgaggattgttttttttatttttgtgaagaataatattagaattttgatagaaattgtattgaatttttagtttgttttggatagtatgaatattttagtaatattaatttttttaatttataagtatggaatatttttttatttatttattttattttaaatttttttttttttttttttttttttttttgtttttttgagatggaattttgtttttgttgtttaggttggggtgtagtggcgtgatttttgtttattataatttttgtttttggggtttaagtaatttttttgttttagttttttgagtagttgggattataggtatgtgttattacgttcgggtaattttgtatttttagtagagtcggggtttttttatgttggttaggttggttttaaattttcgattttaggtgatttgtttgtttcggttttttatagtgttgggattataggtgtgagttattacgttcggtttattttgtttttagttttttttattaatgttttatagtttttagtatataattttttaattttttggttaaattaatttttaaatatgttttaaatgttgttgtaaatagaattgtttttttaattttttttttaaatagttgttagtgtataaaaatattattgatttttgtatgttgattttgtgttttataattttattgaatttatgtattagttttaatagttttttgatggagttttttttttttttttttttttttttttttttgaggcggatttatgttttgtcgtttaggttggagtgtagtggcgtaatttcggtttattgtaattttcgttttttaggtttaagtaatttttttgttttagttttttgagtagttgggattatcggtatacgttattatatttagttaatttttgtgtttttagtagagatggggttttattatgttggttaggttggtttcgaatttttgattttatgattaatttattttggttttttagagtgttgggattataagtataagtcgttttgtttaattttttttttttttttttttgagatgagattttgttttgttatttaggttggagtgaagtggtgtgattatagtttattgtagttttaaattttagtttaagtgatttttttgttttagttttttaagtaattgggattgtaggtatatgttattatatttggttaatttttatttttgttttttgtagagaaggggttttgttatgttgtttaggttggtgttgaatttttagatttatataatttttttattttaattttttaaagtataggtatgagttattatatttggttaagattttttatatgattatgttattaataaataaacgtaattttatttttttttttttttatttggagattttgtatttattttttttgtttaattgttttggttaggatttttagtattatattgattagaaatggtgagagtgggtatttttgtttttttttgattttagtagaatggtttttaaatttttatttaattgagtatggtgttagttgtagttttgttatatatggtttatttgtgttgaggaatattttttttatatgtaatttgttgagaatgtttgttatgaaaggatgttgaattttgttaaatgttttttttgtatttatttaaatgattatacggtttcgttggtggtgatgaattttatttttatttatattttttatgaataggttttttattttaagattgattggatttagatgtgtaattagtattattatttggttaaatgaatgttatttttttgtttaataattttagttttttaggatgaatgaatttgatttttgattcgtattttatttttataattgattttaaagtgtatttttttttttttttttttttttttgtatttagttagatttgtttgtttttatattattgttttttattttgtggtttggaagtaagtttattatgtatgtttattatgtttattattggggtaatagtaaaattttgttttaagggaaagaaatttgtatttagatttgttatttagtgtttttgggattgggtttattcgtttaatgaaatgaggtagaatatagttgttgttgattgttttttggggttttagtttattggaaattttggttttagttattgtaggaggtattatttattttgttttttatattattgtattttatgtaaatgaattttttgaaggataagaaaatcgtcggttagtatgtaaatttattttgaataaaattaaaataatagaattaaaaatgaatttttaaaagattatatataaaggaataatatgtatattaatggataagaaataaattagaaattttgaaaataaaaaatattgttattgcgataaaaattaaaaggatttttagattggaaagagttggatagaattagtaatttgaaagatagtattgaggaatttatttagaatgtagtatttagaaataaaaagaaaaatatatgaaaacgtaagtaagagagatgaaagagagtttgaggttttaaaatatttcggataggagtttttgaagaagagaattaggtggaatggtggagaagtaatatatgtggagatattgattgagaattttttagatatgagaaaaggttttgagttttttaattaaaagtatatagtcgaaggtaaataaagaaatttatatttagatatatgtaacgaagttgtaaaatattaaaaagaaagagtaaattatggttgggtgtatggtttatgtttgtaattttagtattttgggaggttaagggggaaggattttttaaggttaggaatttgagattagtttaggtaatatagggagattttgtttttataaaaaaaaaaaataataataaaataaaaataaaaataagttggttgtggtggtgtaggtttgtagttttagttattcgggtagttgagatgggaggatagtttgagtttaagagtttgaggttgtagtgagttatgattatattattgtattttagtttgggtaaaagagtaagattttgtttaaaaaaaaaaaaaaaaaatgttgggcgcggtggtttatattaataatcgtaggattttgggaggttgataggggaggattgtttgagtttaggaatttaatatgagtttgtaatatagggagatttagtttttattaaaataaataaataaataaatagaaaaattggttgtagtggtatatattagttattttagttatgtaggaggttgaggtgtgaagattgttgggttttaggaggttaaggttatggtgagtagtaattaggttattttattgtattttatttagtcgagtgatagagtaagattttgttaaaataataataataataataataaatgttaaaaagagaaggaaatttatgtttattataaaataatattaaattattaaagtagttaagagtaagaattaagattaatatgtgaagttagtagttatattggatatatttatgtatttgtatgttttcgggtagatttatatttggtagaatgttttaaaaatgttatttttgggcgggtgtagtggtttatatttgtaattttagtattttgggaggttgaggtaggtagattttttgaggttaatagtttgagattagtttggttaatatgacgaaatttcgtttttattaaaaatataaaaattagttaggcgtggtggtatatgtttgtaattttagatattcggaaggttgaagtaggagaattatttgaatttgagaatcggaggttgaagtaagttgagatcgtgttattggattttagtttgggtgatagagtgagattttattttaaaaaaaaaaaaaattgttatttttattattaaatatttatttgtttaggatgtagtatgattatgtttttttttattatgttttaga

SEQ ID NO: 516 - DNA, 11790 bp, Artificial Sequence
  chemically treated genomic DNA (Homo sapiens)
tttaaaatataatgaagaagaatatagttatattgtattttggataaataagtgtttgatgatgaaaatggtaattttttttttttttgagatggagttttattttgttatttaagttggagtttaatggtacgattttagtttattttaattttcgatttttaggtttaagtgatttttttgttttaatttttcgagtatttgggattataggtatgtgttattacgtttagttaatttttgtatttttagtagagacggggtttcgttatgttggttaggttggttttaaattgttgattttaggggatttgtttgttttagttttttaaagtattgggattataggtgtgagttattgtattcgtttaaaaatagtatttttgaagtattttattaaatgtggatttgttcgagagtatgtaaatatataaatatatttaatataattgttaattttatatattaattttaatttttgtttttaattgttttgatggtttaatattattttatgataaatatgaatttttttttttttttaatatttattattattattattattattttgatagagttttgttttgttattcggttggatggagtgtagtgaagtggtttgattattgtttattatagttttgattttttgggatttagtaatttttatattttagttttttgtatagttgggatgattggtgtgtgttattgtagttagtttttttgtttgtttgtttgtttgttttggtagagattgggtttttttatgttgtaggtttatattgaatttttgggtttaagtaatttttttttattagttttttaaagttttgcgattattggtgtaagttatcgcgtttagtattttttttttttttttttagatagggttttgtttttttgtttaggttggagtgtagtggtatgattatagtttattatagttttaaatttttgggtttaaattatttttttattttagttgttcgagtagttaggattgtaagtttgtattattataattagtttatttttatttttattttattattattttttttttttgtagagatagggtttttttatgttgtttaggttggttttaaatttttggttttaaaggattttttttttttggttttttaaagtgttgggattataggtatgaattatatatttagttatgatttgttttttttttttgatgttttataatttcgttatatgtatttgggtgtaggtttttttatttattttcggttgtgtgtttttgattggaggatttaggatttttttttatatttggaaaatttttaattagtgtttttatatatattgtttttttattattttatttaatttttttttttagaaatttttattcgaagtattttggagttttaaatttttttttattttttttatttgcgtttttatatatttttttttttatttttaggtgttgtattttgggtgaattttttagtattattttttagattattgattttatttagttttttttagtttggaaatttttttgatttttatcgtaatgataatattttttatttttaagatttttaatttattttttgtttattagtgtgtatattatttttttatatatagttttttgaaaatttatttttgattttattattttaattttatttagagtgaatttatatgttgatcgacgatttttttgttttttaggagatttatttatatagaatataatgatgtagaaggtaaggtggatggtgttttttatagtagttgaagttagagtttttaataagttggaattttagggagtagttagtaataattgtgttttgttttattttattgagcgggtgagtttagttttagaggtattgggtagtaagtttggatgtaggttttttttttttggagtaaggttttattgttattttagtaatggatataatgggtatgtatgatgggtttatttttaaattataagatgagaagtaatggtataaaggtaaataaatttaattaagtgtaagaaaggaaaaaaaaaaaaagaagtgtattttgagattaattataaaggtaggatacgaattaaaagttaggtttatttattttgagggattggaattattaaatagagggatagtatttatttaattagatagtggtgttaattgtatatttaagtttagttaattttgaaatgaggaatttgtttataaagggtgtgggtgagggtgaaatttattattattaacgaaatcgtatgattatttaaatagatgtaggaaaagtatttgatagaatttaatatttttttataataaatatttttaataaattatatatagaaggaatgttttttaatataaataggttatatatggtaagattatagttaatattatatttaattgggtgaaaatttaaaggttattttgttaagattagaaaaagataagggtatttatttttattatttttagttaatatagtgttgaaaattttagttagagtaattaggtaagaaaaataaatataagatttttaaataagagaaggaagaagtgaaattgcgtttgtttgttgataatatgattatatagaaagttttggttaggtgtggtggtttatgtttgtattttgggaggttgaggtgggaggattgtgtgaatttaggagtttaatattagtttggataatatggtaagattttttttttataaaaaataaaaatagaaattagttaggtgtggtggtatgtgtttatagttttagttatttggaaggttgaggtaagagaattatttgagttggagtttgaggttgtagtaagttatgattatattattttattttaatttgggtgatagagtaagattttattttaaaaaaaaaaaaaaagaaggttgggtaaggcggtttatgtttgtaattttagtattttgggaggttaagatgggttgattatgaggttagaagttcgagattagtttgattaatatggtgaaattttatttttattaaaaatataaaaattagttaggtgtggtggcgtgtgtcggtaattttagttatttaggaggttgaggtaggagaattgtttgaatttgggaggcggaggttgtagtgagtcgagattgcgttattgtattttagtttgggcgatagagtatgaattcgttttaaaaaaaaaaaaaaaaaaagagagaagaaagattttattaaaaaattattagaattgatatatgaatttagtaaagttgtaagatataaagttaatatataaaagttagtagtatttttatatattaataattatttgaaaaagaaattaggaaaataattttatttataatagtatttaaaatatatttaggagttaatttaattaaggagttgaaaagttatatgttgaaaattgtaaaatattgataaaagaaattgaagataaaataggtcgggcgtggtggtttatatttgtaattttagtattatgggaggtcgaagtaggtagattatttgaggtcgggagtttgagattagtttgattaatatggaaaaatttcgattttattaaaaatataaaattattcgggcgtggtggtatatgtttgtaattttagttatttaggaggttgaggtaggagaattgtttgaattttagaagtagaggttgtggtgagtagaggttacgttattgtattttagtttgggtaataagagtaaaattttattttaaaaaaataagaaaaaaagaaaaaagaaagaaagaaatttaagataaaataaataaatgggaagatattttatgtttatggattggaagaattaatattgttaaaatgtttatattatttaaagtaaattagaaatttagtgtaatttttattaaaattttaatgttattttttatagaaatagaaaaaataatttttaaatttatgcggaattataaaagtttttaaatagttaaagtaatttttagtaagaggaataaagttggaggtattataaaatgtttggttttaaaatatattataaaattatagtaatttaaatagtatagtattggtatagaaatagatatatttattaatggaataggatatagagtttagaaataatttgtaattttatggttaattaatttttagtaaaggtgttaagaatatataatggggaaaggatagtttgtttaataaatagtattgggaaaattggttatttaaatgtagaaaaatgaaattgaatttttatgttattttatatataataattaatttaaaatgaattaaagtataaatataaggtttgaaattatatataattattataagaaaatataggggaaaattttataatattggttcgggtaacggttttttgaatatgatttttaaagaataggtaataatagtaaaaatagacgaacgggattttattaaattaaaaagttttcgtataataaaggaaataattaatagagtgaaaagataatttatagattgggagaaaatatttgtaaattatatatttgataaggggttaatattttaaatatagaaggaatttaaagtaattattaagaaaataattttgtttaaaaatgggtagaagatttgaatagatattttttaaaataagatatatataaatggttaatagatatatgaaaaaatgtttaatattattagttattagggaaatgtaaagtaaaattataatgagatattattttatatttgttagaatggttattattaaaacgatgaaagataagtgttggtgaggatgtggagaaaagggaatttttatatatttttagtaggaatgtaaattagtatagttatttgggaaaatagtatggaggttttttaaaaaattaaaaatataattattatattatttagtaattttatttttgggtatatgttttaaggaagcgtaattagtatgttaatgagatagttgtatttttatgtttattgtagtattatttataatagttaagatacggaattaattttataaagtgtttattaaaagacgaatggataaaaaagtgtggtatatattgtattttatatataatggaatattatttagttttaaaaaaaaaaaaaggaaattttgttatttttaataatatggatgggtttagagaacgttatgttaagtgaaataagttaggtatagaaagataagtattgtataattttatttatatgtggaatttaaaatagttgaatttataaaagtagagagtagaatggtggttagtagaggttgggcggagggtagatagggaaaggggagatgttaggtaaagagtatagagttttatttgataagaagattatattttagtaatttattgtatagtatggtgattatagataataataataatgtattttatatgttaaaattattgaaagggtagattttaaatgtttttattataatgaaaggataagtatgtgaggtgttgaataggttaattagtttaatttaattattttgtaatgtatatttgtattataatattatattgtattttataaatagatataattattatttaattataaataaataaaaataaaatttagagtgtatgatttaagagtgttatttttatataaaataatatgttaaataaataaatatatgatgttagtttataaatagaaatattatatagttataggatttagttatttaaagtagtagggttaaggttttaatattagtaagtgtgttttgaaataaaaataaaagtataaaatgggaagtgatagttaagaaataatatttggttatattatgtgggtattaacgttttttcgttttttagttattttaaatgtggtttttttttaggagtttgtgttgatttgtttttggtttgagatttttattttattatgtattttgtttgttttttggtttttattaattttttgtttaaatggtatttttattcgtgaggttttttttaatttttttgttatatagatagattttttattattattattatttagggttttttttattttttatgttttttgttatttttatttataatatttattattatttagtatattatatatttgtttgtttatttttttattttttgttttttttattataatataagttttataataggaattttgttttgatttttgttgtatggtattaagaatagtatttggtaagaaataagtatataatatttatttatttatttttgagatggagttttattttgttatttaggttggaatgtaatggtataattttggtttattgtaattttcgttttttcggtttaagtgatttttttgttttagtttttcgagtagttgggattataggcgtttattattatatttagttaatttttgtatttttagtagagatggggtttcgttatgttggttaggttggtttcgaatttttgattttaggtgattcgtttattttggttttttaaagggttaggattataggcgcgagttattatatttagtttaaatatttattgaaaatattgtttgtaagaatataattttaagaggtagaaaatagtatttttttaaaagtatatcgttcgagtggtaatttaatttattttttttttgtattgtttgttataggtttttttttagagatgttagtggtgatttagggtaggatttttatgtaattgtgttattgtagaggagtatattaagagtatataaattagtcgttttattttgtgtaaggaaaggtaatataggaagtgttgttattagttgtatatgttgtgattatatgtttttataagagaaaataataatgtaaagtttattaaagggatagattattataaatagaattatataggaaaatttttgggatatatagttatagggaatagttgtagatttatgttagaaatattatttttaatgtttagtagtattttaaaaagtgatttttaggaattttttaatatttggtaaattaaatatatttagagggttagaaaatagggattttttaggatttgttaataaatttaattaaaggaaattttttttttttttttttaaaaaaaaaaaaaaattatttttaagagagataaatttttgaaaaattagtttattttttgaatttttgaatatatgggttttttttaattgatttgtttaaatatttatagtttttatagatagttaaaagataatttttatttattgtttttatatttttaggtaggtaatttttttttttacgtttttttttttttaatgattagatatttgttttaaatgaggtaattaattattttttaaaatgttatttttgtatttaatttaagagatattaatagaaatttagcgattagtttttttaaattggattttatttttttttttatttttttttaattgaaaatatttggaattttaaatatgtaagtttttaaattatattttaaagaaagttatgttttagttttaatttagatgtttagatgtttaagtagatattaattttttaaaaatagagaagaggtaaattgaacgatacgattttttagtttattttttgaaattaaagatttaaaatttagtaggtagaataagttataaatatagagtgtttgaagattaaatgggagaaaaagaataaagagtatatacgtgatagaattagtagttgtttttatagtaagagtttttgaattagtgggtttttttttaagattttaaagtaataaggagattttagtttaattgatttgaaaagaaattggaatttgttatatgaggtatttaaaatgaggaagtgaatttttattttagttttatttaaaatttagttagtatagttatttttagttatttttttatggttttggggataaagtggatatagtaagttattaagaagagtttttgtttgagtttagtggtttatgtttataattttagtattttgggaggttgaggcgggaggattatttgaggttaggagtttaagattagtttaggtaatatagtgagattttgtttttgtaaaaaaattttttttaattagttgggtatggtggtgtatgtttgtagttttagttgagggggagggtgaggtgggagaattgtttgagtttaggaggataaggttgtagtgagttatgattatgttattgtgttttagtttggatgatatattaagattttattttaaaaaaaaaattaaattgaattttaaaaatattaatttttatatggaaaatatttagttataaagagatttagataaagttttttaaattttagttttttgtatgattttttaggaaaatttgttttattgtttttaatataatttatttatgatttgatattgtttggtttttatttagttattttttcgtttattaaatttaaaatgtttttattaatatatattatatgtatagtttagtaatatgcgtgtgtgtgtgtgtgtgtgtgtgtatgtgttagtatatttatggaaaaaaggatatatttaaatatatttaattgagaatgattatttgggtggggtgggagtaagacgaattattattttttaaatttgtatttttttaattattaatgaggttgaggatttttttatatatttattgatcgtttgaattttttgtgaattttttgtttattttttttgtttatttttttattgtattgttgtatttttttagtgatttgtgggaggtgtgtgtgtgtgtgtgtgttgtgtgtttttcgagacggagtcgtgttttgttttttatgttggagtgtattggtgcgattttggtttattgtaatatttattttttaggtttaagcgattttttgttttagatttttaagtagttgggattataggtatttgttagtatgtttagttaatttttgtatttttagtagagatagggttttattattttggttaggttggttttgaattttttatttcgtgatttattcgttttagttttttaaagtgttgggattataggtgtgagttatcgtgttcggttaaggtgtatgtgttttaaaaatatattttggtttttaatttttgatagttatatatttttaaaaatatttttttttagttttttatttgttttttattttattttttttttttttgtataagtttatgaaattttatttgttttttagttttgtttatagtgagtttttttatatgaaatttttttatgttgaggtagaatattttatttagttttttcgtataattaatttatattgtttttgtataagaaaattttttttatttaaatgtaataaagatatatttattttatttttatatttttagagagtgttttatttattttttttatggttattgtttttaggtgtttaatttatttggaatttagttttgtgtatggtatgacgtagggagtttattttttttgttttttaattttgattttatttttattgtatattaaatttttatatatagataggttagtttttgagtttatgaagttgttttttttattttttgttattttagtattatatagttttaattaaaatagttttgtaatatgtttttacgtatggtaaggtaagttatttaggttattttatttttgtttttttttttaaatattgtttttgtattttgtatttgttaatttttttttatatgaattttttgaattagtttattaagttttttgaaaaattttgttggagttttttgttttttttttttggagatagggttttattttgttatttaggttggagtgtagtgatgtaattatggtttattgtagttttgattttttgggtttaagtgattttttcgttttagtttttggagtggttgggattataggtgtatattattatgtttggttgattttgttttttgttttttgtagataaggggttttattatgttgtttaggttggttttaaatttttgggtttaagtaatttgtttattttggttttttgaagtgttgggattataggtatgagtttttatatttggttattagagtttttatttgaatatatgtataaatttagggagaagtaatattattataatgttgatttattttagttgtagtagatatgtttgtgtttgtagttatatagttttttttaaaaagatattgtttatggaaaatttaaaatatatgtaaaagtaaaaatagtagtaaaatgagttgtcgtgaaattattgttttgttttaataatgattagtatatggttaattttattttatttatatttttatttttattatttgaattatattaaataaattttagatattttgttattttatacgtaaatgtttttgtgtgtgtttttaaaagatagagattattaaataaatataatattataatattattattatatttaaaataaatgaataataatttttttttttttttttttttgagatagagttttatttatttgtttaggttggagtgtagtggtgtgattttagtttattgtaatttttgtttgtcgagtttaagcgatttttttgttttagttttttaagtggttgggattataggtatgtgttattatatttagttaatttttgtatttttagtagagatggggttttattatattggttaggtttgtttcgaatttttgattataggtaatttgtttattttagtttttttaagtattgggtttataggtgtgagttattttattgttataagaaattaagataataattttttaatgttattagatattttattaatgtttatattttttggattgttttatatattttttaatagtttgtttgaattgagatttaaataagttttatatattgtgaaattattgagttatgtttatattattatgaatttatggatttaaatatatttgatgtgttttaatttattttagttttatttttattgatatttatattgttttatttttggtttgtaggaatttatttaaattggttttttggtgtagatagagtttgtatatttggtataatattagtattttttaaaagttttttttttttttaatatgataggttattgtaggtttgttttgaataatttttgttttagatttggaattagttatttttttaaggagttttggttttttttagtggaaataatgtttaaatattataatttaggaattagtagtgtttgggatagtagattgattattgttgttaagtttttttagtagttagagttaagaaatattttttttaaaaaaattaaataaattataagttgatattgatattttaaatttaaatttaagattatagggtttatttattttattaattttatatttgtatttttttttaaatatgtttaaaaaatttgggttttttaaaatattaatttaagtatttgtttaatttattttgtaaaattgtagaataataataataagtttacgttaataagattgttaatgaaaataaattagaggttttaaagtggagggggataggtttttttttattaagttaaatgtcgttaacgatgtaagttaattattgtgttttgaagttatttggaatagttttttgtatggttatgttttatttttatatataggtttatttgttttattttattttttttttttagggtttgttttttatatttatgtaattttattttataattatgtaaaatatttatgtggatttaaagt

SEQ ID NO: 517 - DNA, 5882 bp, Artificial Sequence
  chemically treated genomic DNA (Homo sapiens)
  unsure 806, 4420: n is a or g or c or t
aaatttttttttggtaggtaataggtagttttttaattaacgagttttttgttatgtatttaataaatatttattaagtattatttgttaaatgtagaaagtaacggagacgggacgatgggtatttgttattttattttttaggtaagtttatttatttggtggattagaggattaaggatttagttttaaattgtgttgaaaatttttagttatagatagtgtaagaagattaaattgagtataaattgtaaacgtgggtattagttgagatttttttattgatatttttgtttatattttttattttattgtttatatttaagaggttacgttttttttcgtagtattttattattattttttgaaacggagttttattttgttatttaggttggagtgtagtggtatgatttcggtttattgtaattttttttttttgggtttaagtgatttttttgttttagttttttgagtagttgggattataggtacgtgttattatgtttagttaatttttgtatttttagtagagataggggttttattgtgttggttaaggtgatttcgaatttttaatttcgtgattttttcgttttagttttttaaagtgttgggattataggtatgagttattatatttagttaattgtgtgatttttaaaattagtttgaggagatatttagttttgtataaaagttggtttatttaagtagattattttgtttttaaggttgatattaaattataaaatatgagaattagaatttgttatattttaggtttgggtttagtttggggtatnttattgggtattaggcgtttattgtggagtagttgtattgggtgttttttttatttgtgggtggatatttgggtggtttttatttttaggtaattgtgaatagagttgttgtgaacgtgggcgtaaaaatttttttaaattttgtttttagttttttcgtatgtgtttggtagtggagttgttgatgatttggtggttgtgtgttttattttttgtggaattgttggtagcggagtttttgatgacgtggtggttgtgtgttttattttttgaggaatcgttggtagtggagttgttgatgatttggtggttgtgtgttttattttttgaggaatcgttggtagcggagtttttgatgatttggtggttgtatgttttattttttgaggaatcgttggtagcggagttgttgatgatttggtggttgtgtgttttattttttgcggagtcgttggtagtggagttgttgatgatttggtggttgtatgttttatgttttgaggagtcgttaagttgttttttatagtggttgtgttattttatttttttattagtggtgtgggggtttttagtttttttacgtttttattattattttgttttttgtttttttttgatagtagttattttagtgggtaggaggtaatattttattgggttttgatttgttttttttgaagatgggtggtggggtgtttttttttatgtgtttaataggttatttgtgtatttttttggagaaatgttttttgtttagttttgaatttttgtaaaattgtgtttaaagtagtaggtttgagtgttatttgtgaatttttgggagtttttgagatttttttaggggattttgaggttaaaattatatttatttattttttttttttttttattttattttatttttgtgagatatagtttttttttgttgtttaggttggagtgtaatggcgtgattttagtttatttgtaatttttatttttcgggtttaaacgatttttttgttttagtttttcgagtagttgagattataggcgtatgttattatgtttggttaatttttgtattttagtagtggttaaattttgtgttttagttggttaggttggtttcgaatttttgattttaaatgattcgatcgttttggttttttaaatcgaaattatatttataataatagtaaggttgagttaggtatttattatgtattggtatttcgaatgttattttattttatgtttgtgttgtagtagtaagaattgtaatttaattaaattttatatttgtgtatagatgtattatttatttttattattcgtaagttttttttaaaaaattttattaaagtaatatttatgtgttatgaaattgatttattttaagtgtatagttttatgattatataagtatatttttatgataaagtttaatttataagttacgtatagtaagagattaataataatagttaattataaaatagagtaattgtaataaaaatgtgaatgtgattttttaaaagagtttattttattgtatttagttatttagttatttgatgacgtgggatgaaatatgttcgtatgatgatacggaggttttgttatttagtattgggttttttttgattttttgttaatgcgttagaaggaaggttatttgtttttagtgattttgggttattgagttatagtgagtatagtatcgtcgtatttttaacggttgttggttaagagggttgttaagtgattagtgggtagttagcgtcgtggatagtttgtatttgttggataaagggatgattcgtgttttaggtggggtagaggaggtcggtataagattttattacgttgtttagtatagaatattatttaaaatttaggaattatttttggaattttcgatttagtatttttagacgtaggtaattgaaattgtggaaagttagaaagtagagtttttgtgtgtgttttagtatttagcgtggtggagtggtagcgtgggtagagtttttgtcggtatttaagtttagcggttttaaggggtagtacgtgtaaggttggagttgcggttgattttgtgcgtttttcgtggagtatatattgatgagaaagattggtagatatgttagggaatgtagattcgggttttggtaggaataaagtgagtttgtggttttaaggagaataacggatagtgttagtagtattaaaattggagtttttagttgaaaattggatttttgtgtgtttattagttttttagtgtgttaggatttttttaggtgattattgtaggatgttatagaattatgtttgggtaaaagatttatttaaagtttaagatagattaatggattttagaagaattaagttggaaaagtgtggtgatagggtttaattgtagttcgttgtaaggagtttttttttgttgagtgcggtgttagggagaagttttgagtatattgaaaaggtttttagatgtttttttttttttagttgtatttttttttggggttgtaatgtttttttttgtttgagttatagcggttttttatggtcgatcgtatgtagatgggaggttaggggttttttagggttagtatttaagagattcgtaaaaaggtaaagaatgttattttttttattaaatattttaaaaatagttttataaatatttgttattatatattggatattttgttattgttaaataatgagatatttttaagtgttttttaatttttaatatcgtacgtattaatagaaatgatatatataaattaagtaaatatagggaattgatatttattgtatttaaaattagaagagatatttaaagatattttatgtgtgggttgtgttggagtatgagttgagttttagtttttgttatttttgtgtttagttttcggattttttatgttttttatttgttttttgtttgtttttttgatttagtttgggttggttgttattgagtatgtaggttttttttttgtagttatattgtttagtgaaaaaaagtaaggtttagtatagagtataatatatatgtttaggtaaaagggggtaatgattgatggatggagttttagtatattgataattgtttttgggaatggttttggaggtatgggataggtggttaattttatagtgtattttttagagtgggtgggtattttttatttataagtattttatttgattatgaaatattttatatatataaaataatatagtgtttatataagcgtaaagattaataagagaataaaatagttggttgggcgtggtggtttatgtttgtaattttagtattttgggaggtcgaggcgggcggattatttgaggtcgtaagtttaagattagtttgattaatatgtgtttttttagttgtatatattttgttttttttttcgagttttagttatagtttagtgatttggtgacgggaggttttttgtagtgtttgatttaggttacgtttgtgttagtttagagttagggggaggaaatgggggttgggtttttggtttttatggggaggttatttttgtttttggtagtattagggtgtagaggtgttttcgggttgtaggggtgattttttntttatttttaaggtttggagaggtcgatttgtttaggaagtcgatttttatattttgttttgttattaatagacgtttggttgatacgggattttcggttgggttcggagtattgggtaggggtatttgttagtgtttgagagttgaagtttgggaagttttggggaagcgtaggaatttttcgtttgggttggggttgtcgggtagggttttttttatgtttcggcgtggttagagagggcgggggtagaaggtttcgggatagttttgtattttatagatgcgggttttcgtttagtcgcggttatttggggggttgggggcggggtttgggcggggcggggttcggtcgggagcgtaggggcggtagtgcgcgtttagtagtgttttagtcgggttcgtgtcgttatggggtagatcgagtgggttatgtgggttaacgaataggcgttggcgttcggtttgagtgagtgtacgttagggacggtggaggttgtagtttggaggggtgttttaagattttagtcgggatttcgggttatttatagggtggggaagtggggcgttaggcgggttaggtcgggtcggggttaggttaggagggtgcggggaacgggggcgggatttttaggtcgcgggttggaaggaggagttttgagatttttagtaatttttttgtagattttgcggagcgcggcgttttttttttatttttttttttcggtttttcgatttcgcgaaggaggaagttgtagcgtaggggaagaggcggtttagtttcggtggttttcggggttatcgtttcgaagttttcgagtgggggtttcggtttgggtatcgggagaagtttttttgtttttcggtagttagttggtttggaggtcgttttttttgggtttggggtggggaatgggtttatgttttggggtttagttttttttatttggagtttgcgttggaggcggtttgagattttataaggcgtcgaaattatttagtgacggttttgtttagtttagttgtataggtattttgtttttggggtgggatggtatagtttttagttatttttttgtgtatttgtttagaggttttggtgagggtagcggattttatttggaaatggattttttcgggattagggttagggagtgtttggtttagtacgggtgaggttgggtttaggcgaggtttgagggtagaggtattattgtagtagttttaggaaggatttgtatcgggggaggagtgtttgggaagggtttgggggttgagggtgaggaggaggggttcgttgttattatttttttggggttttgagcgttttttttgttgtttggagggtgcgtggtagttggagtgggagtagagattttagggtgggagggttggaggacggggttttgtagtttgttttgtgtttaggaaagtgatcgtttgtttcgagttagcggttaagaag

SEQ ID NO: 518 - DNA, 5882 bp, Artificial Sequence
  chemically treated genomic DNA (Homo sapiens)
  unsure 1463, 5077: n is a or g or c or t
ttttttggtcgttgattcgaagtaggcggttatttttttgggtataggataggttgtagggtttcgttttttagtttttttattttgaggtttttgtttttattttagttgttacgtattttttagataatagggagggcgtttagagttttaggggagtggtggtagcgggttttttttttttatttttagtttttaggttttttttaggtatttttttttcggtgtaggttttttttggagttgttgtagtggtgtttttgtttttagatttcgtttgagtttagttttattcgtgttgggttagatattttttggttttggtttcgagagggtttatttttaaatggagttcgttgtttttattagaatttttgagtaaatgtataggagggtgattgggggttgtgttattttattttaagagtaaagtgtttgtgtagttgggttgggtagggtcgttattgggtggtttcggcgttttgtgaaattttagatcgtttttagcgtagattttagatgagaagggttgagttttagggtatgagtttattttttattttaagtttagggagagcgatttttaggttagttggttatcgaggggtaggggagtttttttcgatgtttaggtcggagtttttattcgggggtttcggggcggtgatttcggaaattatcggggttgaatcgtttttttttttgcgttgtaattttttttttcgcggagtcgggggatcgagagaagggaatgggggaggggcgtcgcgtttcgtagggtttgtaagggaattattgggggttttagaatttttttttttagttcgcggtttgagggtttcgttttcgtttttcgtatttttttggtttgatttcggttcggtttggttcgtttggcgttttatttttttattttgtaagtagttcgaggtttcggttggggttttgggatatttttttaggttgtagtttttatcgtttttgacgtgtatttatttaggtcggacgttagcgtttgttcgttggtttatatggtttattcgatttgttttatggcgatacgaattcggttgggatattgttaggcgcgtattgtcgtttttgcgttttcggtcgaatttcgtttcgtttaggtttcgtttttagttttttaggtgatcgcggttgggcggagattcgtatttgtagggtgtagggttgtttcggagttttttgttttcgttttttttagttacgtcgaggtataggaggggttttgttcggtagttttagtttaggcggggagtttttgcgtttttttagggttttttaaattttagtttttaaatattgataagtgtttttgtttaatgtttcggatttaatcgagggtttcgtgttaattaggcgtttattaatagtaggataaggtgtgaaggtcggttttttgagtaaatcggtttttttagattttgggggtgggnggggagttatttttatagttcgggaatatttttgtattttgatgttattaaggataagggtggtttttttatggggattagaggtttagtttttattttttttttttggttttgggttggtataggcgtggtttgggttagatattgtagggggtttttcgttattaggttattgaattgtgattgagattcgagggaggggataggatgtgtataattgggaaagtatatgttggttaggttagttttgagtttgcgattttaggtgattcgttcgtttcggttttttaaagtgttgggattataggtatgaattattacgtttagttaattgttttatttttttattaatttttacgtttgtgtaaatattgtattattttatatatatgaaatattttataattaaatgaaatatttgtaaataaaaaatatttatttattttaaaaggtatattgtgaagttgattatttattttatgtttttagggttatttttagaggtagttattaatatattggggttttatttattaattattgtttttttttatttgagtatatatattatgttttgtgttgaattttgtttttttttattaaataatgtaattatagaaagggaatttgtatgtttagtagtaattaatttaaattggattagggaaatagataggaaatagataggaaatatggaaaattcggaaattaaatatagaggtggtaggaattgaggtttagtttatgttttagtatagtttatatatgaagtatttttaaatgttttttttgattttgaatatagtaaatattaattttttgtgtttatttggtttatatgtgttatttttattgatacgtacgatattagaaattaagagatatttaaagatattttattatttaataataataagatatttaatatatagtaataaatatttatgaaattgtttttaaaatatttggtgagaggaatagtattttttgtttttttgcgaattttttgaatgttgattttggaaaatttttggttttttatttgtatgcgatcgattatgaagggtcgttgtggtttaagtaggagaggatattatagttttaggaagagatgtagttagagagggaggggtatttaaaagtttttttagtgtgtttagagtttttttttgatatcgtatttagtaagggaaggttttttatagcgagttgtaattgaattttattattatatttttttaatttggtttttttgaaatttattggtttattttgaattttgaatgggttttttatttaggtatgattttgtgatattttgtaatggttatttgagaaagttttgatatattgagaagttggtgagtatataaaagtttaatttttaattgaaagttttaattttaatattgttaatattgttcgttgttttttttgaagttataggtttattttgtttttgttaggattcggatttgtattttttggtatgtttgttagttttttttattaatgtgtgttttacggagagcgtatagggttagtcgtagttttagttttgtacgtgttgttttttgaggtcgttggatttgggtgtcggtaggggttttatttacgttgttattttattacgttgagtattgagatatatatagaagttttgttttttggttttttatagttttagttatttgcgtttgaaaatattaaatcgaaaattttaaaaataatttttaagttttaaatgatgttttgtgttgagtagcgtgatgaaattttgtgtcgattttttttgttttatttgggatacgaattatttttttgtttagtagatgtaagttgtttacgacgttaattgtttattagttatttagtagtttttttggttaataatcgttgggggtacggcggtgttgtgtttattgtggtttagtgatttaggattattgggggtaggtgattttttttttgacgtattggtaggaggttaaggggggtttaatgttaagtggtagggttttcgtgttattatgcgagtatattttattttacgttattagatggttgagtggttgagtgtagtaaagtgagtttttttgagagattatatttatatttttattataattgttttattttatgattggttattgttgttaattttttattgtgcgtaatttataaattaaattttattatagggatatgtttatataattatggaattgtatatttaaaatgggttaattttatggtatataaatattattttaataaagttttttaaaaagaatttacgaataataaaaataaataatatatttgtatataagtgtaagatttaattaaattatagtttttattattatagtatagatatgaagtaaagtggtattcgaaatgttagtgtatggtgaatgtttggtttagttttattgttattataaatatagtttcgatttgggaggttaaggcggtcggattatttgaggttaggagttcgagattagtttgattaattgaaatataaaatttagttattattaaaatataaaaattagttaggtatggtggtatgcgtttgtaattttagttattcgggaggttgaggtaggagaatcgtttgaattcgggaggtggaggttgtaagtgagttgagattacgttattgtattttagtttgggtaatagagggagattgtattttataaaagtaaaataaaatgaaagaaaaagaaaaataaataaatatagttttgattttagggttttttgaaagggttttaaggatttttaggggtttatagatgatatttagatttgttgttttaaatatagttttgtaaggatttaaaattgagtaaaagatatttttttaagaagatatataaatgatttattaagtatatgaaaaaagatattttattatttatttttaggaaaggtagattaaaatttagtaagatattattttttatttattgaaatggttattattaaaaaaaaatagagaatagagtaatggtgaggacgtggagaaattggaagtttttatattattggtgggaaagtaaaatggtatagttattgtggaagatagtttggcggttttttaaaatatgaaatatataattattaggttattagtaattttattgttagcggtttcgtaaaagatgaaatatataattattaggttattagtaatttcgttgttagcggttttttaaaagatgaaatatataattattaggttattagaaatttcgttgttagcggttttttaaaagatgaaatatataattattaggttattagtaattttattgttagcggttttttaaaagatgaaatatataattattacgttattagaaatttcgttgttagtagttttataaaagatgaaatatataattattaggttattagtaattttattgttaggtatatgcgaaagagttgaaagtagggtttgaagagatttttacgtttacgtttatagtagttttatttataattgtttagaggtggaaattatttaagtgtttatttatagatgagggaaatatttaatgtagttgttttatagtaagcgtttggtgtttagtagnatgttttaagttgaatttagatttgaaatatgataaattttgatttttatgttttatagtttaatgttaattttggaaataaagtgatttatttaaataaattaatttttatgtaaaattaaatgtttttttaaattagttttaaaaattatataattggttgggtgtggtggtttatgtttgtaattttagtattttgggaggttgaagcgggaggattacgaggttgggagttcgagattattttggttaatatagtgaaatttttgtttttattaaaaatataaaaattagttgggtatggtggtacgtgtttgtagttttagttatttaggaggttgaggtaggagaattatttgaatttaggaggaggaggttgtagtgagtcgagattatgttattgtattttagtttgggtagtagagtgagatttcgttttaaaaaatagtaataaggtgttacgaagggaaacgtggttttttaagtgtagataatgaaatgagaagtgtagataggggtgttagtagaagagttttaattgatatttacgtttgtaatttgtgtttagtttggtttttttatattatttataattgaagatttttagtataatttagaattaaatttttagttttttgatttattagatgggtgaatttgtttaaggaatgaaataataagtgtttatcgtttcgttttcgttgttttttgtatttggtagatgatatttgatagatatttgttgaatatatgataaaaaattcgttaattgaggaattatttgttgtttattagaaaggaattt

SEQ ID NO: 519 - DNA, 7011 bp, Artificial Sequence
  chemically treated genomic DNA (Homo sapiens)
aaaaatttgtttttgatgagtacgtttaaggtattttttttcgaatgttagtttttgagaatgcgaattatgagtgtaaaatggttatgtatttcgtttaataataaaatttatttgatcgtgaggtgttgtttgagtatattaaatatgaaggtattggattagatataaagttattttgtgtttataaagttattttgtgggtacgggttatgaaggacggtaattaaattggttcgattgattttttttttggagtttgttataattgtggttaatttggttatattcgaaaaaattgtatagttaaaaatttaaaggtagttaagtcggtttaaaaaatatagttaaatgtttttgttattgtttgtttttgttgttgtaaaggtaaatattgggtaagtatttgttattttaagtttgatatagatggaaattttttgttatagaattagggaaatgggaaatggggttagttttaggttttaattttaaatgggatattttagatttagacgaatgttgtttttttgttttaatcggttttaacgtagtttttagtataaataaatttatttatagttaatttagatgtgttttagtttttttttttgttttagtataacgtttatttatgttttagagtaaggggaggggcggttaatttttgtagtattatttttttaaatttattatttaattttttgtttttaatttttagattaatatttggaaatttggaacgattataatatggggaagagggtatgtttgtgttttattaggagattattaattttttgtttgggtgtttattagaagatttaaattttatgtgaatattgataataaaaattatagggaagagacgtttacgttagagattatttttatatttggtgagatttgtgttaattttttagaaattggtacgttaaattaaaatgggtttggtttaattttttttaatggtaatagaaatttttttaattaattttattttttttaattttttttttttttttttttacgaatttaaaaattttattatttttattagtttgaaaataatatttttttatttttttattttttttttagtattggattttgtttataataggttttatttaataatttttttttttatattttttgttttattagtttttttttatattgatttatttgttatataaaattatttttgttgggtttatgtgtttttttttttatttatttaattttttatttggatggatgtttttgcggaaatttatattaatgatagtgtgtggatgtttggagttatagatgatcgttgttttatttaattaggaaaagaaggtattgtatttaatgtttttacggttataaatatttttttttgtgtttcggatatgtattttgttgtatttatttagaaatttaagtttgggttgcgtattttttggagagattagttataggggaacggggatatttggtttttagttttttttttttttttttaagataaatgaaagggggagtaataggagatattttttatttttaatataaatttgtaggaaaattatgttttaaaatttttgagggtttatttaaatttttaatttgggaagattgtgttaatttatatgtagtattattaaaaaatgatttatatggtttagtaagagattgggtattaaagggttatttgaaaagtagttgtttttttgttggaagggaatgtttggaggttatttgttttattttttattgggaggacgaggattattattttattttgtataggaggtttagtttattttgttttttaaaatgggaagataagagtattattttttgttattcgaggttttttatgatattttttattttgagtttagaatatttagaattttggaaattggttattgttatgtttagattgcgagtatgggaaggggaaatttttttttttgttgtttttattattattttttatattcgtgattttgaaatttatgataaattttttttggattatttttttttttttgatgttagtttttttttatgggattttgattggtattatgataatttttttggatttaggtatgtttttttatttttttagaattttcgggtatttcggattgtttttttacggtattaaatattgggcgttgttatcgttatttttttttttcggtattaacgtagatttaaatattttgttttgtttatttttagtttgattattatatagagttgtgttaagtttttttatatgttgttagtgggaaatattaaaatttggatgaataattaaatcgtttaatgtattaattgttatttatttatttgtgttaattttcgttttgatttaggaaaagtgtaatgttggttcgagtttgagaaggaatttggatattagtaattttatttagaatttgggaatttttttttttagtatatttaattaatgaagtgttataacgaatttttaaaagattaagagatttgtttttattttaattattgtgattatgggtttaattatagttattgtattggttattattgtcggagtggtattatattaatttatttaaatggttaattttgttaatgattggtaaggtaattttatttaaatgtggaatttttaataaggtattgattaaaaattagttaatgatttaagatagtttgttatttggtttggggattagttaatgagtttcgaatattatatgtaaatgtagttcgattgtaatatttttgatttttatagtatattatatttttataacgagattgattatgggaaatggttaaaggatattttttgggtagggaagataatttatttttggatataattaaattaaagaaataaatttttgaagttttttaagtttatttatttattgtgtttggagttgaggcgttagattaggtggtagaaagtttttttggattaaattttataatttggattaagtttattgggggttttattgtaggaaattttggaattatgtttttttgtttaatcggtttgtttttagtgtgttagattagttaaagaattttgtattaaaatcgagagaacgagtaagtttttatcgttacggtatatttatataaaaagaaagggagagatgttgcgggaagttagggattttgaatggagggattggttggagttatggtagaggaatataaattgtgaagattttattttaatatggatatttattagtttttaaataatatttttataattttttatgtttgtttttattttaattttttaattttgttatttttgtaagttgaggatgtttgttattttaggattattgtgataattgtgttaattgtataaattgattgtaagatatgtgtttgaataatatgaaattagtgtattttgaaaaagaatagaataagagtaatttttagggaataagggaaaataattataaggtttgattgtttgtagggtcgggtagaaagagttatatttttttttttgagagaggttataaatggatatgtaagtagggaagatattattaaattttttttttagtaaggagtattattattaatattttgggaaaggaatgtatttttggggggaggtttataaatagtcgttttgggaatgtttattttgtgtagttgagataaggattgagatacgttttggttttttgtagtatttttaggtttattagggtggggaaaaatttcgttttggtaaatttgtggttagatcggttttttgttgtcgaattttgtttgttgttgtttaaggtgtttattaagatagtatgtgtatcgttgaatatagatttttatttgtagttttgtttttgttttttgttttgtgatttttgttggatttttattagtggttttgtttttgttttttgttttgtgatttttgttggatttttatcggtagttttgtttttgttttttgtttttttttttagaagtatgtgatttttgttagatatttattagtagttttgtttttcgttttttgaagtatgtgatttttgtatttattttttgtttttatatttttttttttttttgaaatttttaataaaaatttgttggtttgaggtttaggtgggtattatagttttatcgatatgtgatgttattttcggcggtttagttgtaaaatttttttttttatattgtttttttttattttttagtcggttgatatttatagaaagaatttacgttgaaatattgggggtgggtttttttagtacgttagttttgttgatgagtaaagaaggtgttgatggtattttgattaataagaaatgttatgaaacggttttttatttttggtatttttagtattgatttatttttttttttttttttatcgttttttatagtttagtatttttttcgtttttatatatatgtatatttttattttggggattattaatttatagtttttatcgttgttaaaattatatgggttggagggttagggttgtatggatagttatattattgtatattagtttggtgatggagtaagattttgaaaaaaaaaaaaagaagtataaaagatttttaatagtttttgttatttgtgatttttttgaatttgttatttgtttagtgattttgattttgtaatatggaaagttttaagttttgatttttgagtttagatattattcgtattttggagttatttaagtatggggagttttttagagggtgattaattgattttttttatttagtttttttttcggaggtttgttttggagttgagttagtttttgaggaggtttttatttttatcgttttttttttttttggatatgagtttaggtttggttgggttttaggagaatttttttataaggtaagagataatataaagttaaggtgaagattagggtagttttttaaaaggtttttttgtgttttagagttgttatagtttttttattttattgttgtttattttgtttgtcggtatttagttattatgtgggagttcgtggtttttttgttgtttattttagtttatttgttttggtttaagagaaggtgttttggtgttaagtattttaagagttttttgtttttgtttttggtgggtagtttgttatttttttttagatacggttatatgtataataatttttttaagttgtagaaaaaatatggttttatttattcggttcgtatgggtattaagattatagtgattgtcggttattattagttggttaaggaggtgtttattaagaagggtaaggatttttttgggcggttttaaatggtaagtggtgtttattttttttttgttttttttattattttttgggattgtttaggtttttagattatgtttagaatggggtttttagttttaataatttgtaattttttttaaagtagattagtgggatgatgtgaagggagtgaatttttagatttttatttagtttttaaattaggtaggaagaattaaaggaatgttttttttattaggttgtttaggaggtgggatgggaggattatagtggtttgaggggttaaggaatttttattttatttttttttttgagtttagatttttttaatggattgagaaggtgtatgtatagtatttagtttagtatttagtatagtaagtgttttttatatagttaggatttatgttattttttatggaaaatgggggtagtgattattgttttttatgaaagttgttggggagaattagtttagttattgtaggttgggattgttgtttttttggtgttatttttagttatttaggtttataggggtagttttttataatgatattttagggttgttgatgagttttttatttagtagggtttttagttttttagtattttttttttttttttttttttttgagatagagtttttttttgtcgtttagtttggagtgtagtggttaattttagtttattgtaatttttgtttttcgggtttaagtgatttttttgttttagttttttgagtatttgggattataggagtatgttattatgttcgttaattttttgtatttttagtagagatggtgttttattatgttagttaggatggtttcgattttttgatttcgtgatttttttattttagttttttaaagtgttaggattataggcgtaagttattgtgttttgttagttttttagttttgattaagttaagggttggtttatttttttttggattaattagttaggtttgttgattaattatttagtttttatttttgttggttttttttcgggggtagagaagatggagaaggttagttatgtggatttttagggttaggaaatggaaaagggaggttttggatttttttgttttggggggtatttttaggaggaggcggttcggtttaagtttagattgggtagataaaatatttgtattttttaaatgtgggtttgtggttgggtatgtaggtttgtaatggaagggtaaatttgagtgaggtgagttgtgtttttagtttagttaagggtttagggaaaagtagagatttgtgtagtttttagtttttataagtttatttgttttttattttttggataggtatagtttagagagtttattttatttagagttgtttttttgtggttagaaattgatgagtaaaaagaagtttagagggtattttgttagcgaaaagaattttaatgttgttgtattttaattaagggttttttttttttttttgatttattgtatttttgaaggaattgggagtaggaggttttagggtttgttttattaagtttttgtagttatggtggagtgtagtggggttgtgtttatatgggagttagtatgttaggtatttgtttttttttttaggaaggaaagtagggattagaggtgtaagggtaagagtggggtggatggtgtgagatttttatagttttgtttgttttttaaagg

SEQ ID NO: 520 - DNA, 7011 bp, Artificial Sequence
  chemically treated genomic DNA (Homo sapiens)
tttttagagagtaggtaaggttgtaggaattttatattatttattttatttttgtttttatatttttggtttttgtttttttttttggaggagaaggtaggtatttggtatgttgatttttatgtgggtatagttttattgtattttattatgattgtaaggatttggtaggatagattttaaggttttttatttttaatttttttagaaatatagtagattaaggagaaagaaagaatttttaattagaatgtagtagtattggggtttttttcgttgatagggtgttttttgggtttttttttgtttattagtttttgattataggaaggtaattttggatgggataaattttttaaattatgtttgtttagagggtagggagtaggtgagtttgtagaggttgaggattgtatagatttttgtttttttttgagtttttagttgagttaaaggtatagtttattttatttaggtttatttttttattgtaagtttgtatatttagttataagtttatatttggagagtgtagatgttttgtttatttagtttggatttgggtcgagtcgtttttttttagaggtgttttttaaagtaaaagggtttaaagttttttttttttattttttgattttgaagatttatatgattagttttttttattttttttgttttcgggaggaagttagtagaggtgggagttaggtagttggttagtagatttggttgattggtttaagaaaaaataaattaatttttggtttgattaaagttgagaggttggtagggtatagtggtttacgtttataattttagtattttgggaggttaaggtgggaggattacgaggttaggagatcgagattattttggttaatatggtgaaatattatttttattaaaaatataaaaaattagcgggtatggtggtatgtttttgtagttttaggtatttaggaggttgaggtaggagaattatttgaattcgggaggtagaggttgtagtgagttgagattggttattgtattttaggttgggcgatagagagagattttgttttaaaaaaaaaaaaaaaaaaaaaaaatgttgagaggttgggggttttgttgagtgggaggtttattagtaattttgaaatgttattgtagaaaattgtttttgtgagtttgagtagttggaaatagtattaggaaagtagtaattttagtttgtaatagttaggttaattttttttagtagtttttatggaggatagtagttattgtttttattttttatgaaaagtaatatgaattttggttgtataaggggtatttattgtgttgggtgttaggttaagtgttgtatatgtatttttttagtttattagagaagtttaggtttagagagaggagtggagtgaggattttttgattttttagattattgtggtttttttattttattttttgggtagtttggtagaggagatatttttttaattttttttgtttaatttagaggttgggtgggggtttgaaggtttattttttttatattattttattagtttattttgggaagaattataggttgttggagttggaagttttattttaggtatggtttgaagatttgaataattttagggggtggtgaagggggtagggaggagatgggtattatttattatttgaggtcgtttagagaagtttttgttttttttaataagtatttttttggttagttggtggtggtcgataattattgtagttttggtgtttatacgaatcgaatagatggggttatattttttttgtagtttgaagaagttgttatgtatatggtcgtgtttggggaggaatggtaggttgtttattaggggtagggataggaggtttttggggtatttggtattagggtatttttttttgggttaaaataaataagttagggtaagtagtaagagagttacgagtttttatatggtggttgggtgtcggtaggtaagatagatagtagtggagtagaagagttgtggtaattttagggtataaggaggttttttaaagggttattttgatttttattttgattttgtgttattttttgttttgtggaaagatttttttggagtttagttaggtttgagtttatatttagaagggagagaggcggtgggagtgaaggtttttttaagggttggtttaattttagggtaaattttcggaggaggagttaggtaagggaggttagttgattattttttgaggagttttttatgtttgaatgattttagagtgcgaatggtatttgggtttaggagttaaggtttggaattttttatgttgtaaaattaaaattattggatagatgatagatttaggagggttataagtagtagggattgttaaaggttttttatgttttttttttttttttttagagttttgttttattattaggttggtgtgtagtggtgtgattgtttatgtagttttggttttttagtttatgtggttttggtagcgataagggttgtgggttaatggtttttaaaataaaaatgtatatgtgtatgggaacgaaaggggtgttaagttgtggggagcggtggaagggaagggagagataggttagtattaggaatgttagaggtgggaggtcgttttataatattttttgttgattaaaatgttattaatattttttttgtttattagtaggattagcgtattgggggaatttatttttaatattttaacgtaggttttttttataagtgttagtcggttgagaaataaagagagatagtataaagagaggaattttatagttgggtcgtcgggggtggtattatatatcggtaggattgtgatatttatttgagttttaaattagtaagtttttattaagggttttaaaaaggggagggggtgtaagaatagggagtaggtataaagattatatgttttaaagggcgaaaagtagaattattaataagtgtttaataaagattatatgtttttgagggaaaggataaagggtaaaagtagaattatcgataagggtttaataaagattataaggtaaagggtaaaagtagaattattgataagggtttaataaagattataaggtaaagggtaaaagtagaattatagatgagggtttatgtttagcggtgtatatattgttttgataaatattttaaataatagtaaatagggttcgatagtagagaatcggtttgattataaatttattagggcggagtttttttttattttagtaagtttgagggtattgtaggagattagggcgtattttagtttttattttaattgtataagatagatatttttagagcggttgtttatagatttttttttaggaatgtattttttttttagggtattaataataatattttttgttaggaaaagaatttagtgatattttttttatttgtatgtttatttatagttttttttaagaaggaaaatatggttttttttgttcgattttgtaggtagttagattttatggttgtttttttttgttttttaaaaattgtttttattttgtttttttttaaggtgtattaattttatattgtttaaatatatgttttataattaatttgtatagttaatataattattatagtggttttgaagtgataaatatttttagtttataaagataataggattaagagattaaagtaaagataggtataagaaattataaaagtattatttgggaattgataaatgtttatattaaaatgaaatttttataatttatgtttttttgttatggttttagttagtttttttatttagggtttttgatttttcgtaatatttttttttttttttttatataaatgtgtcgtggcgatgaaggtttgttcgttttttcggttttgatgtaggattttttgattggtttggtatattaaaaataagtcgattaaatagagaaatatgattttaaaattttttatagtggagtttttagtagatttaatttaagttgtggagtttagtttagaaagattttttgttatttgatttaacgttttagttttaggtataatggataaatgagtttgagaggttttaaaaatttgtttttttaatttagttatgtttaaggataaattattttttttatttagaaggtgttttttgattattttttatgattagtttcgttgtaggaatatggtgtgttatagaaattagaagtgttgtaatcgaattgtatttgtatgtgatgttcgagatttattagttggtttttaagttaaataatagattgttttaaattattagttaatttttgattaatgttttgttgaggattttatatttgggtggaattgttttattaattattaataaaattagttatttgaatagattggtgtaatgttatttcggtagtggtggttagtgtagtgattgtaattaggtttatgattatagtgattaaagtgaaaataaattttttgattttttgagaattcgttgtaatattttattaattaaatgtattgagggggaagatttttaagttttgggtaaagttattggtatttagatttttttttaagttcgaattaatattatattttttttgagttaaaacgggagttaatataagtggataaatgataattaatgtattggacggtttgattgtttatttaaattttgatattttttattaatagtatgtaaggaggtttaatataattttgtataatagttaggttggaggtaaataaagtagaatgtttgaatttacgttgatatcgagggggaggagtggcggtggtaacgtttaatgtttgatgtcgtaaagaagtaattcgaggtgttcggggattttgaagaggtagggggatatatttgggtttagaagaattattataatgttaattagagttttataaaggaggattggtattaaaaagaggaaaatggtttaaaggggatttattatgggttttagaattacggatgtgaggggtggtagtggggataatagaaagaaaagttttttttttttatattcgtagtttggatatggtaatagttaatttttaaagttttgggtgttttgggtttagaatgggggatattataagaggtttcgggtggtagggggtaatgtttttatttttttattttaagggatagaatgagttgaattttttatgtaaagtaggatgatgattttcgtttttttaataagaaataaaataagtagtttttaggtatttttttttagtagaagagtaattgttttttaaatagttttttggtgtttagttttttattaaattatatgagttattttttaatagtattgtatgtgaattaatataatttttttaaattaaagatttagatgggtttttaaaaattttaggatatggtttttttataggtttatattgaaagtagggggtattttttattatttttttttttatttgttttaaaggagaaagggagaggttggagattaaatgttttcgtttttttgtggttgatttttttagaaggtacgtagtttagatttgagtttttagatggatataataaggtgtatgttcgaggtatagaggagggtatttataatcgtaggaatattaaatgtagtgttttttttttttggttgagtggggtaacggttatttgtagttttaggtatttatatattattattagtatagattttcgtaggagtatttatttaggtgagaggttgaataagtggaggaaaaggtatataagtttagtaagaataattttgtgtagtaggtaaattaatgtgaggggaaattggtgagatagaaagtataaggaagagaattattaaataaaatttattgtaagtaagatttagtgttgaaggaggaatagaagaataaggggatgttatttttaggttaatagaaatggtgagatttttaggttcgtaaggagaaaaagaaagggaattaggagaagtgggattagttagaggggtttttgttgttattagggaggattgaattagatttattttgatttggcgtgttagtttttgaggagttggtatagattttattaggtatgagggtggtttttgacgtggacgttttttttttgtggtttttattgttagtatttatatgaagtttaagttttttagtgggtatttagataggggattgatgattttttggtgaaatataagtatatttttttttttatgttataatcgttttaggtttttaggtattggtttgggaattaaaggtaaagaattaggtagtaaatttagaggaatggtattatagagattgatcgtttttttttttattttggagtatagataagcgttgtattgagatagaagaagaggttgggatatatttgggttggttgtaggtaaatttgtttgtgttgggggttgcgttgggatcgattgaagtagaaaggtaatattcgtttgagtttgaggtgttttatttgaaattggggtttaggattggttttattttttatttttttggttttgtggtaagggatttttatttatattagatttagagtggtaagtatttgtttaatgtttatttttataataataagggtaaatagtagtaggagtatttggttgtgttttttgagtcggtttggttgtttttaagtttttaattgtgtaattttttcgagtatgattaagttgattataattatagtaggttttaagaaaagaattagtcgagttagtttgattgtcgttttttatggttcgtgtttatagaatagttttgtgggtatagaatagttttgtgtttgatttaatgtttttatatttaatatatttaggtaatattttacgattaggtaaattttgttgttggacggaatgtatggttattttatatttatggttcgtatttttaaaagttaatattcgaagaagaatattttgagcgtgtttattagagatagattttt

SEQ ID NO: 521 - DNA, 5300 bp, Artificial Sequence
  chemically treated genomic DNA (Homo sapiens)
gggagttttgaggaaggaagtttcgaaggagggaacgtaagaaatgattaggttagaattaagggtggtttagaagttaatttttagtttagggatagttttatagagaatacgtttatgatgtaagattttgttgagggtttggagtagtgaagattggggtaaggttattttttgggaagtgaagttattagagattttgcggagtagttttgagagttttttgagtaggaaggtaatagaatgtgaaggatattggagagaaggttaataggaagtaaataaaaataggttaaggaaatttagtatagggggttgtagggtttagggagtgggttttttattttttttttttacgtttggttaggtttttatttttcgggagtgcgtgggttttgaggttgtgtaggaagtgtcggtggggttggtgtagtcggttagcgtaattttgtacgattattataatttcggtgagtattgtaggatattttgaaatttaggagaattttggtataggtgtttttttatgggataatggatatcggggtagtgagggggtagagagttttggggttttttgggattgaggaggtagaatggaggggtttgtgttttaatttttttttgttttttagagcgtagatgttttgtgttttacggggtattaagtaagagtagatttttggttattttgtgttttgttgaagtttgttagtgtgttgagggtgagattgagggtttggggcggggtagtggaggcgggatggtcggggttttttttatattgtttgatgggttttttaattttagggaagtgttttcgttagcgtcgcgttttggagcggggtttgtaggacgaggatggttataggatgaagtttgtttgttattattttcgtgtggagtacggttagtttttttatcgaggttttggtttgattttttttcggggatcggttgttttggtttttttgggtgtagtttgttttttttataggttatgtacgtagtttgtttgttttgatattaattttttatttttttagttttaaagtaatttattttttttttttttttttatttttttttaggtttttaggttaaggtttttcgagaagatagtagagttgtttttcgtttttttgagattaagattatttaagttttgtattttagtatgaagtaaatcggagaggcgggtagggttggggggagatagggaggttgaggtgtggtcgaggatttgattatttggaagtgtgaaaatttttttgggttgttagaagttttgggtttggttataaatagggaggtagtggtatttttttatgggggtggcgaaggtggaatgagaggatttatatagagtttttagtttgggtttattttgtattttttttttttttttgattatttttgcgtacgttattttcgtagttaaggatgttaaggtcgttgttaattagatgcgtaattttttggttcgagttttttgtcgttttcgtttggaatttgggaaagaatatttgattatgggtttggatggggttatttatgatttcgagggatagtgagttatttggtttttttagttttttgttttttttatgtttcgttatttaggttttgttttttagaagttagatgtttgtgtttttcgtttttatttgttattttttcgagttttgttgattgtttttttgttttttgtagtttttagtatttgttggattcgaatagttggatcgaggagatgttttttgaacgtttgtgtcggagtattcgttagcgggtagtttgtgtttagtttaacgattttttttaggagtatggtatttaggggtgttaggtgtgagggttgtttttttattttcgttgggaggaatttgaatttgggaattatgaagttggaagtattgttgtgttcgtttttatgaatatagtttgggattagggtatattaaaggtttttggtagtaaagtgttagtgttggtagcgaagtgttagtgtgtgttgttagggttgagagtagtgtttttgttcgatgtagttttgggtaggttaggttgatataattttagattttttgagttttgatgatttttgggttgtttagttttgttagaattttttagatgattcgttaggagtttagtgttttataggattatttcgagtagaattgggatttaagagtttgtattttaaggattagagtttatgttaagattattttttagtttttaaggttttttattgttcggttgtcgttagttattacggttttagatagggtttgtgtttagttgatatttgtgatatagtttttttgttttatgagttgttgtttagttatattttttcgattttgttttcgtgttgttggcggttttgaggtttgtagattttagttgagtttcgggttgttgaaagtttgttgacgtttggttttgttattagtggaatgaggtgattttttcggagttgtgtaatttttaggttcggtagtgtttttttttagttattggttttaaataagttaaaagtttgattttggtgtgtttgtgaattttttgaggaagtcgttgtttttttggggttttttttttttatcggatttgtttaatttttttttatttagtggtatatttggggtttttagagatgatttcgcgtttgtttaaagaagtttggtgagattagttttcgtagaggttatgatagtttagtagtttgttatttagttattcgatagaaattcgggaattttttattttatgttatgttttgtgttaggtgttagagatatagttgtttattttagggtttatcgttggggagatagataagaggacgggtagtttttattttttgtgaaagatgtgatgttagggagtagtgtggttttgtggggtatttaattaagttaggggtattgttaggtagggatagggaaggttttttggagtaggtggtttttaagtggggttttgaagattgagaaggagttaggtaaagagtaggggtagatgagggtatttggggtagaaggagaatatataaaggtttagaggtcgggggtaggatagggtatttttggggatattgtatgtaattgattatattcggagtttggatttggaagtggtggaagagatggagatggtgagataagtagtaagtacgttagttttttaggtgcgttttttttcgatgagtattgttttattttacgtaattttgagaagtttgggttttttttattgtggtagaggttttttgaggtttttgtatatatggttttatggttgtttattagattttttttttagtagttgtttagtatggtggtggtataagtttatttttcggagttagggatttagttgtagtaagatatggttcggtttgggaggttaattatgaagaaggtagtagttgttattgtttaattttagaaattttaattttgtttttttttttttagttttgattatggatttagtagtagcgaattcgttaatgtagtgggtggtatagttagggttttgattttggttttgtagtagtatagtttggaaaagttttgaggggagagagatttttattggttcgagggtttggtatagagttagaaatgggggggaaggtatggggttgggtcgtttttgattttttaggtattatttaggaggttttggttttttattgaattttgttatttttttttggtatggtttttttttaaatttttaaattgtttttttatttataaaagtggtttttgagtgttagtttagtgggatttttattttttatggttttagttttttaaatagggttggatttttgattttgatttagttgtggttatttagtttttttttggggattttggattttgaggggggtatgtttagttgtgttgggaatttatattttttttggttggagtagaatttgtggattgtagttttgagggtagttatgttttgtttgtgtttggaaatataagaaatttgattgtagagagaagaaagaggagagaggaatagagcgaggaaatcgttcgttttcggggttttttttgttttttatttttgattttttaagattagtggggtttttttttttgttttttttttttgagttttgtgaaattttttaatttttattttttattttaaattagtttaaggtgggttgttttttttttaattaaagaaaggtgtttttggtggttaaaggtatatattcgatagttagatttttaggttggaattttgttttttataatatgcgaataatattcgtgttgtatatagagtatggttgtgaagagttgagtgagtgtttataaagtatttagagtagtgtttggtatatgttattatttcgtagcgggaaattatttttttttttgttttttgggtatttttgtgagtgaagggaggtattaataataattatattgggatatttgtatatattggaatgttttaggtaaattaggtttaaattgtattattttatttgtagtttaaattaataaataatttatataaattatattttgttttttaggcgatttaggaaggtttattaggtagggattgttattttttttttgagataaatattatgttagtaaattggtttacggtggggtggtagagggagagggtttaggtgggggcggatattattgtttgtatagttgatgtggaattagaaagttgattttggatgtaggaaaaaggttagggttgtattttttttttttgttttttgatgggtgattaatttttttgaaatacggacgttttaaggttaatgagattggtgttattttagaaaagggttattttgtgggcgggtcggtgggagggtatttgaaggtggggttaagggaggttttaaaatagtttatatagtaggagggatggttggggtttttgagttataagtggtattttagggttttgacgggcgtttcgttatgttgtttttgggtttgttgttgttgttgtttttgttggttggcgttcgtttgttgtggaattggtggaagtttcggagtttttatttttcgttttttgtttcgggttttttgtatttgttgtagttcgattttttaatttatttgtttggtttgatttagaaattcgggtttatttataggttttattttgggttgtaaggtgagaggttgatttcgttttggtttttattataggagggggcggaggtgacggagagggtttttttttcgttgacgttgttttggttgttttttaga

SEQ ID NO: 522 - DNA, 5300 bp, Artificial Sequence
  chemically treated genomic DNA (Homo sapiens)
tttgggagatagttaaagtagcgttagcggagagaggatttttttcgttattttcgtttttttttatggtgagggttagagcgagattagttttttattttgtagtttaaggtggagtttgtagatgggttcgaatttttgagttaggttaagtagatagattgggaggtcgggttgtagtaagtgtaagaagttcggggtaagaggcgggaggtggaggtttcggagtttttattagttttatagtaggcgggcgttagttagtaggggtagtagtagtagtaggtttaggagtagtatggcgagacgttcgttagggttttgaggtgttatttatagtttaagagttttagttattttttttgttgtgtagattgttttggggttttttttgattttatttttaggtatttttttatcgattcgtttatagagtggtttttttttggaatgatattagttttattggttttgggacgttcgtattttaaaaaaattgattatttattaagaagtaaggaagggaaatgtaattttgattttttttttgtatttagagttagttttttggttttatattaattgtgtaggtaatagtgttcgtttttatttgggttttttttttttgttattttatcgtgggttagtttattggtatgatgtttgttttagagagaaaatggtagtttttgtttaataggtttttttgaatcgtttgaagaataaaatgtgatttgtgtgggttgtttgttagtttaagttatagatagagtaatatagtttaagtttggtttgtttggggtattttagtatatataggtattttagtgtgattgttattagtgtttttttttatttataaaagtgtttagaagataaaggaggaagtggtttttcgttgcggagtaatagtatgtattagatattgttttaagtgttttgtgggtatttatttaattttttatagttatgttttatatgtaatacgggtattgttcgtatgttgtggagggtaggattttagtttggaaatttagttgtcgaatatgtatttttagttattaggagtatttttttttggttgaaaggaaaatagtttattttgagttggtttgagataaaaaataagaattggggaattttatagaatttaggaaaaagaagtagaggaggggattttattggttttagaaagttaaggatagggaatagaaaaagtttcggagacgggcggttttttcgttttgtttttttttttttttttttttttttgtagttaagttttttgtgtttttaggtataggtagaatatgattgtttttaggattatagtttataggttttattttagttagggaaagtatggatttttagtataattgggtatgttttttttaaagtttaaagtttttaggaaggggttggatagttatagttggattaggattaagggtttagttttatttggggaattgaagttataaggggtgggggttttattggattgatatttagagattatttttgtgggtaaggaggtagtttggggatttgggaagaggttatgttaaagaggagtggtagggtttagtgagaggttagggttttttggatggtatttgagaggttagaggcgatttagttttatatttttttttttatttttggttttgtgttagattttcggattagtgggggtttttttttttttagagtttttttagattgtgttattgtagagttagagttaagattttggttgtgttatttattatattggcgagttcgttgttgttgaatttatgattaggattgagagggagaaaataggattgggatttttggggttgggtaatgatagttattgttttttttatggttgattttttagatcgggttatgttttgttgtaattgaatttttggtttcggaaaatgggtttatgttattattatgttgagtagttattgggagaaagatttgatgagtaattatagggttatgtatgtaagagttttaggaaatttttgttatagtgggaaaggtttaaattttttaaagttacgtgggataagatagtgtttatcggaaaggagcgtatttggaaggttgacgtgtttattatttgttttattatttttattttttttattatttttaaatttaaatttcgaatgtggttaattatatgtaatgtttttaaaggtattttgttttgttttcggtttttgggtttttgtatattttttttttgttttagatgtttttatttatttttgttttttgtttggtttttttttagtttttagagttttatttggaggttatttgttttaggaagttttttttgtttttgtttggtaatgtttttgatttggttagatgttttataggattatattgttttttgatattatattttttatagagggtggggattgttcgtttttttatttgtttttttagcgatgagttttggagtgagtagttgtatttttggtatttggtatagggtatggtatgaagtgaaagattttcgaatttttgtcgaatgattggatggtaggttgttgaattgttatgatttttacggaaattgattttattaaatttttttggatagacgcggagttatttttgaagattttaggtgtgttattaaatgggggaaagttaggtaggttcggtgggaaggggagattttaggagaatagcggtttttttagaggatttataaatatattaaagttagatttttggtttgtttgaaattagtaattggaagaagatattgtcggatttgaggattgtataatttcgggaaagttattttattttattgataatagaattaagcgttagtaggtttttaatagttcggaatttagttaaaatttgtagattttagaatcgttagtagtacgaggatagagtcggggaggtgtagttggataatagtttatgaggtagaagagttgtgttataggtgttagttgagtataagttttgtttgaggtcgtggtgattggcgatagtcgggtagtggagggttttggaagttgaagggtggttttggtatggattttggtttttggggtgtaggtttttgggttttagttttgttcggggtggttttgtgaagtattagatttttagcgggttatttgggaggttttagtagagttgaatagtttaagggttattagggtttagagagtttaaggttatgttaatttggtttgtttagaattgtatcgggtaggggtattgtttttagttttagtaatatatattgatatttcgttgttaatattgatattttgttgttaaaagtttttaatatgttttggttttaggttgtgtttatgaaagcggatatagtagtgtttttagttttatggtttttaggtttaggttttttttagcggaggtgggagggtagtttttatatttggtatttttgagtgttatatttttggaggaagtcgttgagttgggtataggttgttcgttggcgggtgtttcggtataggcgtttagagggtattttttcgatttagttattcgagtttagtaggtattgggggttgtagggggtaaaggggtagttagtagggttcgggaggatggtaggtggaaacggagagtataggtatttggtttttgaggggtaaggtttaggtggcgaggtatggggaggataagagattgaggggattagatgatttattgtttttcgaggttataggtggttttatttagatttatgattaaatatttttttttaggttttaagcgaaggcggtaggaggttcgaattaggaagttgcgtatttgattagtagcggttttgatatttttggttgcggggatgacgtgcgtaaaagtggttagaggggaagagaaggtgtagggtgagtttaggttggggattttgtgtagatttttttattttattttcgttatttttatggagaggtgttattgtttttttatttatggttaagtttaaggtttttgatagtttaaggggatttttatatttttagatggttaggttttcggttatattttagtttttttgtttttttttagttttgttcgttttttcggtttgttttatattgaagtgtaggatttgggtgattttggttttaaagaggcggaaagtagttttgttgttttttcggagaattttaatttggaagtttaagagggggtgaggagaagggggaaaggtgagttattttgaggttgagagggtaggaagttggtgttagagtaaataggttgcgtgtatgatttgtaagaggagtaggttatatttagagagattaaaatagtcggttttcgagggagggttaggttagggtttcggtgggaagattgatcgtattttatacgggggtagtagtaggtaaattttattttgtagttattttcgttttgtagatttcgttttagggcgcgacgttggcgagggtatttttttgaagttggggaatttattagatagtgtggggggggtttcggttatttcgtttttattgtttcgttttaggtttttagttttatttttagtatattggtagattttagtagaatataaggtggttaagagtttgtttttatttggtgtttcgtaaaatatagaatatttgcgttttggagaatagagaggagttagggtataggtttttttattttgtttttttagttttagggagttttagggttttttgtttttttattatttcggtgtttattgttttataggagggtatttatgttaaagtttttttgaattttagggtgttttgtagtgtttatcggggttgtagtagtcgtatagggttgcgttggtcggttgtattagttttatcggtattttttgtatagttttaaagtttacgtattttcgggaggtggggatttggttaagcgtggggaggagagatgagggatttattttttgggttttgtagttttttgtattgggtttttttggtttgtttttgtttgttttttattggttttttttttagtgttttttatattttgttatttttttatttagagaatttttaaagttgtttcgtaaggtttttggtgattttattttttagagggtgattttgttttagtttttattgttttaggtttttagtagagttttgtattatggacgtgttttttgtgaaattgtttttaagttaagggttagtttttggattatttttggttttgatttggttattttttacgttttttttttcggaatttttttttttagagttttt

SEQ ID NO: 523 - DNA, 6275 bp, Artificial Sequence
  chemically treated genomic DNA (Homo sapiens)
ttagtgttataaataaatttttagtggtgttaaagaaatagtatttaaatataaatttaatttttttagtaaggtaattttatttttatagaagggtgcgatttgtggatggagtaatggtaagagatatttgaataaaggaggggaaggggtttttatttttgatgtaggtagtttttattgttgtgttatttttttattggttagggttggattgtatagtttaagttaatttcgattggttattttaaagagagtagggatataagttagagtggcggggtgagtagtttggtgggaataggtgatttaagatgatttaggttagagtaggtgattaggagtgatttaggacggagtaggtgatagaggttaggaggtggttgtttattggaattaggggtaaggagacgaaaattttaaaatgaagagttgaatataattgatatattgattttttggagaggattttagaatttattgtatttaataatttataggttaaaatttttgaagaggaatttattatattttatattaggaagtagaagttgtagtgattcgagatcgtgttattgtattttatttgttagggaaatattttaagtatgaggttatgaaagttaaggtttttagttgttgtttttgggtaatatgggagaggtgaaatttaacgtttgttttttttcgtagtgatttttttttgaaaatgttttagttttttggtaaaggaacgtgtattgtttggtgtgtgggttttgtgaattttgaggaggtggagtggtaggagatgggggttttttttttttttatttttttttggtgtttagggaagatgttcgtttattttgggaggattgagattcggagttttaggtaaaattggtgggttaggggaggttttaaatgttggtgagattttgattttggttagtatttaggtttttgatattattgtaagaaggaatttaaggatgagttagaaaatagtgaaaatatggagatttattgtagtgaaaagtatatattaaagaaaggggagtgtgggtcggtttaagagaggtagttgtattaagagatagttgtattatagggtttagagttattatttttatgggtttttttaattaaggggtgaatatttatgaagatttttggaaaaaggtaaagattttttggaattatggtattatttttttttttttttttttttttttttttttttttttttttttggggaaagagtttttttttgtagtttaaaaaaaaatttttgttttttagttcgggttaaagaaatttttttgttttagttttttgagtagttggaattataggtacgtgttattatgtttagttaatttttgtatttttagtagagatggggttttattatgttggttaggttggttttgaatttttgatttggtgattcgtttatttcggttttttaaagtgttgggattataagtgtgagttattgtgtttagttggtgttatttatgtttgtattaaatatgggtgtttttagaattgttatagcgttggtgggtgtgtaatttaatatgttaatgagtgtataatgaggttttaggtgaaatttaggttaaatttagtgttgtgttggtttttattagttttagttagtttggtttatattttgattttcggggtttttttggtttttgtagttattttaatagtttttttttgttagttgtgtgaagttgttgtttggaattgtttatttttttgtaattatcgtgtattatttttgtttaatttgattgttcgtagagatttttattttttatttttaagggttgatgagggagggaggaggttagtgttttatatttattttttgttgattagggttattggttatgtttagttagggtatggaaatttttagttgtttgttttaagggttttaagggtgggttattaggagagtttgaattcgaggtagggattggttggaatttttgtatgattattattttgatatggaattgttataatttagaagatataaattttataaggaggttaaataagtaaggattaaagattagtagaaattagagttattaaaggttttaggaaaggtaggaattgtgttatatttagtaggtatttttttgatgaggttttagatggtttgagtagtgtgtttattgaaattatgtagttaggtagtatgttggtaaatttttttgtttgtttgtttgagacggagttttgttttgttatttaggttggagtgtagtggcgtgatttcggtttattgtaagtttcgttttttaggtttacgttatttttttgttttagtttttcgagtagttgggattataggcgttcgttattacgttcggttaattttttgtatttttaatagagatagggttttatcgtgttagttaggatggtttcgatttttcgatttcgtgattcgtttttttcggttttttaaagtgttgggattataggtttgagtattatgttcggtcgcgtgttggtaaattttttgagttggtagtttaattaattttgagttgttaatataaagaataggtgtggtttattattgtgtaaatttttttgtttagttagaagataaagttttttgttttttgattatttgaatggtttatgttttggttttgttagcgttatataatggtttagtaattttgtaaaattttgttatatttaggaaagtttttaggttttttttttgttgttgttgttgtttatagaggttttatttttaagtaaatttttgtttgatggataaggtttagttttttgagtttagaatatattataggtattttatttttggtagagaaatttgggtttggatggagagaattgattttttttaaggaagtttaggatttgaatggtatttttatttgagttttttttagtggggttgtatataaagatgttatttatatattggagtgtggtttttttttttagttttggtttttttaatttttgtgttaaggtatttttgaataagtaagggttatttttaaagttatgaggtagtattgttttggtgtattattgggtaatagtagttttaggattagtttatttgaaaggaaataagttttgagagtcgaagtgtaaaggaatataaaagaaagtatttttatgatttaatattgtgaattaattggtgttttttggtatttggttaagtatagtataaggatttggtattataggatgtaagagaattatgatttcgttaatggtttttaagttttgaattagattatatatatatatatatatatataattttttttttttgagatggagttttattttgttgtttaggttggagtgtatggtataattttagtttattgtaattttcgtttttcgggtttaagcgatttttttgttttagtttttttaagtagttgggattacgtgtgttattacgtttttaaagtatggttttttgttttttttgtttaaaaattaaatgaaaaatatggtttaggttgggtgttgtggtttatatttgtaattttagtattttgggaggtcgaggtaggtagattatttgaggttaggagtttgagattagtttggttaatatggtaaaattttatttttattaaaaatataaaaattagtcgggcgtggtggcgggtatttttaattttagttattttggaggttgagatcggagaattgtttgaatcgggaggcggaggttgtagcgagttaggattgtattattgtattttagtttggacgatagggtgagattttggggagtggggaggagagaattaataaattatatgatataaaggaataaaaatatataagataggataagagagaggaaggatatagggagagttaatatatatatagtagtttgaagtttcgggaaaggagaaaaaaatggggaggagtaatatttgaatagataatatttgagaaattttttagattgattaaagatatttagttatagagttaagaaattaggagttttagaataaataagtagaaagttatatttagtaatttagttgttagtttaattgaatttaatatgtttttttttttttggttgtttgtaaattattaattttttaaatgttgttagaattagttgtattattttgttgggttttttatttttggtttgaatgtgatttttgattttgtatttattttatatttgcgtgagttatgtttttaaattttttgataattatattttgaatatatatgaaatataggatttataagataatattttttttttttttttgttgtacgtttttcgtattatgttattttttttattttattaaaaataattttggttattatttacgaaatttggttttaatttgtagtttgaaatattttgttttggtagacgcggtagggaggtgcgtggagggagaattgaattaaaaaaaaaaataataaaatacgaatatttagatttttttgtttagcggtttttttttagggattagatgattggtttttttcgtttcgaattgatttcgggattaattcggaaggttattgggagaagtcgagggtagtttagttacggtcggttttcgttttttttaggacgcgagggtcgttttgggtggggaattcgcgatcgggcgaggatttatttcggtgtggggtttttcgatttcgaaagaatttcgttgtattttcgtttagagtttagattaagcgaaaagttatttgagaggtttcgggggcgcggggtgaggagtcgtggcggaggttttggtcggggcgtcgtggatattttcgagttatcgcgttttttttttgtagttttcgcgtcgttgggaggagcgagggagcgagcgggaaggggtttagttggtttttgttcggttttttttagcgttcggttttgaattcgttttgtattgttgtttgggcgggttcggggatttagtattcgatttaaaggtgtaggcgcgcgagtataatttatggttgcgttgggttgcgcgaggttgaggtgggcgttgcgaggggtcggtcgtggtttttcgtatacggggttagagttaaggtcgcgatttttgtcgtttttttttcggataaggttatcggagttttcggagtcgggtttggtgttcggcggcggtaacggagtttagaggagattttacgtttaggatagttgcgtttttttttttagttgttcgtttaaggttatgttttgtaattgtattagttataggtaattcgcgggggtatcgcgttttggggatgggagtgggtatcggaatagagaggttagaggtgagaagacgttggatagaaagtgaaggttgtaggaatttagttggggatttattgaggttatggttataaattggaaattagtagggagaatgggtaaagtgtagatagagttttttgagttgagataaataggacgaggaagggtttaaattaggacggtattagtaagggggggatttggacgtcggatttatagtgagtagaggttgaggagggagttgttttgggaagagagtggtagaggtaaatgtgtaagttaacggatattatggaattattaattttgggttgatattggttattatagattttttttaaacgaaataattttaggaggattatagaaattttttggttatttgtaaggtaaatttttttttaggggaaaatataatgttgtattttagatcgtggaagtaaatttatagatagtaaggaaaaggtattttttgttattaagaaattagtttgaggtcgggtgtagtggtttatatttgtaattttagtattttgggaggttgaggtgggtagattatttgaagttaggagtttgagattagtttggttaatatggtgaaattttatttttattaaaaatataaatattagtcgggtatggtggtatatgtttgtaattttagttattagggaggttgaggtaggagaatcgtttgaattagggaggtagaggttgtggtgagttaagattacgttattgtattttagtttgggtaataagagcgaaattttgttttaaaaaaaaaaaaaaaaagaaaaaaagaaaaaagaaattagtttgtagtttgtgtttaggttagtggtgttgggggagaaaattaatgtttaataagaaagttttatatagtagaatatagaaatgaggtagggatgaatagtttattgtttattgatagagatcggaaaatttaatattg

SEQ ID NO: 524 - DNA, 6275 bp, Artificial Sequence
  chemically treated genomic DNA (Homo sapiens)
tagtgttgggtttttcggtttttgttagtgagtagtgagttgtttatttttgttttatttttgtgttttgttgtataaaatttttttattagatattggtttttttttttaatattattaatttgaatatagattataggttgattttttttttttttttttttttttttttttttttttgagatagagtttcgtttttgttgtttagattggagtgtaatggcgtaattttggtttattataatttttatttttttggtttaagcgatttttttattttagtttttttagtagttgggattataggtatgtgttattatgttcggttaatgtttgtatttttagtagagatggggttttattatgttggttaggttggttttaaatttttgattttaggtaatttgtttattttagttttttaaggtgttgagattataggtgtgagttattgtattcggttttagattgattttttaataataaaaagtattttttttttattgtttgtgagtttgtttttacgatttgagatgtagtattgtgtttttttttaagaggaaatttattttgtaaataattaagaggtttttataatttttttgaagttatttcgtttggaagaagtttgtggtagttaatattagtttagaattagtgattttataatattcgttagtttatatatttgtttttgttattttttttttaagatagttttttttttaatttttgtttattgtaagttcggcgtttagattttttttttattggtgtcgttttgatttaagttttttttcgttttgtttattttagtttaaagggttttgtttgtattttgtttattttttttattgatttttagtttatgattatagttttagtgggtttttagttgagtttttgtagtttttattttttgtttaacgtttttttatttttagtttttttgtttcggtgtttatttttatttttaggacgcgatgttttcgcgggttatttgtaattggtgtagttgtagggtatagttttgaacgaatagttgaaagaagaagcgtagttgttttagacgtggaattttttttaagtttcgttgtcgtcgtcggatattaggttcggtttcgggagtttcggtggttttgttcgaggggagggcggtagggatcgcggttttggttttggtttcgtgtgcgagaggttacggtcggtttttcgtagcgtttattttagtttcgcgtagtttagcgtagttatgggttgtgttcgcgcgtttgtatttttgggtcgagtgttgagttttcggattcgtttagatagtagtgtagggcgggtttaaagtcgggcgttggggagggtcgagtaaaggttagttagattttttttcgttcgttttttcgttttttttagcgacgcgggagttgtaggagagggacgcggtgattcggggatatttacggcgtttcgattaaggttttcgttacgattttttatttcgcgttttcgaggttttttaaataatttttcgtttggtttgaattttgggcgggggtgtagcgagattttttcgaaatcgggaagttttatatcgggataggttttcgttcggtcgcgggttttttatttaaggcgattttcgcgttttggagggaacgggaatcggtcgtggttaagttgttttcggttttttttaatggtttttcggattgatttcggagttagttcggagcgaggggggttagttatttgatttttggaggggggtcgttgaataaagaaatttaaatattcgtgttttgttgtttttttttttaatttaattttttttttacgtatttttttgtcgcgtttgttaaggtaggatattttaaattgtaggttgagattagatttcgtagatgatggttagaattatttttaataaaatggaaagagtaatatagtacggaaaacgtatagtaagaagaaaaaaaaagtattgttttatgaattttatgttttatgtatatttaaagtatagttgttaaaaagtttaaaaatataatttacgtaagtataaaataaatatagggttaaagattatatttaagttaggaatgaaggatttagtaggatggtatagttggttttaatagtatttgaaaaattggtgatttataggtagttagagaagaaagggtatattaagtttaattaggttgatagttgagttgttaggtgtggttttttatttatttattttaggatttttagttttttgattttgtgattggatgtttttgattagtttggggagttttttagatattatttgtttaaatattgtttttttttattttttttttttttttcgggattttaaattgttatatgtatgttagttttttttgtatttttttttttttttattttgttttgtgtatttttgtttttttgtgttatatagtttgttaatttttttttttttattttttagagttttattttgtcgtttaggttggagtgtagtggtgtaattttggttcgttgtaattttcgtttttcggtttaagtaatttttcggttttagtttttagagtagttggaattagaggtgttcgttattacgttcggttaatttttgtatttttagtagagatagggttttgttatgttggttaggttggttttaaatttttgattttagatgatttatttatttcggttttttaaagtgttggaattataggtgtgagttatagtatttaatttagattatattttttatttggtttttggataggaaggataggaggttatgttttaaaaacgtggtggtatacgtgattttagttatttggggagattgaggtaggagaatcgtttgaattcgggaagcggagattgtagtgagttgagattgtgttatgtattttaatttggataatagagtgagattttattttaaaaaaaaaaaattatatatatatatatatatatatgatttagtttaagatttaggagttattaacgaggttataatttttttatattttatagtgttaaatttttatattatatttaattaaatattagaaaatattaattagtttatagtgttagattataagaatgtttttttttgtatttttttgtatttcgatttttagaatttatttttttttaagtagattaattttgaaattattattatttaatggtatattaggataatattgttttatgattttagggatagtttttgtttgtttaaaaatgttttgatataaaagttaagaaagttagagttaaaaaggagagttatattttagtatgtaaataatatttttgtatatagttttattaaagaagatttaaataaaaatgttatttaagttttaaatttttttaaaaaaaattagttttttttatttaagtttaaatttttttattaaaagtgaaatatttgtagtatattttaaatttaggaaattggattttgtttattaaataaaagtttatttagaagtaaaatttttataaataataataataataaaaaaaaaatttaagaatttttttgggtatagtaggattttgtagaattgttaagttattgtatgacgttaatagggttaaaatataagttatttaaatgattaaaaagtagaaggttttattttttagttaaataaaggggtttatatagtaataaattatatttgttttttatattaataatttaggattaattagattgttagtttaaaagatttattaatacgcggtcgggtatggtgtttaagtttgtaattttagtattttgggaggtcgaggagggcggattacgaggtcgggagatcgagattattttggttaatacggtgaaattttgtttttattaaaaatataaaaaattagtcgggcgtggtggcgggcgtttgtggttttagttattcgggaggttgaggtaggagaatggcgtgaatttgggaggcggaatttgtagtgagtcgagattacgttattgtattttagtttgggtgatagagtaagatttcgttttaaataaataaataaaaagatttattaatatgttatttggttatataattttaataagtatattgtttaaattatttgggattttattaaaaaaatatttattaagtgtgatatagtttttattttttttggaatttttaataattttaatttttattaatttttggtttttgtttgtttaatttttttataaagtttgtgttttttggattatggtagttttatgttaaaataatggttatataaaaattttaattaatttttgtttcggatttagatttttttaataatttatttttgggatttttaaaataggtagttaggaatttttatgttttaattagatatggttaatgattttaattaataaaaagtaaatataaaatattgatttttttttttttttattaatttttaaaaataaagaataaaaatttttgcgggtagttaaattaggtaggaataatatacggtggttgtagggaaataaataattttaggtagtagttttatataattagtaaaaggaaattgttaaaatagttgtaagggttaagaagatttcgaaaattaagatgtgggttaagttggttaagattgatgggaattaatatagtattggatttgatttaggttttatttaggattttattatatatttattaatatattaaattatatatttattagcgttgtgatagttttaggagtatttatatttggtgtaaatatgagtggtattagttgggtatagtggtttatatttgtgattttagtattttgggaggtcgaggtgggcggattattaggttaggagtttaagattagtttggttaatatggtaaaattttatttttattaaaaatataaaaattagttgggtatggtggtacgtgtttgtaattttagttatttaggaggttgaggtaggagaatttttttaattcgggttggggggtaggggtttttttttgggttatagagagagattttttttttaaaaaaaaaaaaaaaaaaaaaaaaaaaaaaaaaaaaaaaaggatgatattatagttttaagaaatttttatttttttttagaaatttttatgaatatttattttttggttaaagaaatttataaagatggtaattttaaattttatggtgtaattgttttttggtgtaattgttttttttgagtcggtttatatttttttttttttaatgtgtattttttattgtaataaatttttatatttttattattttttgatttatttttgaatttttttttgtagtggtgttaagaatttggatattggttagggttaaggttttattaatatttgggattttttttagtttattagttttatttggagtttcgagttttagtttttttaaggtgaacgggtattttttttggatattaggaggaaatgggaaagaagaaagtttttattttttgttattttatttttttagggtttataagatttatatattagatagtgtacgtttttttattaaaaagttaggatatttttagaggggaattattacgaggagaagtaaacgttaaattttattttttttatgttgtttaagggtagtagttgggggttttgatttttatgattttatgtttgagatgtttttttgataggtggagtgtagtggtacgatttcgggttattataatttttgttttttggtgtaggatataataaatttttttttaaaggttttagtttgtaaattgttaagtataatgagttttgagattttttttaaagaattaatgtattagttatgtttagttttttattttaaagttttcgtttttttgtttttagttttagtaaataattattttttagtttttattatttgtttcgttttgagttatttttggttatttattttgatttgagttattttgagttatttgtttttattaaattatttatttcgttattttgatttgtgtttttattttttttaaagtagttaatcggaattagtttagattgtgtagtttaattttagttaataggggaatgatatagtagtaggggttatttgtattaggaataagaattttttttttttttttatttaggtgttttttgttattgttttatttataagtcgtatttttttatagaagtaaaattgttttgttgagaaaattaaatttatgtttgagtgttatttttttggtattattgaaaatttatttataatattgg

SEQ ID NO: 525 - DNA, 5369 bp, Artificial Sequence
  chemically treated genomic DNA (Homo sapiens)
ttataggtgggttttcggtgtgtgtatgtttgatgtttgagagttagaggtagtgatttattattgcgtgtgtgtttgtgtatgtgtatttcgaggtttgtgtgtgttttggtgtgaatttggttttttttaaatatttatgtgtggttaggcgtggtggtttatgtttgtaattttagtatttcgggaggttaaggtagatggattatttgagtttaggagttggagattatagtttgggtaatatagagagattttatttataaaaataaaaaatagaaaaagttagttaggtgtcgtggtatatatttgaagttttagttatttcggaggttgaggtgtgaggattattttagttgggaggttgggtttgtagtgaattatgattatgttatagtattttagtttgggtaaaagggtaagattttattttaaaaataaaattaaattagaaatatttttgtgtggttatgaattttgtgtgtgttttgaggattgcgggtttttgtgtaatttttacgtatgtgtggatattagtatgtatgtttttgtgtttacgcgaatcgttttacgtttttaggtggtttgtaggggattggtgtagtttcgaggatatttttagttgttcgtcgtttttttatttttacgtcggtttttatcgattcggcgggagttttgagttttagttttttagagtaatggtggagcgggtagggtatttaaaatgattttatttttttagttttttaaagtgtttttagttggttatgtaaatgttttttttgtgtagcgtttcgtggatttttttttgttttattttttaattttgtgtaaagataaggttttatttcgttgtttagattttttttggttttttattttgatttttataatcgtttcgagggggtaggtcggagcgggttttgaaaatatatatttgtatattttttttagttcgcgttttttttttttaagggtaattcgtatttttttgttttcgttataaaagatatttatgtaaattattgacgtgcgaatttatatatattttttaattaattgcgtagttattttttcgttttttattttcgtttttggacggcgagaaggaggaggagttgattatgtaaatgaagttacgcgtatcgcgttgtcgaattcggtgtttcgcgttgggcggggggcgggtaggtttgtttatgtaaattatattatttgcgtgtttcgtttcgtcgacgttatttgattttaatatgtaagaaacgtttttttttagattcggttttttatattgcgttttttttttcgcgtaaagggggcggggcggaggatgtaaatgaatttcgtgtaggttacggatcgttgttttttttttttttggtaggggggttgtttcgaattttttcgtttcgtttcgtttcgtttcgcgcggttcgggtttgcgtaggcgtcgtttttttcgcggggcgcggttacgtgtttatcgggcgaggcggggcggggcgtcgcgcgcggtgggggcggggtatggcgcgttgtgcggcgtagggcggttggtataaacggcggcgtcggggtcggaggaaaaagttcggtgaggaggtcgcggggcgagaagggagcgggaggagattaagtcggagtcggggcgtcggcgcgaatcgggcggggtgtgggggcgcgcgtcggggtttgtcggggcgatttcgggaagggggatgtgggtgcggcgcgggggaggggacgcgcgtcggttacgttgggtgtcggtcgttgtgggggttggggtgggggcggggagcgcgcgtcgggcggaggtcgagtggagggggaggggagggggttcgagcggtttttaggttttgtttttgtcgtttattgcgtttagaaggggttttagggtttgtttcgggttgggggcgttggggtgttttggatgggggtatttttatttttcgttttgttttcgggtgcgtgtattttttttcgtttttttttttgtcgtcgcggatttttttttcgagggtttttttcgtcggttagtttcgggatttttttttcgtttgggcgtgtgttcgttttcggtcggttttttttcgtcgggttcgggtcgattttatcgtttcgtttcgtttcgggtttttttttttagttttttttcggtttatttttttgtttttgggtttttcgtttttttgttttggattttttagtttttttgttttttatttagaaagggaaattgaggtttagtaaaggaaagggatttttttgggttcgttattaatttattttgaaagtttgtttttaagatattgtttattgggataagttttttttatatgattttagatattatttttttattttatgttttagggtaattaataagtttaaaatttattgatttttatgtttataaatattagagtttttttaatttgtttttttttattttttttttggttaggttatggtaatttgttgattatttagtgtattttttagtgttaattttattgagaaataaattttttagatttttgttttttatttttttaagaaataagaaggaaaaggaggagttaggtttaggtgtaggttggtgaataggattagagggattgatatttgttaagttggtgttaatttttttttttatttttttttttttaaaattaataaataatttttttttttttgttttgttttttgatttttgttttttttatataggttttagagtttagtattttagaatagtttgagtaagatgttagttttgggggtgttaattttatttatttttatttgtttaaagttggtgatttagaggataggtgtaattttaaatggtttaattattagagtttgttttgtggttatttggggttttttttagggtttggttgaggtttattttagatttatataggattaatattagtatttgttttatgtttatgttagagtttattgggattaattttagattttatatggtgttatttttatgtttttttgaagtaggatatttttatgtttttaatgatatttgagataatatatagagtttttttggtattaaatatgattttaatatttttttggtgttaagtttagtgttaatttgttttttattttcgtatatatttgggggtagttttaaagttaatacgatgtttttttttttttggttatatttgatgttgatattagaattcgttaatgttattagtgtgtttattgttgatgttagttttagtatttattttttgttaaggttggttcgtatttgatttttagggtgatttaggttagttaatgaaggggggcgaggagaaagtttatattttagtttttttatttattttttgtgtgattttatttaagagggtttatggagtttagatttgtttatttttaaaatgaggatgattacgatgaattaattttattgttataaagatttaattagattatatatatttagatttaatttttttatatatgattatgtttattaaagggtaattgttttgtttattaaggaagaatttttttgaaggaaggataggagggttatttattttttttttatttatatttattttaggatttgtttttgtgtttaatattggagtttattttaattttttttgcgattgttttttttgtttgttaatagtagtagtttttgataaagtaggaatcgtttttaaaggagatttaatttatttttaaatgtgattttttttttttaaatattttttttttattggtaggaaaattaaatttagaaaggggaattaagtatatagagtaggagagatgggagtttagggttatttatatatgttttttgtttattgtttgttttttgttttttgtagatttttatataaaatgagaaatataaataataattataatattaatagggatgatataattaatttagtgggtttttttgaggatttgggttggaaattagcggataatttttgggatatttgagatttttttattatttgggggttgttattattatttttttagatttagttaatttttttgttaatcgttaattttaggtatttttttttaggtgtggggaaagtttttttgaaatatggttttggttttttattttttttttaattagagatgggtagtggaggttttatggtatttattttggttttattttgaggttttaatgaggattttgggtattaagagatagttttgggtaaaagtaaaattaagttagtttttgggtttattgttgggttgttgggttttttgggagtatttgtttggtttgttatatatttttttttttagaaattttatatcgtatagttttgggtttttttagatttcgagatttttaagtttatatgtttggagtttttttttttgagaattttaattttgtatttttcgtaatagaagatttttagatgtatagatatagtttttattttattttaataaaatttagatttttggattttttttttttggaatgtttaaatttataattttggggtgtatttttatttttagattttaaatttaaagtttaagtgtttttttatgtaaatattttaaattttttagttttatagtttatttgttgtttttttttaaatttatagttttgcggtattttttttgaagtattatagatttagtttggaggttttttttttgtttagttgttttggggtttttttatttttttttgttggttgtgttttaagttaggtggtatttatggtggggcgtgtagttgggaggtgaaataaggtgattatgtaattagttaaagtttattttttttttttaggtagtataaaggtaaattattttatttattattatttgttattttattattattatgttggttttagggttgtttttggtggttttgttggtttgtttgattgtgatggttttgatgtttgtttggtagtagaggaagagtagggggaagttgttttcgggatttattttattgttttttattggaaattatttttagttgaatatagagtatatatgtgattttattatgaaggtgttttaaggtaggaagatgggtggtatagggtgggggttgtttagttggttggggttttgtggtaggggattgattagtgtggattagagttttaggaaagggagttttggagttttagtattcgggttttagttaggaaagataggattttgggatgtttagttttttgattgtgagaatttgggggtgaaggattttagtatttgatatttcggtgttgggttttatttagagtgggggttgttttttttaattatttttattcgtttttattagt

SEQ ID NO: 526 - DNA, 5369 bp, Artificial Sequence
  chemically treated genomic DNA (Homo sapiens)
attgatggaggcgagtgggagtggttagagggagtagtttttattttgaatggggtttagtatcgagatgttaagtattgggattttttatttttaggtttttatagttagggagttggatattttaagattttgttttttttggttaggattcggatgttgaaattttaaaatttttttttttaagattttggtttatattggttaattttttgttataaagttttagttaattaggtagtttttattttgtgttatttatttttttgttttgggatatttttatgatggagttatatatgtgttttgtgtttagttggaggtagtttttaatgaagggtagtggggtgggtttcggaggtagtttttttttgttttttttttgttgttagatagatattaagattattatagttaggtaggttagtaaggttattagaagtagttttgaggttagtatggtggtagtgagatgatagatggtgatgggtggggtggtttgtttttatattgtttgaaaaagagggatggattttggttaattatataattattttattttattttttaattatacgttttattatgaatgttatttagtttgggatatagttagtaagggaggataaggggattttagggtagttgaatagagagggggtttttagattaaatttgtggtattttaggaggggtgtcgtagggttgtggatttaggagggggtaatagataagttgtagaattgaagagtttggaatatttgtataggggagtatttgggttttggatttggggtttgagagtgagaatgtattttaaagttgtggatttgggtattttaggggagaggaatttaaaggtttgggttttattagggtgagatggaagttgtgtttgtgtatttggaggttttttgttgcggaggatgtagggttaaggtttttaggaggggggattttaggtatatggatttgaaagtttcggggtttaggaagatttagggttgtgcggtgtggagtttttgggaggaggagtgtgtagtaagttaggtaggtgtttttagaaagtttagtagtttagtaatgggtttaggggttgatttgattttgtttttgtttagagttattttttgatgtttagaatttttattggaattttagagtgaggttaggatgggtgttatggaatttttattgtttatttttggttgggaaaggggtggaagattagggttatattttaggggaattttttttatatttggagaagagtatttggagttagcggttggtagagggattggttaggtttggagaaatagtaataataatttttaaatggtggaaaaattttaagtgttttaagggttgttcgttggtttttaatttagatttttagggaaatttattagattgattgtattatttttattaatattatgattgttgtttatgttttttattttatataaagatttatagaggatagaaaatagatagtgggtaggggatatgtgtgagtggttttgaatttttattttttttgttttgtgtatttagtttttttttttggatttggtttttttgttagtggaaagggagtgtttgggaagagaagattatatttgagggtgagttaagttttttttaagggcgatttttgttttgttaggggttattattattagtaggtagagggaatagtcgtagaagagattggggtaaattttagtgttaggtatagaggtagattttggggtgggtgtgagtggagaagggatgagtagtttttttgttttttttttagggaaatttttttttagtaaataggatagttattttttggtgagtatggttatatatgggaagattaagtttaggtgtgtatgatttggttgaatttttgtaatagtgaggttggtttatcgtgattatttttattttgaagatgagtagatttagattttataaatttttttgagtgaggttatatagggagtaagtgagggagttgggatgtgaatttttttttcgtttttttttattgattggtttagattattttgggagttaagtgcgggttagttttagtaggaggtgagtgttgagattggtattagtagtggatatattgatgatattggcgggttttgatattagtattaggtatggttagggagggaaaggtatcgtgttggttttgggattgtttttaggtgtatgcgaggatgggaaataagttggtattgaatttgatattaggagaatattgaagttatgtttggtgttaagagggttttgtgtgttgttttaggtgttattgagggtataagagtgttttgttttaggagggtataagggtggtattatatagggtttgaggttggttttagtgggttttgatatgagtatgaggtaggtgttgatattggttttatgtgggtttgagatgagttttagttagattttgagaggggttttagatggttataggataggttttggtggttggattatttagggttgtatttgttttttgggttattaattttggataagtggaggtgggtgaggttggtatttttaggattgatattttgtttaaattgttttaggatgttgagttttgagatttgtgtggagggaataaaggttagagaataaggtagagagaggaaagttgtttgttgattttggaggggaagaggtggaaaggaagattagtattagtttggtagatattaatttttttaattttgtttattagtttgtatttgggtttggttttttttttttttttttgttttttaaaaaggtgggagatagaaatttgaggagtttgttttttagtggggttggtattaagaagtgtattgagtgattagtaggttgttatgatttggttagggaggggatggggagagataggttgggagaattttagtatttgtggatatagaggttaatgaattttggatttgttgattattttagagtatggagtgagagaatggtgtttgaaattatgtgggagggatttgttttagtgggtagtgttttgggaataggtttttagagtgagttagtggcgagtttaggaagattttttttttttgttgggttttagtttttttttttgaatgaaagatagagaaattggggagtttaaaataagagaacgaggggtttagagatagaaaaatagatcggagggaagttgggagggaggattcggggcggagcgggacggtggggtcgattcgagttcgacgggaggaagtcggtcgggggcggatatacgtttagacggaagggaggtttcgagattgatcgacgggaggggttttcggggagagggttcgcggcgatagaggaaaggacggaggagggtgtacgtattcggagataggacgagagataaaggtgtttttatttagggtattttaacgtttttaattcggggtaggttttgaggttttttttgagcgtagtaggcgataggggtagggtttaagggtcgttcggatttttttttttttttttttattcggttttcgttcggcgcgcgtttttcgtttttattttaatttttataacggtcggtatttaacgtaatcggcgcgcgttttttttttcgcgtcgtatttatattttttttttcggggtcgtttcggtaggtttcggcgcgcgtttttatatttcgttcggttcgcgtcggcgtttcggtttcggtttagttttttttcgtttttttttcgtttcgcgatttttttatcgagttttttttttcggtttcggcgtcgtcgtttgtgttagtcgttttgcgtcgtatagcgcgttatatttcgtttttatcgcgcgcgacgtttcgtttcgtttcgttcggtgggtacgtgatcgcgtttcgcggaggggacggcgtttgcgtaggttcgagtcgcgcggggcggggcggagcggggcgaggaagttcgggataatttttttattaaggagaaaggaaatagcggttcgtggtttatacgaggtttatttgtatttttcgtttcgttttttttgcgcgggagggggaacgtagtgtgaggggtcgggtttgggagggggcgttttttgtatgttggaattaagtggcgtcggcggggcggggtacgtaaatgatgtgatttatatggataggtttattcgtttttcgtttagcgcggggtatcgagttcggtagcgcggtgcgcgtgattttatttatatggttagttttttttttttttcgtcgtttaggaacggaggtgagagacggagaaatggttacgtagttagttgagaaatgtatgtaaattcgtacgttagtaatttatataagtattttttataacggaggtaaaaaagtgcgggttgtttttgagaaaagggaacgcggattagaagggatgtgtaaatgtgtatttttaagattcgtttcggtttgttttttcgggacgattgtgggaattagaataaagaattagggaaagtttgggtaacggagtgagattttatttttatataaaattaaaaaatgaaataaaaaaaaatttacggaacgttatatagagaagatatttgtatggttagttgggaatattttaggagattaaggagataaggttattttgaatgttttgttcgttttattattgttttggagagttgggatttaaggttttcgtcgggtcggtgaaggtcgacgtggagatgggagggcgacgagtaattgggagtgttttcggggttgtattagttttttgtaggttatttgagggcgtagggcggttcgcgtgagtataagggtatgtatattggtatttatatatgcgtgaggattgtataaaagttcgtagtttttagggtatatatagggtttatggttatataagggtgtttttagtttagttttgtttttgagatggggttttatttttttgtttaggttgaagtgttgtggtatgattatagtttattgtaggtttaattttttaattaaagtgatttttatattttagttttcggaatagttgggattttaggtgtgtattacgatatttggttaattttttttgttttttatttttgtagatagggtttttttgtgttgtttaggttatagtttttaatttttgggtttaagtgatttatttgttttggtttttcgaagtgttgggattataggtatgagttattacgtttggttatatatgggtgtttaaaaggagttaaatttatattaaaatatatatagatttcggggtatatatgtataggtatatacgtagtagtgagttattgtttttgatttttaggtattagatatgtatatatcggaggtttatttatag

SEQ ID NO: 527 - DNA, 8136 bp, Artificial Sequence
  chemically treated genomic DNA (Homo sapiens)
aatatatatattatttgaagaaaattataaaattttgatgaaagaaaataaagatataaataaatatataaatattttatgtttatggatatgaagatcgttgttagtttttttgatttgatttatagattaatataataagaattaaattttaggaaagttttattatttttattattttttatttttagatgttaataatttgattgtaaagtttatgtggagaggttaaaaaatttagaatagttaacgttaaggagaataaagttaaatgattgattttatttaatttaattttaagatttattatgaagttaattaagatagtgtgtaattggtgaaaaaagttaaatagattaatgtaagtgagtaaagagtttgaagtagattattagaaatatagttaattgatttttgaaaaaaaaggaaagataatttaatgggggaaaaatggtttttttaacgaagattaatggagtaattggaggtttatatacggaaaaatgaatttggaaatagattttatatttttaatgaaagttaattaaaaatatattatagatttaagtcgggtgtagtggtttatgtttagtatttttagtattttgggaggttgaggtaggtagattataggttaggagttcgagattattttgggttaatacggtgaaatttttatttttattaaaaatataaaaaattagttgggtatggtggtacgtatttgtagttttaggttgttaagaggttgaggtaggagaatcgtttgaatttaggaggtagaggttgaagtgagtcgagttgagagttattgtattttagtttaggtgatagagtgagatttagttttaggaaaaaaaaaaaaaaaaaaaatatatatatatatatatatatatatgtgtatatatatatatatgtgtatatatatatatatatatatatatatatatacgtgtgtgtatatatatatatatatatatatattagatttaaatataaaatgtaaaattatgaatttttgatagtataagataggagaaaataaagatgattttgattagtaatggtttttaaaatattataatgaaggtataatttatgaaataaagaatgattaagttggattttattaaaatttaaatttttattttgtaaaagatattattaagggaatgagatgaaaagatagagattgggagaaatatttttaaaagatatatttgataaacgatttttttttaaaaatttttaaaattttataattagaaattagatattttgatttaaaaaatgggtaatagatttgaatagatattttatttaagaagaaatatagatggtaaataaatatatgaaaaatgtttattattaaacgttattacggatttgtaaattaaaattttaatgagatataattatatatttatataatggttaaaatttaaaatattgataaaattaaatgttgataaggatgtgtagtaatgagaattaagttattgttggtggaaatgtaaaatgataaagatattttaggagatagatgggtagtgtttaaaaaaattaaaatatgtttattatattatttggtagttgtgttttttggtatttgttaaataagttgaaaatatatttttatataaaaatttgtatatggatatttatagtagttttatttattattgttaaaaattagaaattattaagatgttttttaatagataaatgaatagataacgtgataaatttatataatgaatgttatttagtgttaataaggaatgaattattaagttatgaaaagatatgtagaaattttatatatatgagtaagttaaattttaaaaggttatatattgtatgattttaatcgtattatattttggaaaaggtaaaattatgtttatattgtaaagattatttgttgttagggtttgtaaggaagggagagagaatacgtaaagtatagaggtttttagggtagtaaagttattttatgtgatattataatggtatatgttattatgtattagttaaattttatagaatgtataatataaagaatgaattttatataaattatgagttttggttgatgatgatgcgttaatgttggtttattgattgtaattaatgagagtttttgattgtgagagagattgtgtgtgggtgtagggaaagaggtatgtggtaattatatattttttatttagtgttgttagaaattttaaattgttttaaaagtttattttaatttattattttagttaagttgaggtttgtattatttagtgattgtggagggtttaatgttgatatttttttgattatttggattgagatgtgaattttatgagatgggatgtgatatgttattgaattgggagttgaaaaattgggattttaagaaaagttttggttgggcgttgtggtttatgtttgtaattttagtattttgggagatttaggtgggtggattataaggtcgggagattaagattattttgtttaatatggtgaaattttgtttgtattaaaaatataaaaaaattagttgggcgtggtggtgggtatttgtagttttagttatttgggaggttgaggtaggagaatggtatgaatttaggagttggaaattgtagtgagtcgagatcgtattattgtattttagtttgggtgatagagcgagattttgtttaaaaaaaaaaaaagaaaagaaaaagttttatattgaggtattgtgattgtgatattttgttttattgagttaataattgtttattttttaaaaaaaaaaaagtaaagtttagagtagttgattttagatattttttttatttatatattatttataattttttttttttgtaaattgaaaggtttaggaaggagtcgtagtttagtaggagagaggaggagttgagttgggatttttattttttgaggaatgaaatgattattataaagatagtaatcgagtttattttatttaaaataaggtagtatatttttgttagagtttagagttttatgagttagggattaagttattgtttttttttgttttgtataaaggtttttttaaggtttttgatttatttaagtattaaatgttataaaattaaatttttttgattttttaatttagttaattggggttgtaattattaatgaaattaatgtttattttgaaaataatttattagattgaattacgaaattttgaattattgtatattattagtaaatattggtggatttaattgaattgaatgttttgtttgaaatgaaatttttgagatgtagggtttatgggttttagttttagttttagtattagtagatagtatgtttttggttaagatattgaatttttaaggtttagtttttttatttcggaaatgggttaattttattgtaagtagaggtaattgagagatttaaaagggatatgaggtgtaataattttttgtaaattgttagaatttttgttaaaaatgattagtaaagttttgtgtaattgtgttttgatataattttattttttttaataaaagaaatggaaataattttattagggaatttagaataaatatgatgatatttttaaagaaaatggttttgtataagtattgatattaatgatttagtaaagtgtatttttttagttgtatttagatttttaatttagtatgttagtttttgttaaggtttatatattgtggtggttttgtgttgtgggtttatttagtgatttttttattttttattttttattgtatttataattgtggttttgtttataattttttttgttttttgtgtattattatattatatttgaaaatgagaaattaaaaataatagaaagtagttatgtttggaggtgattggggggtcgagaagttttagttttttaaatttttagtattaaattttttttttagttatattgagcgttttatttttgtagtgatggagaagggagattttttatttttttttatgagtatttttggtgttgttttttttagagataaataaggggttttatttaatgtgaagtttgttttatgaatagaataaatgtggtgtatatttagaataattaatgtttggaagtttgttttattttgttaaaattgtttttaaggtagttttggtgtaagagataatatattacgatgggtattagaagattttagtttaaattttagttttgttagttatgagttgtgtggtattaataggtgttttgtttttttagggtttttttttttttatttgaaaaataaaaaataataatttttgtttttaggaattttttttagggggtttaatggtaaaggtgtttatatttgttaaggtaatttatttgatatatgtttggttatttaagatatatgagttatgttagttattttatgtttaggttgttgtatttttagtaggttatattaaatatttgaaaggattttattataaagaataaagttttttaatttttgatatagtattgatatattttttaaatatataaggtatagaatatggttatttttgttaaattatatatttttaattggttattaatttaagaatttagaattttgagtaattgtttttgtattagattatttattttagtgtttttaattatgatggtgtattagaattatttgggttaatatttgttttttattattaatatttaggttttaattaagtatagtgaaattggaatgtatagagtggataatggaacgaaggagaataagattaaaggatattttatttttatttgtattagtgggttaaagtttttttagaaggagtatatagtggatttaggtgattggttaatttatttattaaagaggtatatatcgaattagtatggagtgttataaaaggtttggagtgtaagtttatggttgttttaataagaagagaaggttttaatggatttttttgtggtttttgtgttttgttttttatgtttgtttttttttttattttggagatagagttttgggagaggaaaatttttttttggttttattttttttttagtgattggaaatattttatagataggtattaaggatattagtaaatttttaattaatgtaagtatgtttttttagtggtttgtaaaaggtaagtaaatttatttgtattttttaaataaagtgtatttttagaggtatatgttataagaggtaatggtaaagtaaaatattttgaaaggtttttgttgttttttttagtttgttagtgttagaaatagtggaatgaaattatgtattttgtgagtagagaaagatttgggtttttgtatgttagatttaaaataataagtgttaatagtttgaaaagttgtgttttttttttattttataattatttgttataatttttggttgaaggtaaatggtaaggtattgtgggatttggttagtagtttataaagtaattgggttttttttttttttttaggtggatcggtaggttgagaaataatagatatataagatagtgaaagttgggtttaggggggttatcgttttttggttttatggtgttaagaatgtattggatatattagtatttattattaagtttagtgagggtaggggtaggttagtgagggatttagggttatttgattatgaggtgagatggttatatggggatgaagtaattttttaatataatatttgtatgtagaagtatagtatatttgtatgtagaagtatagtatacggagataagaatttataatatagtgtgtgcgttagtaatttttaatagagttttaaaatagaaatataatttttttataatttatgattagtaagatattaattagtagtaataattgtaataaaagttggttataaataatttatggaaataggatgtgaagttagataattagttagattagaaatttttagaagggagtatgttttaattttaaagaggtttagaagagttatggtaagatgagggtatttatagttttattttatttatatggataggtgttttttatgcgtttatttataggttttttataaaggtcgtattttatttttagagttatgaatatttgtttttttgggataggaattttggtgatgtgaaatttttttgattgtacgtttatttataggttttttgtagggggaagtatattacgcgttgttggtttattttggtagtttagtttggtattgtttttatataattttgtatgtaattttgtatttataataatcgggagtattttattttttatttcgtagtaatagttttagggggggtttttttatagtaaggaatatgtttgttattagagattttattaaataagttttttattatattagttatgtgttttatttagaatagttatgaaaattaaatttttttgaagaattaatttatgtttgttgtaaaggaaataattgtgggtttaggattagtaaaagtagataagtggtagaaaagaagttatagatttttatttttagatttataaagtattgttttaattatattatagttataatatataaattttaaaatgattttagtatttagtaatggtaggaagaaggttagaagatgtataagtattagggtttttttttaagtgaaagatggtttagtagtgttaatatgatatgtgaatatttttcgttgtgtaataattattatatatagagagtaaagggttgtaattagtatattaagttttataagtatgatggtatgattagattaagagaatgacgttgtagttatgaagattatttttattagattgatggtagggggtagggtaaggttggtaagattagttaggagttattatatggttattagggagagaagtgtttgaaggttttgtgttagtagtatggtttggttgtgaattcgtttgtagtttgagtttgtaaggtagaataatagggatgaggttagtttgtgggtagttattagggaagttgtattggtaaaattttagggggtttgaatgagaaaagttacgataataagtgttatgtggtttatggaaaagtaatgagtgattttagattagtttggtatagataaaaggagtttgttatgattattttttaaaaggatagtaagaaggaggaataagttataaattttgttagggggttaagaattaaggtgatttgtataattttatagttatttaattttaggagtattgttgtgaggattattgatttggtaattgcggtttttatgtgggtttttgggagttttaggtggagtttatagagagatatttttagtataaatgttatgatgtatgttaattataaaaggttattaaattaggaaattgttagtttttgaagttgggtattggttttaaggtagattcgaaagtgttgataaattttttaagtattagtgtttgaataagcggagttttaaattttggtttgttgtatattagttgtgagatattgaaaatgaatttgttattttttgagtttagtttttttttttttttttttttttttgagatagagttttattttgtagtttaggttggagtgtagtggtataattttggtttattgtaatttttattttttaggtttttatttaagaaatttttttgttttagttttttaagtagttagtattataggtatgtattattatgtttagttaatttttgtatttttagtagagacgtggtattattttgttggttaggttggttttgaatttttgattttgtgatttatttgttttggttttttaaagtgttgggattataggtaggagttattatatttggtcgtttgtttaaaatagagtaaatagatttgttgaatatgttgatgtgagtattaattgtaatttgtatagtaattgtttgattattgttttgaatattataggttatttgagtggtaagtataattattattatgtttttatttaaaatttagaaatatttgaagtttgtgtggttgaataaaagtatataaatataatgaaaatattatgttaaattaggtttagtaaatggataaaatagtaatttcgtttgttgttatttttgtttatttttttagt

SEQ ID NO: 528 - DNA, 8136 bp, Artificial Sequence
  chemically treated genomic DNA (Homo sapiens)
gttaggaaagtagatagagataatagtaaacgaagttattattttgtttatttgttaagtttgatttagtatgatatttttattgtatttgtatgtttttatttagttatataggttttaaatatttttgaattttaaatagaaatatgatgatgattatatttgttatttagatggtttgtgatgtttaaggtaatggttagataattgttatgtagattataattaatatttatattaatatatttagtaggtttatttattttattttaaataaacggttaggtgtggtggtttttgtttgtaattttaatattttgggaggttaaggtaggtggattataaggttaggagtttaagattagtttggttaataaggtgatattacgtttttattaaaaatataaaaattagttgagtatggtggtgtatgtttgtaatgttagttatttgggggattgaggtaggagaattttttgaatggggatttgggagatggaggttgtagtgagttaagattgtattattgtattttagtttgagttatagagtaagattttgttttaaaaaaaaaaaaaaaaaaaaaaaaattgagtttagagaatgataaatttatttttagtgttttatagttaatgtatagtagattaaaatttgaaatttcgtttatttaaatattgatgtttgagaaatttattagtattttcgagtttattttaagattaatatttagttttaagaattaataattttttggtttaatagttttttatgattagtatgtattatagtatttatattaaaaatatttttttatggattttatttaggatttttaaaagtttatatagaggtcgtaattgttaggttaatagtttttatagtagtatttttaaaattagatggttataggattatataaattattttaatttttaattttttaatagagtttatagtttattttttttttttattatttttttgagaaataattataataagttttttttgtttgtgttaaattgatttaaaattatttattatttttttataagttatatggtatttgttatcgtagttttttttatttaaattttttgaagttttattagtgtaatttttttaataattgtttatagattaattttatttttattattttgttttgtaaatttaaattataaacgagtttatagttaaattatattattaatataaggtttttaaatatttttttttttgatagttatgtgatgatttttagttagttttgttaattttgttttgttttttattattaatttagtaggagtagtttttataattatagcgttatttttttgatttaattatattattatgtttataagatttaatatattaattgtagttttttattttttgtatatggtaattattatataacgaggggtgtttatatattatattaatattgttaaattattttttatttgagaaaaaattttaatatttatatattttttgattttttttttattattattaaatgttaaggttattttggggtttatatattgtagttatagtataattaaaatagtattttgtggatttaaaaatggaagtttataattttttttttattatttatttgtttttgttggttttgaatttatagttattttttttataataggtataaattaattttttagagaagtttaatttttatggttattttgaataaaatatatggttaatatagtagaggatttatttaataaaatttttaataataaatatgttttttattgtagggagattttttttgaaattattgttacggaataaaagatgaaatgttttcgattattgtaaatataaaattgtatgtaggattgtgtaaggatagtgttaggttggattgttagaatgagttaatagcgcgtgatgtgtttttttttgtagagagtttatgaatggacgtgtagttagagaggttttatattattaagatttttattttagaaaagtagatgtttatagttttgggaatggaatgcgatttttgtggagaatttataaatggacgtatggggggtatttgtttatatggataagatagggttataaatgtttttattttgttatggtttttttaggtttttttagggttaaggtatatttttttttgagaatttttggtttaattggttgtttagttttatattttatttttatggattgtttgtaattagtttttgttgtaattgttattgttgattaatattttgttaattataggttatggaaagattgtgtttttgttttaaggttttgttagaaattattgacgtatatattatattgtaaatttttattttcgtatattgtatttttatatataaatgtattgtatttttatatataaatgttatgttaaagaattattttatttttatgtgattattttattttataattaaatgattttaaattttttattaatttatttttgtttttattaaatttaataataaatgttggtatatttagtgtatttttggtattatgggattagaaggcggtgatttttttggatttagtttttattattttgtgtgtttattattttttaatttgtcgatttatttgggaaaaaagagagagtttagttgttttgtgggttgttgattagattttataatattttattatttatttttagttaaaaattatagtaaatggttatgaaatgaagaaggaatatagttttttaaattattgatatttgttattttgaatttaatatgtaaagatttaaatttttttttatttataaaatatatggttttattttattatttttgatattgatagattggaaaaggtaataaaagttttttaaagtattttattttattattattttttgtaatatgtatttttagggatatattttatttaaaaaatataggtgaatttatttattttttgtaagttattgaaggagtatatttatattggttaaggatttgttgatgtttttaatatttatttgtaggatatttttaattattgggagaggagtggggttaggagggagttttttttttttagagttttgtttttagagtgaaaggagaagtaaatatgagagatagagtataaggattataagagaatttattgaagttttttttttttgttaagataattatgagtttgtattttaagttttttataatattttatgttaattcggtgtgtgtttttttgatggataaattgattaattatttaggtttattatatgttttttttgaaaggattttgatttattgatatagataaaaataaaatgttttttggttttgttttttttcgttttattgtttattttgtatattttagttttattgtatttggttggagtttaggtattggtaataaaaaataaatgttaatttagatggttttaatgtattattataattgagagtattgaagtaaataatttgatgtaaaagtaattatttaaaattttgaatttttagattaataattagttgggaatatatgatttaatagaaatggttatattttatgttttgtatatttaaaaagtatgttaatgttatattaaagattaggagattttgttttttataatgaaatttttttaaatatttaatatagtttattaaaaatatagtagtttaaatatgaaatagttaatataatttatatattttaaataattaaatatatattaagtaaattattttagtagatataaatatttttattattaaattttttaaaaaaaatttttgaaggtaggaattgttattttttattttttaaatgggaaaagggagattttgggagaataggatatttgttggtgttatatagtttatagttggtagaattgggatttgagttgaggttttttgatgtttatcgtggtgtattattttttatattagagttgttttgagaataattttagtaaaataaaataaatttttaaatattagttattttgaatatatattatatttattttgtttataaaataggttttatattaaatagaattttttatttgtttttaagggaaatagtattagagatgtttatgagaagaaataagggattttttttttttattattgtagaagtgaaacgtttagtgtaattgagggaaaaatttggtgttaagggtttgagaaattagggtttttcgattttttagttatttttagatatggttgttttttattgtttttggttttttatttttagatatgatgtaataatgtatagaaagtaaaggaaattatggatagaattatagttgtggatgtaataaaagatgggaggtagggaaattattaaatggatttatagtatagaattattataatgtatagattttaataggagttgatatattgagttgaggatttaaatataattagaaagatatattttattagattattaatgttaatatttgtgtaaagttattttttttaaagatattattatatttgttttaaattttttagtgaggttatttttattttttttattaagaaaaataaagttatgttaagatatagttgtataaagttttattggttatttttaatagggattttaataatttatagagaattgttatattttatgttttttttgaattttttaattatttttgtttataataaaattgatttattttcggaatgaggaagttgagttttgaagatttagtattttagttaagaatatgttgtttgttagtgttagagttgggattagaatttataagttttgtattttaaaggttttattttaagtaaaatatttagtttagttgggtttattaatatttattgatagtgtataatgatttaggatttcgtaatttagtttagtaaattatttttaaaataaatattaattttattaataattatagttttagttgattagattgagaggttagaagagtttggttttataatatttagtatttaggtaagttaaaggttttggagaagtttttatatagggtaaagaaaagtaataatttggtttttgatttatgaaattttaaattttaatagaaatatattattttattttgggtaaaataagttcggttgttgtttttataataattattttattttttaggaggtaggggttttagtttagtttttttttttttttgttgagttgcggtttttttttagattttttagtttatagaaagaaagaattatagataatgtgtagatagaagggatatttgagattaattattttaaattttgtttttttttttttaagaaatgagtaattattgatttagtgagataaagtattataattataatgttttagtataagatttttttttttttttttttttttttagatagagtttcgttttgttatttaggttggagtgtagtggtgcgatttcggtttattgtaatttttagtttttgggtttatgttatttttttgttttagttttttaagtagttgggattataggtgtttattattacgtttagttaatttttttgtatttttagtatagatagggttttattatgttgggtaggatgattttgatttttcgattttgtgatttatttatttaggttttttaaagtgttgggattataggtatgagttataacgtttagttaagattttttttagaattttagttttttaatttttaatttagtgatatgttatattttattttatagaatttatattttagtttaaatgattaggggagtattaatattaagttttttatagttattgagtaatataaattttagtttgattagaatggtggattagagtaggtttttgaaatagtttggggtttttggtaatattaagtggaaagtatataattattatatgtttttttttttgtatttatatatagttttttttataattaagaatttttattagttataattaatgaattaatattgacgtattattattaattaaagtttatagtttatgtagggtttattttttgtgttgtatattttatgggatttgattaatgtataatgatatgtgttattgtaatattatataaaatagttttattgttttaagaatttttgtgttttacgtgtttttttttttttttttgtaagttttagtaataaataatttttgtagtgtaggtatagttttgttttttttaaaatgtaatacggttggaattatatagtatgtagttttttaagatttaatttatttatatgtataaagtttttgtatgtttttttatggtttgatagtttattttttgttaatattaaataatatttattgtataggtttattacgttgtttatttatttatttattgaagaatattttggtgatttttaatttttgataatgatgaataaagttgttataaatatttatgtgtagatttttgtgtggaaatgtatttttaatttatttggtaaatattaaagagtataattattagataatgtggtaaatatattttagtttttttaggtattgtttatttgttttttgaagtgtttttattattttgtatttttattagtaatgatttagtttttattgttgtatatttttgttaatatttggttttattagtgttttggattttagttattgtataagtgtgtagttgtattttattggggttttagtttgtaggttcgtagtgacgtttaatgatgagtattttttatatatttatttgttatttgtatttttttttgggtgaggtgtttgtttagatttgttgtttattttttaaattaaggtgtttgatttttaattgtggagttttaaaaatttttggagagaagtcgtttattagatatattttttgaaagtattttttttagtttttgtttttttattttatttttttgatagtgttttttgtagagtagaagtttaaattttaataaggtttagtttagttattttttattttatggattatatttttattgtagtattttaaaaattattgttgattaaggttatttttatttttttttattttatattattagagatttatagttttgtattttatatttggatttaatatatatatgtatatatatatatatatatacgtatatatatatatatatatatatatatatatatatatatatatatatatatatatatatatatatatatatatatatatttttttttttttttttttttttgagattgagttttattttgttatttaggttggagtgtagtggtttttaattcggtttattttaatttttgttttttgagtttaagcgatttttttgttttagttttttgataatttgggattataggtgcgtgttattatgtttagttaattttttgtatttttagtagagatgggggttttatcgtgttagtttaggatggtttcggatttttgatttgtgatttgtttattttagttttttaaagtattgggaatattgggtataagttattgtattcggtttagatttataatatatttttagttaatttttattaaaggtgtaaggtttatttttagatttattttttcgtatgtgaatttttagttattttattagttttcgttgaaaagattattttttttttattgaattgttttttttttttttttaaagattagttgattatatttttgatgatttattttagattttttatttatttgtattaatttatttgattttttttattaattgtatattgttttgattagttttatagtaagttttgaagttgaattgggtaaggttagttatttgattttgttttttttaacgttggttattttgggttttttggtttttttatataaattttataattagattgttagtatttaaagataaaaaataataaaaataataaaatttttttggagtttgatttttattgtgttgatttatagattaaattaaaaagattaataacggtttttatatttatgaatatgaaatatttgtgtatttatttatatttttgtttttttttattagagttttgtagttttttttaagtgatatatgtatt

SEQ ID NO: 529 - DNA, 5884 bp, Artificial Sequence
  chemically treated genomic DNA (Homo sapiens)
agttttttaaagtgttgggattataggcgtgagttatcgagattagttttattttatttatttttatttggacgtttgattttatttgagatataggtatagtgatttttagtaggaaatagtttgtttttacgttacgtttagagatttattattggttgtttggtttggtgataaagtttatgcgtaagttttggttggggtggatatgaataggtatatgttaagaattaatttattttttggttagggtgggagattgtgttgtgtttttttagattatttttaggtttagtgatttttagaaggttttatagttttagaaaagttgttattttttttgttaatagtttattatagagaagggtatagattaaagttagtaaagatgaaaggtatagggattagagtttagaatgattaggttaaggttgtagtttttttttttggtggatttttataggtagtgtttaatttttttttaatagtaagtgaggtagtagagagttttgttagttacggaagtttatttgggttttggtgtttatggtttttgttgggagttggttattttaggtttgagttttcgtagtatggttgattttagttatttagtttttagttttttttgaagttagatggatataggtttgacggttttattttcgattatattgttggtataaattgtgttgtacggtttaaggttttagttatgtataaagatattattttaggtaggatattttaaggttttagtagatattttttagttttttgttaagagttagtttggatttttggtttagtggtttgtattgtgtaaggaatgatttttttattttttattatataggttattttttttggttttaatagtaaaatgatattagtttgagtatttgtgtgtgtgtgtgtgtgtgtgtgtgtgtgtgtgtttttttgagatagggttttgttttgttatcgaggttggagtgtagtgatgttattagggtttattgtagttttgattttttgggtttaagtaatttttttattttagtttttttagtagttgggattgtaggtatatgttattatgttttgttaatttttgtattttttgtagagacggagttttattatgttggttaggttgttttcgaattttttattttaggttatttgattgttttagttttttagagtgttgggattataggtgtaagttattgtgtttagttaaattttttttttaatttttttattgaattattggttatttcggattatattgtttaatttttacgtgtatgtatagtttttagaattttttttgttgttgatttttatttttattttgttgtggttagagaagatgtttgatattattttaatatttgtaatgttttaagatttgttttgtgatttaatatatggtgtatttttgagaatgatttatgtgttgaggagaagaatgtgtattttgtagattttagacgaagtgttttgtaagtatttagtaggtttattttttttgtagtgtagattaagtttaatgtttttttattgggtttttatttgggatattcgtttaatgttgaatgtggggtgttgacgtttttagttgttattgcgttaacgttttttttgggttttaataatatttgttttacgtgttttagtgttgtgtgtatatgtatttataattgttatattttgttgttggatgattttttttgtttttttttatagtttttttggttgttgttgtttgtttgttttgttttggagacggagtttcgttttgttatttaggttggagtgtagtggcgcgattttggtttattgtaagtttcgttttttaggttgacgttatttttttgttttagttttttgagtagttgggattataggcgttcgttattacgtttggttaattttttgtatttttagtagagacggggttttattatgttagttaggatagttttaattttttgatttcgtgattcgttcgttttggttttttaaagtgttgggattataggcgtgagttattatattcggtttttttttatagtttttgttttaaaatttgttttgtttaagtattgttatttttgtttttttttgttttttattggtatggagtatttttttttatttttttatttttagtttatgtgtatttttataggtgaagtgtgttttttttagataaaagagtattgagttttgtttttttatttatttagttattttgtgtttttgtattggagagtttagtttatttatatttaatgttattattgttaagtagggatttatttttgttattttgttatttttttttttattgttttgtggtttttttttttttttttttttttttttttttttttttgttttttttttaatgaaggtgattttttttggtggtatgatttaattttttgtttttttgtgtgtgtgtatttattgtgtgttttttttttttttttttttgagatatagttttatttattgtgtgttttttgatttgaggttgtcgtgaggtttgtaaatattattttataatttattattttaaacggatgataatattgattgtgtaaataaatataaagtaaaaggaagattaataaaaattttatattttaagtttattttagtgttttttaattttttgttgtttttttttttttgtttttgagataaagttttgttttgttgtttaggttagagtgtagtggtacgattttagtttattgtaatttttattttttaggtttaatcgatttttttgttttagttttttgggtagtaggcgtttattattatgtttagttaaattttttgtatttttagtagagatggggttttattatgttggttaggtttgtttcgaatttttgtttttaggtgatttatttattttagttttataaagtgttgggattatttgcgtgagttatcgggttcggtttttttatgttttattgtattgtttgttttgaaaagtatttattatttttgattggtttattatttagtttaattaaaataagagtagtttatatattataattatagtattataatattttgtttttttgtgtgtttattattattagtgagttttgtatttttagatgatttttttttgtttattaatattttttttttttttagattgaaaaattttttttagtattttttgtgggatataggtttggtgttgatgaaatttcgtagtttttgtttgtttgggaaggtttttattttttttttttgttggaaggatatttttgttagatacgttattttaggttaaaagtttttttttttttagtattttaaatatgttatgttatttttttttggtttgtaaggtttttattggaaaggtggttgttttatgttatgtattggagttttattgtatgttatttgtttttttttttttgttgtttttaggattttttttttatttttgatttttcggagtttaattattagatgttttgaggtcgttttttttgggttaaatttgtttggtgttttataaattttttgtataaaaaattagttaggtatggtggtgggtatttgtaattttagttatttgggaggttgaggtaggagaatcgtttgaattttggaggtggaggttgtagtgagtcgagatcgtattattgtatttttatttgggcgatagagtaaaatttcgttttaaaaaaaaaattatttgggttcggtggtgtttgtagttttagttatttgggaggtaggaggtttatttgatgttgagattgtagtgagttatgattttgttattgtatttcggttcgggtaatagagtgagattttgtttaaagaaaaaataaaaataaaaaagtaatatattttaaataaaggattttttataatgtttttattagatttttaattagaaatatggaggttaggaagtagtggagaatgacgatttttaggtagttttggaggatgttgttataggttggggtaagggtttttaggttattaattgggagttttgggaatagttttgttgtaaataggaagttatggttcggttagagtttagaatgtgggttgagttgggatttatgtgatagttttgaggtttatcgggagtagtttttggataggagaggttttatttaggaaatttcgggtatggttgggaagtggggtatttggtgtcgggtttgtatgtgtgtgtgattggtgtgtgtgagagagaatgtgtgttttgagtgttagtgtgagtttgtgtatgtgtgaatattgtttttgtgtgggtgattttttgtatgtgtaatcgtgtttttgtaagtgtgaataagtggataagtgtttgggagtggataagagatttgtgtattattaggtgtgtgtatagcgtttgtgtatgttaagagtgtaaggtgaagtgaagggattaggtttatgatgttatttattattaggagttttaaggttttaggtaagtgttagtgatagataagggtgttgaaggttattttggagtgggtaggtgggggtagggaaagggtaaggttatgttttggaggaggggttgtgattatattagggtgtatgagtttagttgggaggtggatggtcgggtttattgagattttggttattttagaagtttgtgtgggtttggggagtttggagtggggagagggggtgattttttcgattaggtttttttattattttattttgggtaagggtttggagtaggaagtagcggtaaggatttttggagtagtttatatttgttttggtttgattttgttattggtagtatagttaatatagtaggtttatttatagtagagggcgaaggttattattagttttttttataagggaagggttacgcgttcggtgtgtcgagagtgttttgtttggttttttgtgtttggtggggtgggggtgttaggtgtgtttagaggagtttagttggtagtgaggtagttatggggttagaagtattggtgtttttggttatgatagtggttatttttttgtttttggtggatttgatgtatcggtattaacgttgggttgtacgttattcgttaggttttttgttattgttcgggttgggtaattttgttgtatgtggatttttagaatatattatattgtttcgattaggtgagggaggaggttttggagggcggtagaggttttgaggatgttttattattagtaaatatgggtggtgggttaaattataggttggattagaagttaggttgagaaggggaagtaggtttgggggacgttttggggaaggatatttatatatggtatgaaggattggattttttaaaggttaaggaagagtagggtaagggtttggaggtggagttggatttggtagtgggtatgtaagtttattgggtaatatatgttatggagtataaagttttttttgttgatattagaaggaaaggttttgggaatggaagatgagttagttttgagtgtcgtttaaattacgaaatcgaggatgaagggggtgtagtgattcggtttaaattttttgtattgtgggttttcgggttttattgtttatcggtatggattattatttgggaatgggatgttaattggggtttttcggtaattttggtgatttttgtaaggttatatttgggtgacgtatttaaattgagtttttttattatagaaggtgtgatttttattttcgttttaggattaggaggttgggttttttttttttatttgtttatttttggtagtttcgggggtcgtttaaggtttaaataggattaggatttgtagtttggggtgattttggtttgataagaggttttgattttttttttgtagt

SEQ ID NO: 530 - DNA, 5884 bp, Artificial Sequence
  chemically treated genomic DNA (Homo sapiens)
attgtagagggagggttagggttttttgttaagttaggattattttagattataggttttagttttatttgaattttggacgattttcggggttattaggagtgagtaggtggaaggaggagatttagttttttgattttggggcgggggtgggggttatattttttgtgatggaggaatttagtttggatgcgttatttaggtatgattttgtaagagttattaaaattgtcgagaggttttagttagtattttatttttagatgatggtttatgtcggtgagtagtgaggttcgaggatttatagtgtaaaaggtttgaatcgggttattgtattttttttattttcgatttcgtgatttaaacggtatttaggattaatttattttttatttttaaggtttttttttttggtgttagtagaagggattttgtattttataatatatgttgtttaatgggtttgtatgtttattgttaagtttagttttatttttaggtttttgttttatttttttttggtttttggaaaatttagttttttatgttatgtataaatgtttttttttaggacgttttttaaatttgttttttttttttagtttggtttttgatttagtttgtggtttaatttattatttatgtttgttggtggtggggtatttttaggatttttgtcgttttttaggatttttttttttatttggtcgaagtagtatggtgtgttttggaagtttatatgtagtaaggttgtttagttcgggtagtggtaggggatttggcgggtagcgtgtagtttagcgttggtgtcggtgtattaggtttattaggagtaggaagatggttattattatggttaggggtattagtgtttttagttttatggttgttttattattaattgggtttttttggatatatttggtatttttattttattaggtatagaggattaggtaggatattttcggtatatcgagcgcgtgattttttttttataaagggagttgatgatggttttcgttttttgttgtgagtgaatttgttgtgttgattgtgttgttagtggtagagttaggttagggtaggtatgggttgttttagaggtttttgtcgttgttttttgttttaggtttttatttagggtagggtggtagaaaggtttggtcggagaagttattttttttttttattttaagttttttaagtttatataggtttttgggataattagggttttagtggattcggttatttattttttagttaggtttatatattttaatgtagttataattttttttttagaatatgattttgttttttttttatttttatttgtttattttagagtgatttttagtatttttatttgttattggtatttatttggggttttagagtttttgatgatgagtggtattatgggtttggtttttttattttattttgtatttttgatatgtatagacgttatgtatatatttgatggtgtatagattttttgtttatttttagatatttgtttatttgtttatatttgtagggatacgattatatatgtagaaaattatttatataaagataatatttatatatatatagatttatattgatatttagggtatatatttttttttatatatattagttatatatatatatagattcggtattaagtattttattttttagttatgttcgaggttttttggatgggattttttttgtttagaggttgttttcggtgagttttaaagttgttatatggattttagtttagtttatattttgggttttggtcgggttatgattttttgtttgtaatagggttgtttttagagtttttagttggtagtttgaaggtttttgttttagtttgtgatagtattttttagggttgtttgagggtcgttattttttattgttttttggtttttatgtttttgattagaaatttggtggaaatattatggaggattttttatttaggatatgttgtttttttatttttattttttttttagatagggttttattttgttgttcgggtcggagtgtagtggtaggattatggtttattgtaattttaatattaagtggattttttgttttttaagtagttgggattataggtattatcgagtttaaataattttttttttgagacggagttttgttttgtcgtttaggtgggagtgtaatgatgcgatttcggtttattgtaatttttatttttagggtttaagcgatttttttgttttagttttttaagtagttgggattataggtgtttattattatgtttggttgattttttgtataagaagtttatagaatattaagtagatttaatttaaagaagacgattttaaggtatttgataattaaatttcgaaaggttaaggataaagaaaggattttaaaagtagtaagagaaaagaaataaataatatgtagtagagttttaatatatgatatggggtagttatttttttagtggaaattttataggttaggggggagtggtatgatatatttaaagtgttgaaggaaaaaaaatttttagtttagaataacgtatttggtaaaaatatttttttaataggaaggagaaataaagatttttttagataaataaaagttgcgagattttattaatattagatttatattttataagaaatgttaaagggagttttttaatttgaaaaaaaaaaggatattaatgagtaagaagaaattatttaaaggtataaaatttattggtaatagtaagtatatagaaaaatagagtattataatattgtaattgtggtgtgtaaattatttttattttaattagattaaatgatgaattaattaaaaataataagtattttttaagatagatagtatagtaagatataaagaggtcggattcggtggtttacgtaggtaattttagtattttgtaaggttgaggtgggtggattatttgagggtaggagttcgagataagtttggttaatatggtgaaattttatttttattaaaaatataaaaaatttagttgggtatggtggtgggcgtttgttatttaggaggttgaggtaggagaatcggttgaatttgggaagtggaggttatagtgagttgagatcgtgttattgtattttagtttgggtaatagagtaagattttattttaaaaataaaaaaagagaaataataaaaagttaaaaagtattaagatgaatttaaagtgtagagtttttattagttttttttttgttttatgtttgtttatataattagtgttgttattcgtttaaaataatgagttataagataatatttgtaagttttacggtaattttaaattaaaaagtatataataagtgagattgtgttttaaaaagaaaagaagaaaaaatatataatggatatatatatataaaaaagtaagaaattaaattatattattagagaaaattatttttattaaaaggaagataaggaaaaaaaaaaaaaaaaaaaaaaaaaagagaagattataaaatagtgagaaaagaaataataaaatagtaggagtaagtttttgtttagtaataataatattgaatgtaaatggattaaattttttaatataaagatatagagtggttgaatggatgaaaaagtaaagtttaatgtttttttgtttagaagaaatatattttatttgtaaagatatatatggattgaaaataaagggatggaaaaagatattttatgttaatggaaaataaaaaagagtaggagtagtaatatttagatagaatagattttaaaataaaaattgtaagaggaggtcgggtgtggtggtttacgtttgtaattttagtattttgggaggttaagacgggcggattacgaggttaggagattgagattattttggttaatatggtgaaatttcgtttttattaaaaatataaaaaattagttaggcgtggtggcgggcgtttgtagttttagttatttaggaggttgaggtaggagaatggcgttaatttgggaggcgaagtttgtagtgagttaagatcgcgttattgtattttagtttgggtgatagagcgagatttcgtttttaaaataaaataaataaataataataattaaaaaaattgtaagaggagataaagaaggttatttagtaatagaatataataattgtaaatatatatgtatataatattggagtacgtaaagtaaatgttattggagtttaagagagacgttaacgtaataatagttaaagacgttaatattttatatttagtattggacgggtgttttagatggaaatttaataagaaaatattagatttaatttgtattataaaagaaatggatttattagatatttatagaatatttcgtttaaagtttgtagaatatatatttttttttttagtatatggattatttttaaggatatattatatgttaggttataaagtaagttttaaaatattataaatgttaaaataatattaagtattttttttgattataatagaataaaagtggaaattaataataagaggaattttggaaattatatatatacgtgaaaattaaataatatggttcggaatggttagtggtttaatgaagaaattaggaaggaaatttggttgggtatagtagtttatatttgtaattttagtattttggggggttgaggtagttagatgatttgagatagggagttcgaaagtagtttggttaatatggtgaaatttcgtttttataaaaaatataaaaattagtaaagtatggtggtatgtgtttgtagttttagttattagggaggttgagatgggaggattgtttgaatttaggaagttaaggttgtagtgagttttgatggtattattgtattttagtttcggtgatagagtaagattttgttttaagaaaatatatatatatatatatatatatatatatatatagatgtttaaattaatattattttgttgttagagttaagaggggtggtttgtgtagtaaaaagtggggaagttattttttgtataatgtaagttattggattaagagtttaaattgatttttgataggaggttgggagatatttgttaaggttttggaatgttttgtttgaaatagtgtttttgtatatagttagggttttggatcgtataatatagtttatgttaataatgtgatcgagggtggggtcgttaggtttgtatttatttgattttaggaggggttggagattgagtaattgaggttagttatgttgcgggggtttaagtttaggatgattaatttttaataaaaattatggatattaaggtttaggtgagttttcgtggttggtagggttttttgttgttttatttattgttgggggagaattaagtattgtttgtaggagtttattagaaaagagagttgtagttttggtttggttattttggattttggtttttgtgttttttatttttgttgattttaatttgtatttttttttgtaataaattgttaatagggagaataatagtttttttagggttgtgagattttttagaaattattgaatttgagggtggtttgggggagtataatatagttttttattttagttagggaatgggttgatttttggtatatgtttatttatatttattttagttaagatttacgtatggattttgttattaagttaggtagttagtgatgggtttttgggcgtgacgtgggggtaggttgttttttgttgagaattattatgtttgtattttaagtaaagttaggcgtttaggtaagagtgaatgaggtgaggttggtttcggtggtttacgtttgtaattttagtattttgggaggtt

SEQ ID NO: 531 - DNA, 5999 bp, Artificial Sequence
  chemically treated genomic DNA (Homo sapiens)
cgattttttgattttatgattcgttcgttttggtattttaaagtgttgggattataggcgtgagttatcgtgttcggttataatggtgatttttaaattaaaaataattgatggggaaggttttttagaaaatattgtttaaattttaaaggttataaaggaaaagtttgaaaagtttaattgtataaaaatttaattttttatatgggaaattaaataagagattgggaggaatttttaaattattaaatatgaaaataattattatttatttgatagataaagagtttttaaaatttgagaggaaatatgtaaaattttaatatgaaaagggaaggaattgttttattaaaaaagaaatttaaataaataattagtagatgaaaagatgttttatttttttattgattagagaaatgtaaattaaagtaatgatatatgaatttttagttatcggtgattggtagtatttagtgttggagtagatgtgtagaaattggtttttttattatattgtggggggttttaagtgttttaattttttgaggaagtagttttatatatttattaatattgtaaatttatatatttagtgatttaatcgttttatttttataaaattgatttatagagataggtgtatgtttgaataaagatatatttatagggtattattgtggtattttttgtaatataaatagttggggaaattatttgaattgtttattaatttaaaatagataaattgtgaaatataaaatgtagtatgtgtgtgtatgtttatataaattgtttttgaagtttggaagaatatatagaatatttataattatagtatggtatatattattgattagtaattaattttatttttaatttttttaatattttgatatatttatttaaaaggtttttttattttttagttttttttgtatagaggagtggtgatattttaattaagaatttaaaaaattttagattttttggaagttttttggaaagtttttatttttttgataaataggatagataagagaagtatttttagaatggtaggataagaagttttgaaaatttgtttttttagaattgtaatgtgaatattagttaaagtgttgaaaaatgaatggagttttagagatttttgggatattattaagggtatttaataggtataatgggaattatagaaagagagaaaataaggggataaaaatattatttgaagaaataatgggtgtaaattttttaaatttgatgaaaaagatttatttatatatttaaaagtttaataaatgaatatttatttattgttatttatttatttatttttaaaatagaataaatgaaaggagagttatatttgtatatattgtagttaaataattaaagggaaattgggagttttggaagtagtaagagtgagatgagtcgttaggtaaattagttttcgataaaatagtaggaatttgtttatttaaaattgaaatgagtcgttaggtaaattagtttttgataaaatagtaggaatttgtttatttaaaattaaaatgagttgttaggtaaattagattttgataaaatagtagcgtttgtttattcgaaatcgaaatgagttattaggtaaattagttttggataaaatagtaggaatttgtttcgtcgaaattaaatgagtcgttaggtaaattagtttttgataaaataatagtatttgttgattagaagttatgggattagtaggtagtgagatgatatagttagggtattgaagaaaaatattgttaattaagaattttatatttagaaaatatttttttaaaaagagagaagtattatagttttttagaatttgtttagtaggttttttggtatttttttttattaatttattaattaaaatttaaaatatgttagttttttggttaagattaaatgttaaaaagaaagagaaattaagatatttttggataaataatatcgagagaatttataagtttgttataagaaatattaaaggaagttttttgggttaaagttaaagaatattagtaatttaaatgtatattatatatagaattaaagtaagtgttaaaaagtattttagtaggtataaaattaaaattgtaaataataaaaagagaattagtagaattttttttttttaatggggtttaaaatatggaagttgtttttgtagggtgaatttgggattcgtagtttttattttatttatttttgtgttgtttgtattcgttaaaaggagatattttatttttttaattaaaattatttttttaatttttataaataattatttaattttagtaaattttttttatattgttttattagtgagttttattaaaattttgaagtatagaaaatttttttatagtataaagtatttttagttatagagaagataggggttttgtaatgatttttagaatagtgtaatttttatgtaagaatttaatataatataaaaattatagttcgattttatttgtgggtatagatgtaaaattattaaaaatattattaataagttgaatttttagggtgttaaaagagtattattttatgaacgagttggttgtgatgtggaattatgaggtatttttatgatataatataaaaatttatggtaattttatggtatattgtgagatagtgtttttttttagtattatattagtaggtttatggagaaaaattataggattgttttaattaaaaaaagattttattaatttaatttttatttttgataaatattgttagttatttagagaaagaagaaaattgttttaatatagttatttttttgttatatttagttaatagtagacgtgatggaagtttgaagaatattttgttacgggtataggtagaggtataggtattttgtcgttttgattattttattttgttacgggtagaggtataggtattttgtcgttttgattattttattttgttacggatagaggtataggtattttgtcgttttgattattttattttgttataggtataggtattttgtcgttttgattattttattttgttataggtataggtattttgtcgttttgattattttattttgttacgggtagaggtataggtattttgttattttgattattttattttgttttagagtgttttgttaatgggatagatgtaaaataaataaaagtttcggtttttgaaaagaagtatatagaaatgttattatttttaaacgaggtgttttcgtatataaaatttgatgttggttgggtatttaatagtattatggttagaggatttagattatagttgtatttttgtgaggtatagattttttagggtacgcgggtttcgtttgggatgtgtatatttaggtgagttgtatagataaggtgtttttagtttaagggagttagaggtttgttatttggttattggttttgaaagagaggaggaggcgggaggttaatttattcgtgagttagtcgagttttattgttagattttatttttttttgtgttaaaaattagagggaagtttttttttttgaagtttttgttagaggttaacgtttttttttggtttaggagaggtgtagtgttaggtgtagtataattaatgatttgtttatgtggttaataaattgttaagtagaaaaattgggttagaatgtaatatatagtatgtagttttatttttgtataaatataagtatagaatggtataatttaaaatttataagtgatttggttggattgtaaatgatttttattttttttattttttattatattttttattatatataaagatttattgttaatataaaagtataaaattgtaatttatgaattaagaatttttatatattgttagttagaagatagaatgaaaaatattttttttattttaattatatatataaaaaagttttataaaatatttatggattatttttatagaaggtggaagagggtttgtatgaagaaaataattaatatatgaaagaagaagttagttaatgtggagttttattgtgtttcgggattaataaagataagatatttttaaaatcgttttttaaatttattttaatgtaaaataaatttaataaaattttaatgtaattttttaagaatttaaatttggaataattttaaagaataattttttttaattttttatagttagaatatatatttttaaaaaaaatgaaaatagagattaatttttttagaattggttgatttattttttttttttattttttttttatggaattttttagttaatttgagaaagtggaatcgaatttcgatgttgaattttttttttggttttatttatgtggtaggtggtgatttaggtattattgggggttgtttagataaatttttttattagatattaagaggttgttgtattaggagggtcggtatcgtgtttagaggtggtcggtatggggttggagttgtattatataaattttattttaaataaatgtatggggatgtggttggagtttttcgttgtttaattagtgttaaagggtaggacggtattttattttacgtttttaattatgggttggtaatatgtttttggatgtgtttgttggtatagtgataggtgttagtaattagggtgttgatatagtttaattttatttttattaggttattggttggaatttttgggggttattattgcgggaattagtttttgaaacgatggttaatagtagttaataataaattagtaatttgggatagacgagtagtaagagggtattggttggtgggttatttttttttttagaatatattataaaaatttttcgtttttataggattgtttttcgggttggtagtagggttttagcggtattatgtttgttttcggagttatcgtggttttgttggtgtgggcggttttttttttgttggtgtttatgtggaggtaggtgtatagtagttggaatttgtttttaggttttttttcgttttttattatcgggaattttttttagttggaattgaagaatatttttaagttttttattcgggtaagagaaatagtgttgattttagggagaataatttagtaattggatttggtatgtgtgtatttaatttatttgtagataaattgtggttgtttaatattagtttgttgtgaattatttgaattgatagtattttggagcgatatttaaaatgtgtcgtttgtggtgtagttggagttcggagtttgcgtgttaggtttcggaggttttcgtcggtgttttgttttggggttgatgatggggaggtcggcgaggtcgggttgttgcgacgttaggataatcgggttggcggttagatgcgtattcgttgggcgttcgtttgtgtttgttaaagtacgagttgaaacgtgaagtgttgggttagttcgtgtggtattaatatttgtcgtttacgattgttgtgaatattgaatgggttaataaatttaaacgttaaatgaattgataacgtcgttagtacggagtaggcgttgggtgtttgcgtttttgcgcgtgcgttttgtggggcgtaggttgacggcgggcgggggtcgtttgttttagttcgggttttcgcgttagaatcgggtttagaattttgatttcggaagcgggtaacggggtggttggtgggcgcgtttgagggaagggacgtgaggagtcggagttcgcggagttgtcgcggagttgttcgcggagtttaggcgggtggggagtagagtagttggaatttttcgagcgttttgtagacgtagtagttttttgaggggagggttttttttatttcgggttggataaagatagtttttttttacgtttttttgggttttttagagtaatagtaatattcgttcggtaggggtgtggtttagagtttcgtattttttcgtcgcgcggcgggtttgatttttagttacgggttttcgtagt

SEQ ID NO: 532 - DNA, 5999 bp, Artificial Sequence
  chemically treated genomic DNA (Homo sapiens)
attgcggagattcgtggttagaagttaggttcgtcgcgcggcgaggaggtgcggggttttaagttatatttttgtcgggcgggtattgttgttgttttagagaatttagagggacgtggggaaaagttgtttttgtttagttcgaggtgggggagattttttttttaagaggttgttgcgtttgtagggcgttcggggggttttagttgttttgttttttattcgtttggatttcgcggataatttcgcggtaatttcgcggatttcggttttttacgtttttttttttaggcgcgtttattaattatttcgttgttcgttttcggaattaaggttttggattcggttttggcgcgggagttcgagttggagtaggcgattttcgttcgtcgttagtttgcgttttatagagcgtacgcgtaagagcgtaaatatttagcgtttgtttcgtgttgacggcgttattagtttatttaacgtttaggtttgttggtttatttagtgtttataatagtcgtaggcggtaggtattggtgttatacgggttggtttaatattttacgttttaattcgtgttttggtaaatataggcggacgtttagcgagtgcgtatttggtcgttagttcggttattttggcgtcgtagtagttcggtttcgtcggtttttttattattagttttaggataaggtatcggcgggggttttcggggtttggtacgtaggtttcgggttttagttgtattataggcgatatattttgagtgtcgttttaggatgttattaatttaggtaatttataataggttggtattgaataattataatttgtttgtaaatgagttgaatatatatatattagatttaattgttgagttattttttttaaaattaatattattttttttattcgggtgaaggatttgggaatattttttaattttaattggaagaggttttcgatgatgggaagcgggaaagggtttgggggtagattttagttgttgtgtatttgtttttatatggatattagtaggaggaaggtcgtttatattagtagggttacggtgatttcgagggtagatatggtgtcgttggggttttgttgttagttcgggagataattttgtggaaacggaaggtttttataatgtgttttgagaaggagggtgatttattaattaatgtttttttgttattcgtttattttaaattattggtttattattagttgttgttggttatcgttttaaaggttgattttcgtaatggtggtttttaggggttttagttagtgatttggtgaggatggagttggattgtgttaatattttggttgttagtatttgttattgtgttagtaaatatatttaggaatatgttgttaatttatagttaagaacgtggggtgaggtatcgttttgttttttggtattggttagataacggggaattttagttatatttttatgtatttgtttggagtagggtttatgtaatataattttaattttatgtcgattatttttagatacggtatcggtttttttggtgtaatagttttttgatgtttgatgaggaggtttgtttgagtagtttttagtagtatttgaattattatttgttatatgaatggggttagaaggaaaatttaatatcggaattcgattttatttttttaagttaattggaaaattttatggaagaaaaataaaaggaaagagtgagttaattaattttgagaaagttaatttttgtttttattttttttaaaggtatatattttggttgtagaaaattaagaaaaattgttttttggaattattttaaatttaaatttttaaaaaattatattagagttttattggatttgttttatattagggtaaatttagaagacgattttaaagatattttgtttttgttgatttcgggatataatagagttttatattgattagtttttttttttatgtattaattattttttttatatagatttttttttattttttatgaaggtagtttataggtattttgtggagtttttttgtgtgtgtggttagaatgaagagaatgttttttattttgttttttaattggtaatatatagaagtttttaatttataggttgtaattttgtatttttatattaataatgaatttttatgtataatagaaaatatgatgagaaatgaagaaaataaaagttatttataatttagttaaattatttgtggattttgagttatgttattttatatttgtatttatataaaaatgagattatatattatatattgtattttaatttagtttttttatttgataatttattagttatataagtaagttattggttgtgttgtatttaatattgtattttttttgaattaagaaggggcgttggtttttggtagaggttttagggaaaaaagtttttttttggtttttggtataaaaaaaggtgagatttggtaatgagattcgattggtttacgggtgggttagtttttcgttttttttttttttttaaaattagtggttaggtaataggtttttggtttttttgggttgaggatattttgtttgtgtagtttatttgagtgtgtatattttaggcgggattcgcgtgttttggagagtttgtgttttatagggatgtagttgtggtttgagttttttggttataatattgttagatgtttaattaatattaaattttatatacgggaatatttcgtttgaaaataatgatatttttgtgtgtttttttttagaagtcggggtttttatttgttttgtatttgttttattggtaggatattttaggataaggtgaaataattaggatgatagagtgtttgtgtttttgttcgtgataaggtgaaataattaggacgatagagtgtttgtgtttgtgataaggtgaaataattaggacgatagggtgtttgtgtttgtgataaggtgaaataattaggacgatagggtgtttgtgtttttgttcgtgataaggtgaaataattaggacgatagggtgtttgtgtttttgttcgtgataaggtgaaataattaggacgatagggtgtttgtgtttttgtttgtgttcgtggtagggtgttttttaggtttttattacgtttgttgttggttgggtgtggtaaagaggtgattgtattgggataatttttttttttttttagataattaatagtgtttattagggatgagagttgggttaatgaaatttttttttgattgagataattttgtgatttttttttatagatttgttagtatgatgttagaagaaaatattgttttataatgtattataaaattattataaatttttatattgtattataaaagtattttatagttttatattataattaattcgtttatggagtgatatttttttaatattttaaggatttaatttgttaatagtatttttagtaattttgtatttatatttataaataaaatcgggttataatttttgtgttatattaggtttttgtataaaaattgtattattttagaaattattgtaaaatttttgttttttttgtgattggggatattttatattgtaggggaattttttgtgttttaaaattttaatagaatttattagtaaagtaatatagagaagatttattggaattaaataattgtttataaagattagaaagataattttaattggggaagtaaaatatttttttttaacgaatgtaaataatataaaagtgggtgaagtggaaattgcgagttttaaatttattttataaaggtagtttttatattttaaattttattgagaaggaaagattttgttaattttttttttattatttgtagttttaattttgtatttattaaaatattttttggtatttattttaattttgtgtataatgtgtatttgagttattagtgttttttgattttgatttaagagattttttttagtattttttatgataggtttgtgaattttttcggtgttgtttatttaagaatgttttaatttttttttttttttgatatttgattttagttaaaaggttgatatattttaaattttaattaataaattaatgggggagggtattagaaaatttgttagataaattttaaagagttgtaatatttttttttttttggaagaatgttttttggatatagaatttttggttagtagtgtttttttttagtgttttgattgtgttattttattgtttgttggttttatggtttttggttaataagtgttgttattttattaagggttgatttatttgacgatttatttggtttcggcggaataggtttttgttattttatttagggttgatttatttgatgatttatttcggtttcgggtgaataggcgttgttattttattaaggtttgatttatttgataatttattttggttttgggtgaataggtttttgttgttttattaagggttgatttatttgacgatttattttagttttgggtgaataggtttttgttattttatcgagggttgatttatttgacgatttattttatttttgttgtttttaggatttttagtttttttttgattgtttgattatagtgtgtgtaggtatggttttttttttatttattttattttgagaataaatgaataaatgataataaatgaatatttatttattaagtttttggatatgtagatggattttttttattaaatttggggaatttatatttattatttttttaaatagtatttttgtttttttattttttttttttttgtgatttttattgtatttgttagatatttttgatgatgttttaaaggtttttgaggttttatttattttttaatattttagttggtgtttatattgtagttttggaggaatagatttttagagttttttattttgttattttagaagtgttttttttgtttattttatttattaggaaaatgagagttttttaagaaatttttagaaaatttgagattttttaaatttttggttagaatgttattatttttttgtgtaagaggggttggaaagtggaaagattttttaagtgaatgtgttaaaatattaagggaattaggaatgggattgattattaattaatagtgtgtattatattatggttgtaagtattttgtgtatttttttaaattttaaaaataatttatataaatatatatatatatattatattttgtattttataatttgtttattttgagttgatgaataatttaaatggtttttttaattatttatgttataaaaggtgttataatggtgttttgtagatgtatttttgtttagatatgtatttatttttgtaagttagttttgtgggagtgggacggttaggttattggatatgtggatttataatgttaataggtatataaaattgtttttttaaaaggttgaaatatttaaaattttttatagtatgatgggagagttaatttttatatatttgttttaatattagatattgttagttatcgataattgaaaatttatatgttattattttaatttgtatttttttggttaataaagaagtagagtatttttttatttattgattatttatttgaattttttttttaatgaaataattttttttttttttatattgggattttatatatttttttttagattttaaggattttttgtttattaaataaatagtagttgtttttatgtttgatggtttggaagttttttttagttttttgtttgattttttatgtagaaaattagatttttatatagttaaattttttagattttttttttatggtttttggaatttagataatgttttttaaaagattttttttattaattatttttaatttaaaagttattattatggtcgagtacggtggtttacgtttgtaattttagtattttgggatgttaaggcgggcggattatgaggttaggagatcg

SEQ ID NO: 533 - DNA, 5328 bp, Artificial Sequence
  chemically treated genomic DNA (Homo sapiens)
taagatatagaatatttttattatttaaaaaaaatatttttgtgttagtttaataatttttatattttttttttattttttattatttttttgattttttttgttatagatgaattttgttgtttaagaattttatataaatggaattatatagaatgtagtttttcgtgtttggtttttttttttttttttttttttttttttaaagatttatttattttattgtttgtattagtagtttatttttttttattgttaagtagttatgtataatattgtatggttttattttaatttttttatttattgatttgttgatggatatttgggttatgtttaatttttggttgttatgaaaaagtttttgtaaataattttttatttatttatttatttatttatttattttttttttttttattttttttgaataattttttaaaataatttttttttattgtggtaaaatatatataatataaaacgtttattataaaaaatgataacggaggtgatagatatgttaattattttgatttaattattttaagtggtatatatatattaaaatattatattgtattttataaatatataaaattatgatttgttaattaaaaataatattaataaaaataaatgataaaattagttattttaattattttaaatgtataatttagtggtattaattatatttataagattgtggaattatttatttggaattatcgatttttaaaattatttttattattttaaatggaaagtttaattagtgggtattaaattttttattttttattttttttagttttgggtaatttttaatttattttttgtttttatgaatttgtttattttataaattttatgtaagtggaattatataatgtttatttttttgtgtttggtttatttcgtttggtataattattttaaggtttatttatgttgtagtatgtattagaattgtgttttttttttaggttgaattatattttattgtatatgtagagtatattttgtttatgtattttttaaaattttaattttaattttttttagagataggtttttattttgttatttaggttggagtgtagtggtatgattttggtttattgtagtttcgattttttgggtttaagtaatttttttattttagttttttgagtagttgggagtataggtatatgttattatgtttagttaatttttaattttttttgtagagttggggtttattatgttgtttagggtggttttaaatttttggttttaagttatttttttattttggttttttaaagtgttgggattataggtgtgagttattatgttcggtttgtttatttatttatttgttaatggatatttgggttttttttattttttggttattgtgaataatgtttttatgaatattgatgtataagtatttgttttaatttatttttattttttttgggtgtttatttaggagtggaattgttgggttatatgtttgtgaatatttttgtataaatttgtgtatgtagaggtgtttttatttagtttgggtaaatatatagaagtgaaattgttgagttatagggtaggtgtacgtttaattttttgaaaaatcgttaatttaatttttagttattagtgttttatatttttattaataatgtttaagagtattagttgttttatagatatattagtatttgggttttttgtttttttaattttagttatgttgatgtattattttagtatagttttaatatagaattttttggttagacgtagtggtttatgcgtgtaattttaatattttgggaggttgaggtgggtgaattatttgagattagtagtttaagattagtttggattaagatggtgaaattttatttttattaaaaatataaaaattagttaggtttggtggtgtgtgtttgtaattttagttatttaggaggttgaggtaggagaattgtttgaagtcgggagatagaggtggtagtgagtcgagattacgttattgtattttagtttgggcgatagagtgaggatttattttaaaaaaaaaaaaaaggaatttttttgtgatttacgatgttgagtaggtttttaaatgttttggttatttttatttttttttgcgaattatttgtttaaatattttgtttatttaaaaaattggattgttttattattattattgtagtagtagttgatataataaggagttcgtaaatagatttatagttaattgatatttaattaacgtgttaaagtaatttaatgggaaaagaaaaatttttttaagaaattgatatgaagaaataaaattttaatttagtttatattatatattaatttgagatgagttatagatttaaatgttaaagttaaaattataaaagttttagaaaaaaatatagaggtgatttttatgatagcgtaagtgaagattttttgaagaagatatagtaggtaatattttttttttttttttttttttgagacggagtttcgttttgtcgttaggttggagtgtagtggcgcgatttcggtttattgtaagtttcgtagaaggtaatattttatagaggaattttttgtgggtttgggtttgatttgtaatgggttagtttttggggtattatgggtgggaattgggtaaaatttattttaggtttttattatacgggattttagaggtttgggtggaggtttgtgattaattatatgagttttgttacgtattttttaatatttttgataaggatttattgtagtgtttggttttattaagttttttataataaagagatatgagttattttttaagattttttatttttaagaatgtggtttttatatatgagattaaggtttataagtggttaggagagagggggtttgtttagatgggggagtagtgtttgagttggttttaagagggttaagtggttttgtattgaaaatttggatattgagttagggtagggttgggggaaaatttgggttttggagtcgtagggtttgggtttaaatttatagattattttttttttagttgtgtgttggtgggtaatttattggatttttttgagttttggtttttttatttgaggtaaaacgagtttgtcggttggtttgagagttgttttaggtatggtggggagattttgataggtagaggtagttttgtttttaagtagttgatttatagttggggaaataagatagttataaatgtaatattttaaatttaattttttattagaaagtttttttttttaatttttatagttagttttttagttttttgggttttaaatattagtaaaatttttgttttttttttttttttttttttttgtaattatataggtataaagttttattaattttttttgaaatatgtttttttattaaaaagttttgtaaagtcgtgcgtggttgtttatgtttataattttagtattttggaggttgggaggatcgtttgagtttaggagttcgagattagtttggataatatatggagatttatttttattaaaaattttaaaattagtaggggtggtagtggtaagtatttgtggttttatttatttgggaggttgaggtggggggattgttggagtttgggcggttgaggttgtagtgatttgtgattgtattattgtattttagtttgaggtatagagtaagaatttgtattagaaaaaaaaaaaaaaagttttgcggtagttgatattgttattgtttatacgatttttatttttttattttttttagtaggatattaattttgttcgaagtgttaatgaaggttaggtgcggtggttgatgtttgtaattttaatattttgggaggtcgaggtaggcggattatttgaggttaggagtttaagattagtttggttaatatggtgaaattttgtttttattaaaaatatataaattagtagggtatggtggcgtgtatttgtaattttagttatttaggaggttgagataggagaattatttgaattcggaggtggaggttgtaattagttaagattatattattgtattttagtttgggtgataagagtgaaattttgttttaaaaaagaaaaataaaataaaaataaataataataataaaaagtaaagtgttagtgaaggtttagtaaaagattttttttttattgttttttgtagttagggttattatgtgatatagtttagattaatgagatggaggttgagggtttttgggaaagatgttttttttatataggtattattttttttagttttattttttttattttttacgtgaataggttttgtagtttggaggagttatagttgtttttttgagatgttgaggtattttgtttgaagaaggtttttatattatttaatttgattattgggtgagtttttggagaggttttttagtttttgttttttaagtcgaagtattataggggatacgagttttagagttataggattttagttatggtttatgtgtaaagggaattattaggtaattaggggaaatgatgaagaagatttatatttataaatgtggaaagatgttcgtggtatattgttaaattaaaaagttgtttaaaaatagtttttgggttaagtgagatgatttatttatatttttagtataagtatgttttatgtaatatttggaacgtatttgtattaaggggtttttttttttatcggtatattttaggtattttggtagttgttggtttttagtaattttatattttagttgtgtgggagtggggtgtggtatggattttgtgggttattattgttttgagttgtttttttatatattggtatttgtatttgtggtaaatttagtgatacgggggagatgatatataaaaagggtaggatttgagaaagattaagttgtaggttttttgtttataaaatagggtgtgaaaggtattttagcggttgttttattatggttatttgggtttttttgttttttgtagttatgtttttgggtaatttaggtaaggtttttttttcgggatcgattttgatggtttatttagtttcgtatttttaggttggttgaatttggagtttggattttgtgggtatttaggtgtttttgttttttttcggttttttttttcgttatggaggtttggtttttttttagagttaggtttagtttagtgtgttgtttagtttgttattggtttggttaaggaggagagataggttagggattttggttttaattttattggttatattgtgtggtttgagattttttttttttttttaagt

SEQ ID NO: 534 - DNA, 5328 bp, Artificial Sequence
  chemically treated genomic DNA (Homo sapiens)
gtttgggagggaaaggggggttttaggttatatagtgtggttagtagagttaggattagaatttttggtttgttttttttttttggttaggttagtgataggttgggtagtatattggattaagtttggttttgaggggaggttaggtttttatgacgggggagaaggtcggggggaggtaggggtatttgggtgtttatagagtttaagttttaggtttagttagtttgagagtgcgaggttgggtgggttattaggatcgatttcgaggggaaggttttatttgggttgtttaggagtatggttgtaaggagtaggagggtttaggtagttatggtggggtagtcgttgagatgttttttatattttgttttatgggtagggagtttgtagtttaattttttttaggttttgttttttttgtatgttatttttttcgtgttattgggtttattatagatataaatattagtgtgtgaagaagtagtttagggtagtggtagtttatagggtttatgttatattttatttttatataattagaatgtggggttgttggaggttagtagttgttaggatgtttgggatgtgtcgatggagggagaaattttttagtataagtacgttttagatattgtatgggatatatttatattaaaagtataagtgagttattttatttgatttaaaaattatttttaaatagttttttaatttaataatatattacgaatatttttttatatttgtaaatgtagattttttttattattttttttggttgtttaatggttttttttatatatgaattatagttggggttttgtaattttgggattcgtgttttttgtggtatttcggtttgaagagtagaggttggggagtttttttaagggtttatttagtagttaagttgagtgatgtgagggttttttttagatagggtgttttagtattttaaaaaggtagttgtagtttttttaggttataaggtttgtttacgtggaaaatggaaagagtgaagttgaaagaggtggtatttgtataggaaaaatattttttttagggatttttagtttttattttattgatttgaattgtgttatatgatgattttggttgtaaagggtaataggaagggagttttttgttggatttttattgatattttgttttttgttgttgttgtttgtttttgttttgttttttttttttgagatagagttttatttttgttatttaagttgaagtgtagtggtgtgattttggttgattgtaatttttattttcgggtttaagtgatttttttgttttagttttttgagtagttgggattataggtgtacgttattatgttttgttaatttgtgtgtttttagtagagatagggttttattatgttggttaggttggttttgaatttttgattttaggtgattcgtttgtttcggttttttaaagtgttaggattataggtattagttatcgtatttggtttttattgatatttcgaataaaattgatattttgttagggaggatgagggaatgggaatcgtataggtaatggtagtgttagttatcgtaggattttttttttttttttttgatataagtttttgttttgtattttaggttagagtgtagtggtgtaattatagattattgtagttttaatcgtttaggttttaataatttttttattttagttttttaagtagatgagattataggtgtttgttattattatttttgttgattttaaaatttttggtagagatgggtttttatatgttgtttaggttggtttcgaatttttggatttaagcgatttttttagtttttaaagtgttgggattataggtatgagtaattacgtacggttttgtaggattttttgataaggaaatatattttaggaagaattggtaggattttgtatttatatgattataagaaagaaagaagagagaggaggtaaaggttttattagtatttggggtttaggaggttgagggattggttgtgaaaattaggaaaaggagttttttggtgagaagttgagtttgaggtattgtatttgtggttgttttgtttttttagttgtaaattaattgtttgagagtagggttgtttttgtttgttagggtttttttattatgtttagaatagtttttagattaatcggtaaattcgttttattttagatgaggaaattaggatttagaaagatttagtgaattatttattaatatatagttaggaagggaatggtttgtggatttgaatttagattttacgattttaaagtttaagtttttttttagttttattttaatttagtgtttaggtttttagtgtagggttatttaatttttttgaggttagtttaggtattatttttttatttgagtagatttttttttttttgattatttgtagattttggttttatgtgtgaagattatatttttgggggtaaagggttttgaaaggtgatttatgtttttttattgtgggaaatttggtgagattaaatattgtagtaagtttttgttagaggtattgaggagtacgtggtaaagtttatgtagttagttataagtttttatttaggtttttggggtttcgtgtgataagaatttggggtaagttttatttaatttttatttatggtattttaggaattggtttattgtaagttaggtttaggtttataaagaatttttttgtgaaatattgttttttgcggagtttgtagtgagtcgagatcgcgttattgtattttagtttggcgatagagcgagatttcgttttaaaaaaaagaaaagaaaagaaatattgtttgttgtattttttttaggaaatttttatttacgttattataaaaattatttttatgtttttttttagaatttttataattttaattttgatatttaggtttatgatttattttaaattaatgtatagtgtgagttgggttgaggttttgtttttttatattaattttttgaaaagatttttttttttttattgaattgttttggtacgttggttgaatattaattgattgtgggtttgtttacggattttttattatattaattgttattgtaataataataataaagtaatttaattttttaaatgggtaaaatatttgaataggtaattcgtaaaggaagataagaatgattaaaatatttgaaaatttgtttaatatcgtaaattataaagaaattttttttttttttttttgagatggatttttattttgtcgtttaggttggagtgtagtggcgtgatttcggtttattgttatttttgtttttcggttttaagtaatttttttgttttagttttttgagtagttgggattataggtatatattattaaatttggttaatttttgtatttttggtagagatggggttttattattttggtttaggttggttttgaattgttgattttaagtgatttatttattttagttttttaaagtgttgggattatacgtatgagttattgcgtttggttaagaaattttatattaaaattatattgagatgatgtattaatatgattaaaattaaaaagatagaaaatttaaatgttgatgtgtttgtggagtaattggtatttttaagtattgttggtgggaatataaaatattaataattgaaaattggattgacggttttttagaaagttgagcgtatatttgttttgtgatttaataattttatttttatgtatttatttaaattaaatgaaaatatttttatatatatagatttatataagaatgtttatagatatgtaatttagtaattttatttttaggtagatatttaaaagaaataaaagtagattgaaatagatatttgtatattaatgtttatagaagtattatttatagtagttaaaagatggaaagagtttaggtgtttattgataaataaatggataaataagtcgggtatagtggtttatatttgtaattttagtattttgggaggttaaggtgggaagatggtttgaggttaggagtttgaggttattttgagtaatatagtagattttagttttatagaaaaagttaagaattagttgagtatggtggtatgtgtttgtatttttagttatttaggaggttgaggtgagaggattgtttgagtttaggaagtcgaggttgtagtgagttaaggttatgttattgtattttagtttggatgatagagtgagagtttgtttttaagaaaaattaaaattaaaattttaaaaagtgtataaataaaatgtgttttatatatataatggaatatgatttagtttaaaaagggaatatagttttgatatatattataatatgaatgaattttgaaataattatgttaagcgaagtaagttaaatataaaaggataaatattgtatgattttatttatataaaatttatagaataaataaatttatagggatagaaagtagattagaggttatttagggttggaaggagtgggaaatgaaggatttagtgtttattggttagattttttatttgggatgatgagaatggttttggaaatcgatagttttaaatagatgattttataattttgtgagtataattaatgttattggattgtatatttaaaatggttaaaatggttaattttgttatttatttttattaatattatttttaattgataaattataattttatatatttatggagtataatgtgatgttttgatatatgtatattatttggaatgattaaattaaggtaattaatatatttattattttcgttattattttttgtggtaaacgttttatgttatatgtattttattataatagaaaaaaattgttttaaaaggttgtttaaagaaaatgaaaaaaggaagaatgaatgaataaataaataaataaataaaagattgtttgtagaagtttttttataatagttaaaaattagatataatttaaatgtttattaataggttaatggatgaagaaattaaggtagagttatataatattatatataattatttggtaataaaaaggaatgaattattaatataagtaataaaatgaataaatttttaaaaaaaaaaaaaaaaaaggaaaaagaagttagatacgaaagattatattttgtatgattttatttgtatgaagtttttgagtagtaaaatttatttatggtaaaagaaattagaaaaatggtaggaggtgggaggaggatgtgagggttattgggttggtataggggtattttttttagatagtgaaagtgttttatatttta

SEQ ID NO: 535 - DNA, 5826 bp, Artificial Sequence
  chemically treated genomic DNA (Homo sapiens)
tatgatttgattatttagaggtaaggaggaaaagtgtgggatttttttcgtttatttaataagcgtgaatagttgtttgttagttgtttgatagatgttagttatagggttatttggttgtaggggacgggggtaagagttatggaagattttgagatatgttgggagtttttttgtaagaggtttttgatattttttttttatatatagtttttttgtgagttttatttaaattaatttttgtaagtgagtttttttttttggtattagtgtaaataattatttatttgggatatgtttatggttttgttagtgggttgtttggggagtggagatagaaggagttattatatttattttagatgtttgaaagattttgtttggtagtatttttagttttaagtagtgttaggaaggttatgaggggaaaggagggggaggggatgtagaatagatttagattgttttttttaatttttattacgaaggagagtggattgattttaatatttacgttgttgtcgttattttcggtttttttaggatttttaacgttttggttatttttttgttttatagtaagttttgtttttaggattttgtttataggtattttttcgggggtttttttagttttttttttatttttatttttgtttttttttcgttgacgttttttttgtatcgttgtagggggaagggggagagaaaaaatggaaagttagtagttagttatgaaggggttttataaatatttttacggttttattaggattttatggtttttgggagatatttataggaattggggaagttattagaaagggtggattgggggtagttttgaaggaagggttataaaagggtaggtaagttagtcgggaagggtgaggtaggtaaaagaattagggaggaatttaaatggagagtttattatatggttaaaaaaaatatgttaagatttaatttgagaaagttgattgaaaaaaaaaatttttttaaataaaatatgttaagaaatatgttaagtatattttattatttatttaattattataatgatgttggaagtatttatttttatttttaagatgaagaattcggggtttaaagagattagtttgtttaaatttatataatatatggtaggttatataattgattttaagtgtgtttgagtgtaaattttgtgtttttttgatttaataaataggtagtgaaaggagtattggtttaggtttttgaagatgtgggttttgattttaaatttgtttgttatttttttgttgtatgattttgggaaagttaagttttaggtttattttttttaaagtgggtgttttgattaagatatgttttaaagtgttttttagaattttaggaatttgatttaagaagataagatggagatatagaagaaggaagggaagttttgaggtttttagtaaagtttgtaagtttaagagtgtttagttttaggagttagaggaaagattatagataataggagatagagattagagaaggtttatggaattagaggaggaattatttaggttagaaatggggagatagtttattatggttaaggaaaagttattttattttaggattagtttagggaggggttatatgtgtaggttatagaggtttaattattaagaaggaaatttaagggttagaatagggtaatagggaggagagttgcgaagggagagagaaattaaatatcgttttttagaggagagagagtagtttatttttttagagaggtatatagtttgagtgggataagggagaagggtatgtggtttaagacgtttgggtagggcgggtttttattttttttttttatgttagtggttaggtatttttgatagcggtagtattgatagcggtttcgttggcgtttgtttattgtgtagtttttgttgtttcggtaagagtatgtaaggtttttgcggatggtgcgtttgaagaagtttttgtaatttttatagttgtaaatttcgtagtgtttgtttatagggaaaggggaggagtaataagaaggttgtatggagatatttttattatttagtttgtttttaatttttttttagtaaaatttaaagttttttttgtttgttaaatatagagatagggaattaggagttgagtgatgatttagttttagtttttttattgtttagaaattttatacgttgtttttttttttttttgattttttttttaatcgcgttttatattttagttttagtttttttatttttattaggttttttttaggttatttgttttgattaaattttataagttttgggaattttataggtgatgatatatggtttagattttttttttttgtttattttttgagttatatatttgagtttttgttttcgtagattgtatatagtcgtttgttagttttagggttatttggagggggtggatagtgtaggtttcggatttttaagattggtggttttatatttttaggggggttagatttatttttagggagtgatattgttgagttaatttgggatgggggaaatagggaagttataggaagatttattgggaagtagaatgttatagaagtgatggaaattattttttattattaagtaaggttttgtaatgtatattttagaggttgttatttatattgtagtttatgtgaaaggttatttttggagtataattttaaagtgaataaataggttttttttgaaattgtgtaatatagtgattttgaagggtaggtgttttgggaaagtagatgggattaaaagggtagaaaattagatagatgaaaaggatattaagaatattagaattagtcgggcgtggtggtaggtatttgtaattttagttatttaggaggttgaggtaggagaattgtttgaatttaggaggtagaggttgtagtgagttgagattgtgttattgtattttagtttgggtaatagagtaagattttattttaaaaaaaaaaaaaaaaaaaaatatatatatatatataaaaataaagaatattagagtttttttaggggaggaagtatgtattgaaagattagttattttaggaaaggtaaggggttttataaagattataggtttgataaggttagaggattggaaggttaatgggttatggggaagtttatataaggatttggggttataaggaaaataagaaaatgaaagtggttaggtagtaagttggttataattttttatttgggggttgttgataggttcggagaattttgggggagttggagggggtagattaggggattttatggaagaattgatgattggaaagggagagtttagtgggggtggtggtatcgggggtgggggtggggttttagagtttttaagggatggagttgttgaagggggtaggggtggtttaggaggagaagggggagggattttttggggaaggggatttggggaggagttgtttgggtttcgggagtttgagggaggggtatgtataggtatatagatatataagagatagaagagataaaaaaagaaaatgagtttttaaatatttaattagagattttaattttttaatattttatcgtgtcggatttagtttattttatttatttttaagtttagagatattttgttgttaaataatagtgtaatttcggttggttcgatggtagtgggttattagaatttattaatatttgtgttattaaaattggtatataattttttattgttatatttgattggttaaaaaaatttaaaaatagcgtaattttttattgtggtgagaggagggagttgataaggagaggaggatagtttaggtgaggaaaattttttaattaatttatttgaatgaatattaggttattttaaagttatatttgtttcgtgggtggggtagtacgtggggtagattatcgagtttttttatttttagcgtaaagttaggtagttagagcgtgtaagggaaagagataggtaggagagattttttttaagacgtaggatttgtttgtaaacgtttaaagttttgaggtttaagaggaatcgtgttttttttaggttcgcgattttcggtgtttaaggttttaagcggttatagttaggagggcggaagtttttttttttcgtttcgtttcgggggggagggtgttaaggttttcgggagggaggggacgcgtgtttataaataagggggcgggagcgtaaggaaaagagtatcgggggagggtgtgggggaggggtcgtagataaagcggttattggttcgtttgtttttttgttggggtatttatttcgttcgttgtcgtttatttcgtttcgtttagttttttttggtttcggtttcggggtttgttgtttttcgtttgttatcgtcgtcgtcgtcgtcgttgcgggatttagttagggtcgtcgtcgtcgttatcgggacgcgattttataatgtattttttttcgtatttttatcggtttatattgttttgcggtatgtcgttgagggaggaagggcgggcgagcggtttaagatatgatttttggttgagagtagggatatcgaagaggttttagggatttttaaggattgatcggaggattagttgagtacgaggaagtttttgagagaaagattttggtttggattgggtcgaattaagttcgtcgttttgtttagtattaaaatgatagcgttaatgtggtagttatttttgtatagacgggaagtttcggcgcgagttttcgttttttcgtttagttggaaatcgaggaggcggtttttttcggtttgttagttcgtttcgtttattttttttttaaattatttttatattcgcgtatgcgtgttagtgtaggatggattcgtcgttatcggagtgtcgttatattggtaaaggtattagggcgaaggtggaacggaattttttgttttcgcgggatttaaaggcgggattgttacgtttaagtaaatcgggaaaggagaggatttcggagtcggtgagaattttttgttttttttttattattttttttaggttttttttttatttaatgagtcgtagagacgagggtttagagagtttgtaaagtggttggtgaaagattagtgttttagggttttatattcgggaggtggttcgggataaagagaattagttttgggaataatgtaggtgggaatttaagggaatgggagagcggtttatagaggtggacggagggcgcgattggagtaaagcggattttgtgtaggtatagagttgagttaagtggagttattgtttttgtttttttggttagcgtgatggttagaggtttgggggttttttattgggtggtcgtgggattgttgatttgggcgattttggggtttttggtggttggattcgggggttatgacgatttgtacgacgatttgtaagaggatttttatggttatagttataggtatttatatgaagatttttattatggttatagttatgtttatggttatggttatatttacgagagtatttggtatggatatatttacgattacgattatggatatttatatgaggatttatattatggttatagttatggttatttttatgagagtttttattatagaggatatggatatgattatgagtatagttatggaggttatggggagtttggggttttaggtattaagtaggatttggatgttgttattttttgggtttatgtgagtttttaggggatgggagagagaagggttggttttggattgttgggaaattttatagtatttgattttgatttttttttattagg

SEQ ID NO: 536 - DNA, 5826 bp, Artificial Sequence
  chemically treated genomic DNA (Homo sapiens)
tttggtgagggagagttaaggttaagtattgtggagttttttaataatttagaattagttttttttttttttattttttggagatttatataagtttagagagtgatagtatttaggttttgtttgatgtttggagttttagattttttatagtttttatggttatgtttatggttatgtttatgttttttgtggtagaggtttttatgggagtagttatggttatggttatggtgtaaatttttatgtgaatgtttatggtcgtgatcgtgggtatgtttatgttagatgttttcgtgagtgtggttatggttatgggtatggttgtggttatggtggaaatttttatgtgagtgtttgtggttgtggttatggaagtttttttgtagatcgtcgtgtaggtcgttatgattttcgagtttagttattagaagttttaaggtcgtttaggttagtagttttacggttatttagtggggggtttttaggtttttggttattacgttgattagagggatagaggtagtgattttatttgatttaattttatatttatatagggttcgttttattttaatcgcgtttttcgtttatttttatgggtcgtttttttatttttttaagtttttatttatattgtttttaagattagttttttttatttcgaattatttttcggatgtagggttttgggatattaattttttattagttattttatagattttttgggttttcgtttttacgatttattaggtgaggaaaaggtttggaaaggatggtagagaaaaaatagagaatttttatcggtttcgggatttttttttttttcggtttgtttggacgtggtagtttcgtttttagatttcgcgagaataggaagtttcgttttattttcgttttaatgtttttattaatatggcggtatttcggtagcgacgaatttattttgtattgatacgtatgcgcgagtgtggaggtgatttgaggggagggtgggcgaggcgggttaataggtcggaggagatcgttttttcggtttttaattagacgagggggcgggaattcgcgtcgagatttttcgtttgtataaagatggttgttatattggcgttgttattttggtattgagtagagcgacgggtttaattcgatttaatttaggttagagttttttttttaggggttttttcgtgtttagttaatttttcgattaatttttgggaatttttgggattttttcggtatttttatttttagttagggattatgttttgggtcgttcgttcgtttttttttttttagcggtatgtcgtagggtagtgtgggtcggtgggggtgcgaaaagaaatgtattgtggggtcgcgtttcggtggcggcggcgacggttttggttggatttcgtagcggcggcggcggcggcggtggtaggcggagaataataaatttcggagtcggagttaggggaggttggacgggacgggatgggcgatagcgggcggggtgagtgttttagtagaagggtaggcgagttagtgatcgttttatttgcgattttttttttatattttttttcggtgtttttttttttgcgttttcgtttttttgtttgtaaatacgcgttttttttttttcgagggttttagtattttttttttcggggcggggcggggaaggggagttttcgtttttttagttgtgatcgtttgaggttttgggtatcggaggtcgcgggtttgggaagggtacgattttttttaaattttaggattttgggcgtttataggtagattttgcgttttaggaggggttttttttgtttgttttttttttttgtacgttttggttatttggttttacgttgggaatagaggggttcgatggtttattttacgtgttgttttatttacgagataggtgtggttttgggatgatttggtatttatttaaatggattggttggaaaattttttttatttgaattatttttttttttttgttaattttttttttttattataatgaggagttacgttgtttttgggtttttttagttagttaaatatagtagtgggaggttgtatattaattttagtgatataaatgttaataagttttgataatttattattatcggattagtcggagttatattgttgtttgatagtagggtgtttttgaatttggggatgggtggagtgggttgggttcggtacggtggggtattagagaattaaagtttttagttggatgtttgaagatttattttttttttttgttttttttgttttttgtgtgtttgtgtgtttgtatatattttttttttagattttcgaagtttagatagtttttttttaaatttttttttttagggagttttttttttttttttttttgggttatttttattttttttaatagttttattttttggaggttttggggttttatttttattttcgatgttattatttttattgggttttttttttttagttattagtttttttatggggttttttggtttgttttttttagtttttttaggatttttcgggtttgttagtagtttttaggtgagaggttgtgattaatttattgtttggttatttttatttttttgttttttttgtaattttagatttttgtgtgaatttttttatggtttattgattttttaattttttaattttgttaggtttgtggtttttatgagattttttgttttttttgaggtgattgattttttagtgtatgtttttttttttaaaagaattttaatattttttgtttttgtgtgtgtgtgtgtgtttttttttttttttttttttgagatggagttttgttttgttgtttaggttggagtgtagtggtataattttagtttattgtaatttttgttttttgggtttaagtaatttttttgttttagttttttgagtagttgggattataggtgtttattattacgttcggttaattttgatatttttgatgttttttttatttatttgattttttgtttttttgattttatttgtttttttaagatatttgttttttagggttattgtgttgtataattttagggggggtttgtttatttattttggggttgtgttttagggatggttttttatatagattgtagtgtaaatgatagtttttggaatgtgtattgtagggttttgtttagtggtagggaatgatttttattatttttgtgatattttgttttttaataagtttttttgtgatttttttattttttttattttagattaatttaatagtgttattttttgggggtgggtttggtttttttgaagatgtgaagttattagttttaggggttcggggtttgtattgtttattttttttaggtggttttggggttggtaaacggttatgtgtaatttgcggggatagaagtttaggtatgtggtttagaggatgaatagagagggagagtttgggttatgtattattatttgtgggatttttagggtttatggagtttggttagagtaagtgatttgggggaggtttgatgggagtaaagaagttgaagttgagatgtaggacgcgattggggggaaggttagagggaaaaggaagtagcgtgtagggtttttgaatagtgaggagattgggattggattattatttagtttttggttttttatttttgtatttggtaaatagggaggattttaagttttgttagggggagattggaaatagattaaatggtgaaggtgtttttatgtaatttttttattgttttttttttttttttgtaggtaaatattacggggtttatagttgtgagggttgtaagggtttttttaaacgtattattcgtaaagattttatatatttttgtcgggataataaagattgtatagtggataagcgttagcggaatcgttgttagtattgtcgttattagaagtgtttggttattggtatgaagagggagggtaaggattcgttttgtttaggcgttttagattatatgttttttttttttattttatttagattgtgtatttttttggaagggtggattgtttttttttttttagagggcgatatttgattttttttttttttcgtagtttttttttttgttattttgttttggtttttgagttttttttttaatggttaggtttttgtggtttgtatatatgatttttttttagattgattttaggataggataatttttttttagttatgatgggttgtttttttatttttaatttgagtggttttttttttgattttatggattttttttggtttttgttttttgttatttgtgattttttttttaatttttgggattgggtatttttaagtttatagattttattgaagattttagggtttttttttttttttttgtgtttttattttatttttttaagttagatttttaggattttgagagatattttagagtatattttggttaaaatatttattttagagaagatgagtttgaggtttggtttttttaaggttatgtaataaaggagtggtaggtaggtttgggattagaatttatatttttaaagatttaggttagtgttttttttattgtttatttgttgagttagaagagtataagatttgtatttagatatatttagagttagttgtatgatttgttatgtattatatgaatttaagtaaattaatttttttgaatttcgagttttttattttaaaaatgagaataaatgtttttagtattattatgataattgagtgaatggtaaaatgtgtttagtatgttttttggtatattttatttaaaaaaatttttttttttaattagtttttttaggttgaattttggtatgttttttttaattatgtagtaggttttttatttaaatttttttttaatttttttatttattttatttttttcgattgatttatttgtttttttataattttttttttagggttgtttttagtttattttttttagtgatttttttaatttttataaatattttttaagggttatgagattttgatgaggtcgtaaggatatttgtggaatttttttatggttggttgttgattttttatttttttttttttttttttttttgtagcggtataggaggagcgttagcggggaaaggataaggatggggatggggagggggttgggggagttttcgaggagatgtttgtggataggattttggaggtagagtttgttgtggaatagaagagtgattagggcgttgagggttttgggggaatcgggggtagcggtagtagcgtgagtgttggggttaatttattttttttcgtgatgggggttgggggaggtagtttaggtttgttttatatttttttttttttttttttttttataatttttttaatattatttgggattggaggtgttgttaaataaggttttttaaatatttgaggtggatgtgatagttttttttgtttttattttttaaataatttattggtagaattataggtatgttttaaataaataattgtttgtattaatgttagaagagaagatttatttatagggattggtttggatggggtttataggaagattatatgtaaggagggggtgttaaaagttttttataagggggtttttagtatattttaaaattttttataatttttattttcgttttttgtagttaaatgattttgtgattaatatttgttaggtagttgataaatagttatttacgtttgttgagtgggcgaagaggattttatattttttttttttgtttttggatgattaggttata

SEQ ID NO: 537 - DNA, 5413 bp, Artificial Sequence
  chemically treated genomic DNA (Homo sapiens)
ttaagatagtagatttataagattaaagtagtttagagtaatgattaaattatataaacggaagttttggagaattgtttgaattgatagggagatttatagagtaagaaataaattttgttattaggttattgaaatagttcgttttattttaatatatttttttattatattaattaaaaaaattttggatttttataatacgggtttattttggttggtatttatttatttagtaaaatatttattatgtgttaggtattgttttgggtgttgagaatatagtgatgaataagataaagtttttgtagttttagggagtttatatttttgtaggaaagatagataataaataaataaaattttttggtagtgataaatgtaataaatagaaataaagttattattgatcggttttgtattttttttattaagtttcgttttttttatgtttttatttttttttttatttagtttagattttatggtttattattattttttttgttttgtgtgtatttttaatttatttatcgtttttttttttttttttatttgtttagtaaaatattaatttggttaaatgtattttttggatgttgttgttgttattttcgtatttatttttaggtagttgaatatggtcggagaaaaataataatgttgattggttttatttttattttatagttattgattttagtgagtttttgtagttatatggtaagtttacgatattttttaatttatttattttttatttttttatatgattattttatattttttgtttaaaaatttttaatagttttttttatatttatttattgttaataatgttgtttcggattttattgagaaatttaaagaaataaaaattttaaaaatttttatttatatttgttaatttttgttttgtatgggtattgatgttttttgtgtttttttttgttataatggaatagttttttattgttttttttaaggataatttttttatttgtgtattagattttatgtttttttattttttgtggtagatatggagatgtgttatttagatgtttttttaaggaaggatttgttgtttagttgtagattttagagttagtaggtagtttttatttgttagtttttttaggatttgttaaagttattaaagtggaattattttagtcgaggtaatattttttttggggttgtttgtatgcggtgattgagtagtatggcgatataaaagtttagttatttagaatattttgaagagtagtatttattttagaatttttttcgtagttgtttgaagttttgttaagttagttttgtagtttgatttttttttttgtttaattttatttttttttttttttttttatagttttttatttttaataattatttggtgttttaaattttgttttagtttttgtttatagagaatttaatttgatttatttattgtagattggttttagttattgttttttttttttgtattattaatgtttttttttttattgatttatttttattattatataaatatgggttttttttttttaaaattaaattttttttgaattattgttttttttttgtttttttgtatagtaatatttttggaaagagtgtttgaatttattttttgtttatttgtttttttgtatttttatttttggaatatttagatttattattttatagaatagtttatgttattgataatataatattggtatttttagtggttaattattagtttttattttatttgattttttattagtatgtgatttagtggattatttttttttaaaaatatttttttgttatttggtttttcggatataatttttatgtaagtttttttttattttattggttatagttgtttttttttttttttttgttggttttttttttatttttgaattttttaatattggagagttttaaggtataattttgaatatttttttatttttatttatgttttttgttagtgattttatttagttttagggttttaaatattatttatatgttgataattgttatatttattttttgagttagagttttttttgttgaatgttagatttttaaatttaattgttatttttgaatttttattttgaattgttaaaattaatatgtttaaaataaaataatttatttttattttttgtatttttttttttaaaattattttgtttatttttattttcgaagttttttttattttaacgaatagttatttttgtttttatagttgttgaattaaaaattttaaggttattattgatttttatttgattttcgtgttttatatttaaaattttagagtattttttggaataatttagtgggtttttagattttttatttttttaggatttttttaaatgttattttattaataagttattgttttattgttgaatatataaaataaaattttatttattttattggtattttttattttttttaatttgttttattgttattattaattgttatagaatatatatttatttgttcgttgttttgatggtagtgatagtttgtttggagtagttgttgaggggatgttagttgtagtatggaaggcgtggttagagttgtttattttttagagatagcgggcgttaggaatatgtaagagtttcgttttttattacgttagcgaggcgggagatttatgtttttgggtatagttgtagtcgtttagtcgtagttttgtatttagttatttttgtatttttgggggtttaggaaattttttgtttttgtaggttgaaagtgtttgtttttgaggttgtagtgagttaagagtacgttattgtattttagtttgggtgatagagtgagattttgttttaaaaaaaaaaaaaaaaaaaaaaagaatgtgtttgtttttaggtttttattttttttttatttatttttagggtttattttaaggcggagtaaagttgtggttaggtacgggcgttgttgtaatttagttgggtgtgtacgtgtttagggtagtattgatatattagttatttgtcgttttggttttttttggattttgggtattaataagtgcgagaaagaggttggtggggttgagggtggtttcgcgtgggtttgtaggtattttttagtataaatagtttgggcgttatggatgatatgttgatggtgggaggtagatacgtttttggggggaaaggggtaggtttttgtttatttttaagttagggatggtttgaagtttggggggtttggtggttagttttaggtagagtttgtagtttagagtgaaaattagtggtgttttttttgggtttatttatgggttaattagtatatatttttttttttttgagtttataaaaattttagatttagttagcgtttaggtttattagttgtaggaaggagttatttattttggtttttttaattcgttaggattatttgtttgtagaaaggagttgtttattatgggttttttttttattgagggtaggacgttagtcgggataatttttttgtagaaaggagtaatttattttaggttttaggagagttgttttgttttttagtgaagtttttgtttattttgtttattttttagttgtttgcgtgttttattttttttggatataggattagaatttaggatttgttaaatggtaggattgaaagagttgtaatataaataggggtgaaatataattttttatttttaattacgttgtaggtagtaagaaggagagatgagttgtggagtgtggataggatttgagtgggataaatagtgtggaaaatggtatatcgtttgagggtagaaatgatattattcgcgtatgttttggaaggggaataaaaggaaaagggaagatttaaaggaaatgtttaatttttgttttgtaatttagagtttaagtaaattttattgattatatttttattaagtttattgagtataaggattttttaggtgagttagtggttgaagagttgggagaaaataaaggaaattatatataaaagaaggtagtattgagtagggaagatattgttttgagtgtttgtagtgttgaatgtgtaaaaagtatttgtatagatgatttagaattttgggagaagggtttggattcggttaaataatatattttttttattataaaatagagagtgtgtgtgagagaggagaggagaaggaatggggtgggagggagtttttttttttatatttataggggtgtaaatttatgtggttggttatgtgaatttttaacgtggtaggtaggattttttttttttcggtgtattttataagcgatgcggtttttagaaatatagatttgggagttatttattatttagtatgatttttggagtattgatgagatcgttgattaattttttttcgttttagagtaatattgtcgatagcgatttcggagatttttaaatttttttatcgcgttcgtcgcgttttttcgcggttcgggattgtttattattttttttaggaagcgatcgtggaaataataaatacgtaggttttttagcgttttttcgtttcgcgttgttaggtcgtttcgtttttcgttttcgttcgtttcgcgggatatagttcgttcgtatttcggggttcgagcgtcgattatattttaggcgtagtcggggagagtttcgcgcgcgtattttttcgttcgcggtcgaggcgatttttcgcggtttcgttcgttcgagtttttcgcggaggtattcggtcgtttcgtttttttcgtttcgcgttcgttaatttttagttcgcggttttgattggtcgtcgtattttcgttttttttttcgaatcgttattttgaaaattttgttgattttggggagtcgagcgcgcggcgcgagcgttacgttagatagcggttcgcgcgtttttttttcggcgtcggtcgtcgtcgttttttagaattttttcgtgttttcgcgtgttaggttcgcggcggtcgaaattcgcggtaagggttgtttcgggacgtcggaggttcggtcgtttttgtcgcggtcgacgggggagggacgcggttatttggacggcggtttggggcgggggaggggacgtggagggtcggtagttcgggtcgggtcgggaatagcgtaggtcgggcgggcgcgcgcgtacgcggggtagcgggcgcggtttttcgtttcgggaatttttggacggcggcggcggagcgggagggaagtcgtttttggggattgagcgttgcggtttcggttatgggaggaggtaatttttagggtaggtgtttcgcgggaagggtagtattatttagggtggtcgttcggttttgtttgcgggagtaggaggatcgagacgttcggtttttttttcgtatgtagg

SEQ ID NO: 538 - DNA, 5413 bp, Artificial Sequence
  chemically treated genomic DNA (Homo sapiens)
tttgtatgcgggaagaaagtcggacgtttcggtttttttattttcgtaggtaggatcgggcggttattttgaatgatgttatttttttcgcgggatatttgttttgaaagttgtttttttttatagtcgggatcgtagcgtttagtttttaggggcggtttttttttcgtttcgtcgtcgtcgtttagggattttcgaggcgggaaatcgcgttcgttgtttcgcgtgcgcgcgcgttcgttcggtttgcgttgttttcggttcggttcgagttgtcggttttttacgttttttttttcgttttaggtcgtcgtttaaatggtcgcgtttttttttcgtcggtcgcggtaggggcgatcgggttttcggcgtttcgaagtagtttttatcgcggatttcggtcgtcgcgggtttggtacgcgagggtacgaggaggttttgggaggcggcggcggtcgacgtcgaggagaaggcgcgcgggtcgttgtttggcgtgacgttcgcgtcgcgcgttcggttttttagaattaataagatttttaaaatggcggttcgggaaggagagcgggaatgcggcgattaattagggtcgcgagttgggagttggcgggcgcggggcgggggaggcggggcggtcgggtgttttcgcgggaagttcgggcgggcgggatcgcgaggggtcgtttcggtcgcgggcggagggatgcgcgcgcggggtttttttcggttgcgtttggagtgtggtcggcgttcgggtttcggagtgcgggcgggttgtgtttcgcggggcgggcgggagcgggaggcgaggcggtttggtagcgcggaacggaaggacgttagggggtttgcgtgtttattgtttttacggtcgttttttggaaaagatgatgagtagtttcgggtcgcggaggggcgcggcgggcgcggtaaagaagtttagagattttcgaagtcgttatcgatagtgttattttgaggcggaggagaattaattagcggttttattaatgttttagaaattatgttgggtgatagataatttttaaatttgtatttttgaggatcgtatcgtttgtaaggtgtatcgaaaggaaaaagattttatttgttacgttaaaggtttatatagttagttatatagatttatatttttgtaaatataaggggagaggtttttttttattttatttttttttttttttttttttatatatattttttgttttataatagaggaaatatgttatttggtcgggtttagattttttttttagagttttaggttatttatgtagatgttttttatatatttaatattgtagatatttaaagtagtattttttttgtttaatgttgtttttttttgtatgtgattttttttatttttttttaattttttaattattagtttatttgaaggatttttgtatttagtggatttaatagaaatgtgattagtgaaatttgtttggattttgggttgtaggataaaaattagatattttttttgaatttttttttttttttttgttttttttttaaaatatacgcgaatagtgttatttttatttttaaacggtatgttattttttatattatttattttatttaaattttatttatattttatagtttattttttttttttgttgtttgtaacgtggttgggagtggggggttgtgttttatttttatttgtgttatagtttttttagttttattatttggtaggttttgagttttggttttgtgtttaggaagaatgaggtacgtaaataattggagggtgagtaaggtggataggagttttattgagggatagaatagtttttttgagatttgaagtgggttgtttttttttgtaggggggttgtttcgattagcgttttgtttttagtggagaggagatttatagtgggtagtttttttttgtaggtaggtggttttgacgagttgaggagattaaagtgggtagtttttttttgtagttggtaggtttgagcgttggttgagtttggggtttttatgggtttagaagggaggaagtgtgtgttgattggtttatgggtgggtttagaaaaagtattattagtttttattttgggttgtagattttatttggaattggttattaggttttttaggttttaggttatttttggtttgaaggtgggtagggatttatttttttttttttaggaacgtgtttgttttttattattaatatgttatttatggcgtttaggttgtttgtgttgaggggtgtttgtaggtttacgcggagttatttttagttttattagtttttttttcgtatttgttggtgtttaaagtttagagagggttaaggcggtaggtggttggtgtgttagtgttgttttgaatacgtgtatatttagttgggttgtagtagcgttcgtgtttggttataattttgtttcgttttggagtgggttttgggagtgggtagagagagggtagaggtttgggaataggtatattttttttttttttttttttttttttgagatagggttttattttgttatttaagttggagtgtagtggcgtgtttttggtttattgtaattttaggagtaggtatttttagtttgtaggggtagggggttttttgggtttttaagagtgtagggatggttgggtgtagagttgcggttggacggttgtagttgtgtttaggaatatgggtttttcgtttcgttgacgtggtaggggacggggtttttgtatgtttttggcgttcgttgtttttgaggagtgggtagttttggttacgttttttatattgtagttggtatttttttagtagttgttttagataggttgttattgttattaagataacgagtaggtgaatatatattttatgataattagtgatagtagtaaagtaagttaaagaagataggaagtattagtagggtggatgggattttgttttatatatttaataatgaagtaatgatttattaataagatgatatttgaagagattttaagaaaatgggagatttgaagatttattaggttattttaaagaatgttttaaagttttggatgtggggtacgagagttaggtagaaattagtgatgattttggggtttttggtttaataattgtgagaataggagtagttattcgttgagatgagaaagatttcgggggtgggggtgggtaggatggttttagaggggaaagtgtaggaggtgggaatgagttgttttgttttagatatgttagttttgataatttaaaatggagatttaggagtggtagttggatttgagagtttggtatttagtagaagaaattttagtttaagaaataaatatagtagttgttaatatgtagatggtatttaaagttttgaaattgaatgaaattattaatagggaatataggtagggataaggggatatttaaaattgtattttggagttttttagtgttgagaggtttaagagtgagaggggaattagtaaaggagaagagaagagtaattgtagttagtgaagtgggaagagatttatatgaaaattgtgttcgagaagttaagtgataaaggagtgtttttgaaggagggtgatttattgagttatatgttgataaaaggttaggtaagatgagaattgataattgattattggaaatattaatgttgtgttattagtgatatggattattttgtggggtggtgagtttaaatgttttaggagtgggaatatagagagataggtaggtaaggaatggatttagatattttttttaggaatgttgttgtataggaaaataaagaaggagtagtagtttaaagggagtttggttttgaagaaaagagatttatgtttgtatgatgatgagaatgaattagtggagaggggaatattgatgatataagagaaggagatagtagttgaagttaatttatagtaggtaggttaggttgggttttttgtaagtagaagttgaaatagaatttgggatattaggtgattattagaggtgaagaattgtgaagggaagggggaagaagtaagattgggtagaggaagaggttaaattgtaaagttggtttgatagagttttagatagttacgaggggagttttggagtgagtgttgttttttagggtattttgagtggttgagtttttatatcgttatattgtttagttatcgtatgtaggtagttttaggaagggtgttatttcgattgaagtgattttattttagtggttttggtagattttgaaggagttgatagatggaggttgtttgttaattttagggtttgtagttgggtagtagatttttttttgaagaggtatttgggtgatatatttttatgtttgttataggagatgaggggatatgggatttagtgtataagtagaagagttgtttttgaaaaggataatggaaagttgttttattgtaataagaggaaatatagaggatattagtatttatgtagggtaggggttggtagatgtaagtgggagtttttgaagtttttatttttttaagttttttagtaaaattcggggtaatattattgatagtgagtgagtgtgagagagattgttgaaggtttttggataggaaatgtgaagtgattatgtagaaaaatgggagatggatggattagggaatgtcgtaggtttgttatgtagttgtaaggatttattgggattaatggttgtaaagtgagagtgagattagttagtattattgttttttttcggttatatttagttatttgggagtaagtacgaagatggtaataatagtatttaaaaagtgtatttaattaggttggtattttgttaggtaggtaagaaagaaggagaaaacggtgagtgagttgaggatatatataggataaggaagatagtgatggattatagagtttgagttgagtaaggagggaagtaaagatatgagaagggcgaggtttagtgagaagggtataggatcgattagtaataattttatttttgtttattatatttattattattagaaaattttgtttatttattgtttattttttttataaaaatgtaaattttttgaggttgtagggattttgttttgtttattattgtatttttagtatttaaaatagtgtttaatatatagtaagtattttgttgagtgaatgaatgttaattaaaataaattcgtattatgaagatttagaatttttttggttaatgtgatgagaaagtatattaggataaaacgggttattttaatggtttaatggtaaagtttgttttttgttttataaatttttttgttagtttaggtaattttttagggttttcgtttgtgtggtttagttattgttttaggttattttgattttgtagatttattattttaa

SEQ ID NO: 539 - DNA, 6907 bp, Artificial Sequence
  chemically treated genomic DNA (Homo sapiens)
tagtagagataaaaagtttatttttgtggtagtaaaaggggaatttgtttttattgtttttttgttatattgcggtttttttttcgggtttgttttttttagtattttttttagttttttatattttagcggggttttttaattttttaattttattttttttgtttgtttttttttttttttttacgttgttttttttatttagtagttggttggtaattttttttttagttttttgttgaaaattttttagttagcgtttattttttttgttttttttttttatttagagaaatatatggagtttgattttaatggaaatggcgatattggtgagaaacgggtgatttgcgggggtagggtggtgtgtaggtttaagaagatagaggttttttttatatgttttattttttatgatttgggagggggtttatttattatagtgggaggaaggagaatggggatgcggaagtgggagaggagagagagggtttttttattttttttttatttttattttttgtttttagatattatgtttttgaaacgaatgttggagaaatttggagtttttaagatttatttagagttaaagaaattaattggagaggtgtttagtggtttcggggagacgtttagttattttgatttttttaggatgatgttgggtaagagatttgttattttaaaaatgtgagtgttaatttttaattttttttgtatttatttgttttttttttttttatttttatttttgtttataggtttaatatttttatacgttgtttattatttttttttttatttttagagggatttttttaaggtttcgattttatttttatttatagttttggtttttagaaattttaatttttgttttttttttttttttttttatttttatatttttatttttttttagttttttttagtattttatgatttatttttttgagaggagtgttttttgatttttgtgtttttttttattttaattaggattttgatgtatgaggaaaaagcgagagaaaaggaaaagttaataggttttttagttaagaaagttatttttgagttgttttgatttgaagggaaaagggatgatgggattgaaggggtttttaatgatttagatatggaaatagaagataaaattgtaagttagagttaataaattaaataaattatttttttttttagattaagttagtttagtttttatttgggtgattttttttttgggtttgggaaggagagataggttttgagggaaaggtggtaaggatttggttatatgaataatttattaataacgttatagtgtgtttattatagtagatggttttacgtattaagggggattttagttgtgtaagatagttttaattttaaagaatgtaggtaggataaaaatatatgtttaaataaggtatttaggtttatgatagattttatgaagagtaaggaatattatgaattaatattttttattattataagttttgttattttgataaattatttagtttttgtgaggtttttttttaaaaatggggataaagtgatttatgttattgtgtttgatatattataagtttttaataatgtttaaaatttgaatgagtcggggtcgatggtttatgtttgtaattttagtattttgggaggatggggtgggtagattatttgaggttaggagttcgagattagtttgacgaatatgaagaaatttcgtttttattaaaaatataaaattagtttggtgtggtggcgtatgtttgtaattttagttatttgggaagttgaggtaggagaattttttgaatttaggaggtggaggttgtggtgattcgagatcgtattattgtattttagtttgggtaattaaaaagcgaatttcgttttaaaaaaaaaaaaatcgaatatataaataaataaaaaatatttgaatgggtagatgaatgaaagaattggtgttattaaataaagtaaagaatttatagttgggcgtggtggtttacgtttgtaattttagtattttaggaggtcgaagcgggtagattatttgaaattaggagttggagattagtttggttaacgtggtgaaattttatttttattaaaatataaaaaattagttgggtatggtggtaggtgtttgtaattttagttattcgggagattgaggtaggagaatcgtttgaattcgggaggtggaggttgcggtgagtcgagattacgttatggtattttagtttgggtgataagagtgagattttgttttaaaaaaaaaaaaaaaaaaaaaaaaaagattggaaggagaaatttattggagataatgattatggatattttttttaagaattttgttgtaaagggtaataaaacggtatgtgtggtagtcggtcggggagaagggagaagagaattattttggaagtttgaaaatagaagttattttaaattttattgagtttttgattaaaatttttatttgatttttgtaaatttttttgtttttattttttataatgaataagtcgttttttttatttagttatattagtttaggtataggtttttaaatttatgtttttattaatttgttttttgtatttgagatgtatatttttttttgaaatttgggtaagttttaattcgttttttatatttatttatttatatatttttgatagatatttatttcgattattttttatattattttttttttttttttttgagatggagttttatgttggttaggttggtttttaatttttgattttaggtgatttatttattttggttttttaaagtgttgggattataggcgtgagttattgttttcgttttcggttttttttttttttttttttttttttttttttttttgagacgtagttttattttgtcgttaggttggagtgtagtggcgtgattttagtttattgtaattttcgttttttaggtttaagcgatttttttgttttagttttttaagtagttgagattataggtacgcgttattagtttagttaatttttgtatttttagtagagacggggttttgttatgttggttaggatggtttttattttttgattttgtgatttgttcgttttagttttttaaagtgttaggattataggtataagttattacgttcggttttatattttttaataagagtttttttagaaatattttttaattattttaggtataattatattttatttttttattttttttttttttttttttgagatagagtttcgtttttgttgtttaggttggagtgtaatggtacgattttggtttattataattttcgttttttaggtttaagcgattttttcgatttagtttttcgagtagttgggattataggtatgcgttattacgtttgggtaattgtatttttagtagagacggggtttttttatgttggttaggttggtttcgaattcgtgattttaggtgattcgttcgtttgagttttttaaagtgttgggattataggcgtgagttatcgcgtttatttttttttttttttttttttttttttttgagacgtagttttgttttgttatttaggttggagtgtaattttcgtttttttggtttaaggaattttttgttttagtttttcgagtagttgggattataggcgttcgttattacgtagggtaaatttttgtatttttagtagaaatggggttttattatgttggttaggttggttttgaatttttgatttcgtgatttatttgtttaggttttttaaagtgttgggattataggcgtgagttatcgcgttaggttttatttttttatttttataatattttgtgtattatttttagcgtttttaaattatagttattgaatgatttgttgaatgggtataattttgatgggagtagagagttttagaatcgggtagtaagagataaaggagggtaatagtattgtattttataaaatgaaatttattgttaagaaattataaatttttaataattttaaatataaaaatttatttatgaaaattataggttataaaattaaatgttcgttttagtcgatggttgtttatattttgatgaacgagttatttttagtttatttttgtttaaatgatttgtatatattatgtaaataggtagaattgttcgaagaatgtttacgttgcgtggtgcggacgaaacgtttttcggggtttttggattggtttgtttagttattttatttgtatgacgtaatataataattggaaggtttcgtttttttggtgtattttttcgttttaattatttttttaaatttacggtaaagggatgcgagagttggaatttttattaggtttgcggaaatttagtttttcggtagttaatttcgttcgttagttttcgttttttttttttttttttttagttgaaggcgttacgggtcgtgtgtcgttgttttttatttttggcgttttaacgttttttcgtttttatttttttattaacgttcgacgtacgtttcgttttttttttttatattcgtcgtgtaaattttgcgttttaatcgtttagtcgatttgtatcgtattttcgtttttttaatacggtttaacggtcgacgttgggggttcgtttttttagttaatcggggttttagtgtttttaagttttttttttttatgtaaataattttcgtatgtttcgcgcgttcggtttttttttttttttttttaaattaaagatagttttggaagtagagggttagggtagaaagtgtttcgttttttatgtaaattaaggggcgtgtttaggcgcggagggaggtgggaggtgggagggggtgttttcgggggcggcggttgttcggatgggtcgttagtcggggtttagtcgcggagtgagcgagggagacgggaggagtcgaattcggcgttattcgtcgttattttttttcgttttatcgttatttcgtttcggggagtttttaggttcgggtttcggattttcgcgtattcggttaggtgagtttgggtgaatcgtgcgttgacgttttttttcggcgcgggagaggtggtggcggtggcggtggcggcggcggcggcggtggtgggtcggggggaggagaagttgttattagtcgtcgttattttgtttttttgttgtcgggtttgtttgttttttttttttcggtatttttatttcgggattcgtattttcggtagtttatttaggattcgtagtttgtttttaattatttatcgttttggttttagggggtgatttttgcgtttgggttcgtaattttttatttttcgttgcgtttttggttttttatttttatttgtgggtttttttttcggttgtcgtttcgtggtggtgggtcgcgttcgacggttttttcggaagggcgttttttttttatattggatttttttttattatttagcgttgtgtttttttttttggacgttttttttcgtgtcgagttatttttattttagaattttgtttttattttagtatttttgttttttatgttgtttagtcgttttatgtttgtttttttattttttttgtttttcgtttttttttttttttaatttcgtttttttttttgggtttttgtttttttatttcgttgtttatattttttttttttttgttatttttgtttttatatattttttatttgttttcgtatttattattttttgttagttttggtttattcgttatatgatttttgtattcgttttttttttatatatttatttttatagattggtttttttaaatatttacgaagtaatatttattttatttttagtttgttataaagttttttttttttaattttagtttttattttgggtttgtttggatttttttgtttttttttttattattttttatttttttatattgttttcgtttataaacgaatgtttggttattttggaatggattgagagatttgtcgttcggtttgtttagggagttggaggtatcgagtaaagaaatattggtgatggatatttttaatgaggataggaaaacgaagatggttttggttttggttttttgttttttggtttatggttatagggtgttaaggtggttttataatgtttttttttagttttttatatggtaaaatagtattttatttggaggcgattttttttaggagttaatataggagtaagtttaggaaaagatgggatattttaaatatttgaggtttttatagtttgggagtatgtatagttttagttgttttatgaggatttttttggtattaatttttatttcggttgagtaagtttataaaatttttaaatttttagtatatttttttgtaaatttttttagatggatacgaggttgttgggttgggagtttggggtatagggttttgggggtatgattagggagtttgtgtttaataaatagggaatttaaagtgttgtttttttttttttgatggaattgtatgttttttttttagtttttttttgtttgaatttgttttgttgtaagtttttgaaacgattttggtggagagagaagagattattatttgtagggaattattttttgtagataggtataaagggtagagtgtttatattaggaggatgttggatttttatttagatttttttgataaaggtgtttgggggaaaggagggaatatggtatttgagttatgagggagttaagtagattatggttgtttaagaagagtgggtagtttatatagattggaggaaaagatattagagggttttatatttgagtttttaatgataatgtaatggagtttttaagtttttgttatggtttgtataggggatagagattgagatatttgttgtttggtttatagg

SEQ ID NO: 540 - DNA, 6907 bp, Artificial Sequence
  chemically treated genomic DNA (Homo sapiens)
tttgtgggttagatagtaagtgttttagtttttgttttttgtatagattataatagaaatttaaaaattttattgtattattattagggatttagatatgaggttttttggtgtttttttttttagtttatgtaaattgtttattttttttaagtaattatgatttatttagtttttttatagtttaaatgttatgttttttttttttttttagatatttttgttaaggaaatttaagtaaaaatttagtatttttttagtataaatattttgttttttgtgtttgtttataaagagtaattttttataagtaataattttttttttttttattaaaatcgttttagagatttataataggataaatttaagtaagagaaaattaaaaaagaagtatataattttattagagaagaagaaataatattttagattttttgtttattggatataagttttttaattatgtttttagggttttgtattttaggtttttagtttagtagtttcgtgtttatttgggaaggtttgtaggaaggtatgttgggagtttaaggattttatgagtttgtttagtcggaatgggggttggtattagagaaatttttatagaataattagggttgtatatatttttaggttataggaattttaagtatttgaaatattttatttttttttaaatttgtttttgtattggtttttggaaaaaatcgtttttagatgaaatattgttttattatatgaagaattgagaaaaagtattatggagttattttagtattttgtaattatgggttagaaaatagagggttaaggttagagttattttcgtttttttatttttattaaaaatgtttattattagtgtttttttattcgatatttttagttttttaagtaagtcggacgataggttttttagtttattttagagtgattaggtattcgtttatggacgggaatagtgtaaagagatgagaaatagtggggaagaaagtagggaaatttagataggtttagaatgaaagttaaaattggggagaaagaattttatgataagttagagataagatggatgttgtttcgtaggtgtttgaggaggttaatttgtgaagataaatatatgaagggaaaacgaatataagagttatgtagcgaatagattaaaattaatagaaaataatgaatacgaaagtaggtggaaaatatatggaaataggaatggtaaaaaaaaaaaggatgtagataacgaagtaagggggtagaggtttaagaagaaaaacggggttgggggagaaaggagacgaggaataggaaaaatgaaaaagtagatatagggcgattgagtaatatagaaagtaaagatgttgggataaaagtaggattttagagtgggagtggttcgatacgaagaggggcgtttagaggggggaatatagcgttggatgataggagggggtttaatatggaggaaaagcgttttttcgagagaatcgtcgggcgcggtttattattacggggcggtagtcggggagggggtttataaatgggggtgaaaagttaggagcgtagcggagggtagggagttacggatttaggcgtaggggttattttttgaagttaagacggtgggtggttaggggtagattacggattttgaatgaattgtcggaggtgcgggtttcggagtagaggtatcggagggggaggggtaagtaggttcggtagtaggaggataaaatggcggcggttaatggtagtttttttttttttcggtttattatcgtcgtcgtcgtcgttatcgttatcgttattatttttttcgcgtcggaaaagggcgttagcgtacggtttatttagatttatttggtcgggtgcgcggggattcgggattcgggtttaggggtttttcgggacgggatggcggtggggcgggggaggatggcggcggatggcgtcgggttcggtttttttcgtttttttcgtttatttcgcggttgagtttcgattaacggtttattcgggtaatcgtcgttttcgggagtatttttttttattttttattttttttcgcgtttagatacgttttttaatttgtataaagggcggggtattttttattttaattttttatttttagggttgtttttagtttaaaaaaaaaaaaaaaagggtcgggcgcgcggagtatgcggaggttatttgtataaagaggagggatttaagggtattaggatttcgattggttaaggaggcgggtttttagcgtcggtcgttgagtcgtgttgagggggcgggaatgcggtgtaggtcggttgggcggttgggacgtagaatttatacgacgaatgtgggagaaagaggcggagcgtgcgtcggacgttagtagaaagatgggagcggagagacgttgggacgttaaaagtggaaggtaacgatatacggttcgtggcgtttttagttagggagaaagagagagaggacgggggttggcgggcgggattagttgtcggagggttgagttttcgtaggtttggtaagagttttagttttcgtatttttttgtcgtgagtttgaggaggtggttggagcggggaaatgtattagaggggcggggttttttagttattatattacgttatgtaaatgaggtggttagatagattaatttaaaggtttcgggaagcgtttcgttcgtattacgtagcgtaggtatttttcgggtagttttatttatttgtataatgtatgtaaattatttgaataaagataggttaggaatgattcgtttattaaaatatgggtaattatcgattaagacggatatttaattttataatttataatttttatgaataaatttttatatttgaaattattgggaatttgtaattttttaataatgggttttattttgtgaaatgtagtattgttatttttttttgttttttattattcgattttagaattttttgtttttattagagttatatttatttaatagattatttaatgattatgatttgaaggcgttggagataatgtataggatattatagaagtagagaaataaggtttggcgcggtggtttacgtttgtaattttagtattttgggaggtttaggtaggtggattacgagattaggagtttaagattagtttggttaatatgatgaaattttatttttattaaaaatataaaaatttgttttacgtggtggcgggcgtttgtaattttaattattcgggaagttgaggtagagaattttttgaattagggaggcggaggttgtattttagtttgggtgatagagtaagattacgttttaaaaaaaaaaaaaaaaaaaaaaaaaaggatgggcgcggtggtttacgtttgtaattttagtattttgggaggtttaggcgggcggattatttgaggttacgagttcgagattagtttgattaatatggagaaatttcgtttttattaaaaatataattatttaggcgtggtggcgtatgtttatgattttagttattcgggaggttgagtcgggagaatcgtttgaatttgggaggcggaggttgtggtgagttaagatcgtgttattgtattttagtttgggtaataagagcgaaattttattttaaaaaaaaaaaaaaaagaagtagagaaataaaatatgattatgtttggggtgattgagaaatgtttttagaaaaatttttattaagagatatgaggtcgggcgtggtggtttatgtttgtagttttggtattttgggaggttgaggcgggtagattataaggttaagaaatggagattattttggttaatatggtaaaatttcgtttttattaaaaatataaaaattagttggattggtggcgcgtgtttgtagttttagttatttgggaggttgaggtaggagaatcgtttgaatttgggagacggaggttgtagtgagttgagattacgttattgtattttagtttagcgatagagtgagattacgttttaaaaaaaaaaaaaaaagaaaaagaagaaaaaaagggtcgggagcgggagtagtggtttacgtttgtaattttagtattttgagaggttaaggtgggtgggttatttgaggttaggagttggagattagtttggttaatatgagattttattttaggaaaaaaaaaaaaaaatgatatgaagaatgatcggagtagatatttgttaaaaatatataaataaatagatatgaagaacgagttagaatttatttaagttttagaagaaggtgtatattttaggtgtagagaatagattagtggaggtatgagtttgggggtttgtgtttaggttgatatggttaaataaaggaggcggtttatttattatgaaaagtgaaggtagaaaagtttgtagaaattagatgagaattttagttagaggtttagtaagatttaagatgatttttgtttttaaatttttaaaatgatttttttttttttttttttcggtcggttattatatatatcgttttgttattttttgtagtaaaatttttaaaagggatgtttatagttattgtttttaatgagtttttttttttagttttttttttttttttttttttttttttgagatagagttttatttttgttatttaggttggagtgttatggcgtgatttcggtttatcgtaatttttatttttcgggtttaagcgatttttttgttttagtttttcgagtagttgggattataggtatttgttattatgtttagttaattttttgtattttagtagagatggggttttattacgttggttaggttggtttttaatttttgattttaggtaatttgttcgtttcggttttttgaagtgttgggattataggcgtgagttattacgtttagttgtaaattttttgttttatttaatagtattagtttttttatttatttatttatttaagtgttttttgtttgtttgtatgttcggtttttttttttttgagacggagttcgttttttagttgtttaggttggagtgtaatgatgcgatttcggattattataatttttattttttgggtttaagagatttttttgttttagttttttaagtagttgggattataggtatgcgttattatattaggttaattttgtatttttagtagagacggggtttttttatgttcgttaggttggtttcgaatttttgattttaggtgatttgtttattttatttttttaaagtgttgggattataggtataagttatcggtttcggtttatttaagttttaaatattattgagggtttatgatatgttaggtataatagtataggttattttatttttatttttagaaaaaagttttatagaggttgagtgatttgttaaagtgataaagtttatagtggtggagaatgttggtttatggtattttttgttttttatgaaatttgttatgggtttgagtattttgtttggatatgtgtttttgttttgtttgtattttttgaggttaaggttgttttatatagttggaattttttttggtgcgtgaaattatttgttgtagtggatatattatagcgttgttgatggattgtttatatggttaaatttttgttattttttttttaagatttgttttttttttttaaatttaggaaaaaaattatttaaataaaaattaagttgatttgatttggaggagggggtaatttatttaatttgttgattttggtttataattttgttttttgtttttatatttgggttattagaagtttttttaattttattattttttttttttttaaattagggtaatttagagatagtttttttggttggggggtttgttggtttttttttttttttcgttttttttttatatattaggattttggttgagatgggaagaggtatagggattagggaatattttttttaagggaataaattatagggtgttaggaaaggttagaaggggatggggatgtgagggtggaagggggaagaggaagggtaggggttggagtttttggggattaggattatggatagggatggggtcgggattttggaagggtttttttaaggatggaagaagggatgatgggtaacgtgtagaaatgttgagtttgtggataagggtagggatgggggaggagaaaataggtaagtataggggaggttggaaattgatatttatatttttaggatggtagattttttgtttagtattattttgagaaagttagggtagttgaacgttttttcggagttattggatatttttttaattaatttttttagttttaggtgagttttggggattttaagtttttttagtattcgttttagggatatgatatttgggggtagaggatggggatggggagaaggtggggagattttttttttttttttttattttcgtatttttattttttttttttttattgtggtaggtgggtttttttttaaattatgaggaatggagtatgtaggagagatttttgtttttttaggtttgtatattattttgttttcgtaaattattcgttttttattaatatcgttatttttattaaggttaaattttatgtatttttttgggtgaggggagagagtagaagggataagcgttgattggagggtttttagtaggggattgaggaaggggttgttaattaattgttaggtggaggagataacgtggaaggaggaggaggggtaggtagaggaagtggggttggggagttgaggggtttcgttagggtgtaaggagttagaggggatgttgagagaggtaggttcgggaaagggatcgtagtgtggtaggagggtaataaaggtaggttttttttttgttattataaaagtaaattttttatttttgttg

SEQ ID NO: 541 - DNA, 5856 bp, Artificial Sequence
  chemically treated genomic DNA (Homo sapiens)
gtggtgagcgatttggaagggtaaggtggggttaggttagttaaaatttttggaagtatttagttttttttgggagggtgttataggatttagagtgaggagtttttttgtttttttttgtttttttttaattttttttgttttgtatttttatttattgtagaggagaaagcgttggtaattttggtttgttttatttagtatgattttatttgggtatgagttggaaaagagtttagtttttatgttagggcggtttgttaaggtaggtgggagaagtatgagaatagagatgtagaattaaatttaagggagggtgagggttgggaagaattaatttttagttttgagatttgtgttttttttagttaggtggtagatttattttcggggtatatagagtttattttttttgtagaggtggtggtggtaaggaggaaagaatgagtattattttaattatagtgttttagttttttttttttttttttgagatagagttttattttgttgtttaggttggagtgtagtggcgttatttcggtttattgtaagttttgtttttcgggtttacgttatttttttgttttaatttcgtgagtagttgggattataggtgtttattattatgtttagttagttttttatatttttagtagagacggggttttattgtgttagttaggatggtttcgattttttgatttcgtgatttgttcgttttagttttttaaagtgttgggattataggcgtgagttattacgtttggtttgtttcggtttttatttattttattgtatttgttattgaagtttagttttttttgggttttaagttattaagtattggttaggtatatttttttttagagggtaattaatatagttattgaatttcgtgggttaagtatagtagatatattagttaagaggttagtttttggtgggtggatttttatattttgggtagagattgaatttagtgatgtttttgtttttttattatttatatgcggatggtagtacgaaggtggagttgtatcggggtagagttagtagttatattgaagataatgttgtttatagggttaaaagttgttaatttttttttggtgggagttgtttttgcgataaagtattattggtttaagtggatttttgggaattggagagataatgaagggagtaaaagagggtgggttttagtataggatgggtttaatttttttattagttaaaatagtaagatttaggggtagaggtgttggttgtttttttttttttaattggggattggatttatgataaagagttattaaatgattttttttttttgtttttttttagttaatttgggtaattattttattttttaattttgttatgtttttgtattgatggttatagtattgatatttttttttttgtttttattattataatatttatatttttttttttttttttttttttaagatggtttttagttattttaggttatttatttaagttttttagagtttttattataggttttttttaattttagtttatattttttttttatttacgtttagagttgttagttgattgtgtttagggtattggtagatggagttaaggataatattatagaagtagagtagagttgtttaaatttggtggaatatttttaggtaggagggagttggtgttttgtgtgttttaattgtttttttttttattggttgtttagtttattttgtttttagtttttttgcgttcgatttttgatttttttatttgttaatgagtaattttaattttgttttttaatttaaatttggattatttagtgtttgggattttttttttttttttcggatgtaattattttatagtatattttggtatgtttagggttttttaggagttatgaggagagttgagttgtttagggagaagtttgtggtttttgaatttgtatttgagttggttatttgttgtattgtgtagtattgaagggaagtagtttgattgggttttttatttatttatttagtaaattgttttgaattttaagttttagttgttttttaagaattagttaattttcggggatataaaaaaacgaataagatatagtttttgattttgaagaagtcgttagagggaaaattagttgtgtagataaattattgtaatataatttggtaaatgttttagaataggtatgatgtaggtgttggggtacggtggattgttttttttagtttataattagaaaaatatgtatattttggtagtgtttattgatatatttatttaatatttattattataaagaggttatgtaatttggttgttagagaggatagatgttggtgttaggtagaatgtgtttaaattttaattataggtagggtaggtagtttatgtttgtaattttagtattttgagaggttaaggtgggcggatggtttgagtttaggagtttaaaattagtttgggttatatggtaaaattttgtttttataaaaagtataaaaattagtcgatgtggtggtatacgtttgtagttttagttattagggaggttgaggagggaggattgtttgagtttgggatgtcgaggttgtaatgagttttgattgtgttattgtattttagtttgggcgatagagattttgtttttaaataaataaaatattattaatttttaattgttatgtttgtttttttatttgtaaaattggtaaattattaattttataggattaaatgaaataatgtatataaagtttttagtaaagatttgtatatggtaagtttaaagtatatatttgttataattaatagtaatgtttgtaaagtatttagtttttggtgggtaataagtttttaaataataggtagtaagaattgttaaataggttgtttttggatagtattaagtgattggagtagttaatgttgtgagagatggatttttttcgatagattatttatttatttatttatttttaagatagggttttattttgtcgtttaggtatgattttgattttttcggtttagatgattttcgagtaggaggtataggtgtacgttattacgtttagttaattttttgtagatacggagttttattatgttgttttaggttggtattaaatttttgagtttaagtagtcggtttattttagttttttaaagtgttgggattataggtatgagttattatatttagtttgataaatttatattttatggattgttataaaaaatttgtcgagggttgaggtttgcgatttagttaaaaaataaataaaatttgggtgattagtatattagagtttattaatattgttttattttggtgtaatgtttgtattttttttttttttttttgagatgggagtttcgttttgttgtttaagttggagtgtagtggcgcgattttggtttattgtaatttttatttttcgggtttaaagtaattttttgttttagttttttaagtagttgggattataggcgttcgttattacgttaggttaatttttgtatttttagtagagatggggttttattattttggttaggttggttttgaatttttgatttcgtgatttattcgttttatttttttaagtgtgagttattgcgttcggtcgaaaatttttgtaataaaaagttaaaatgtggttaggtatagtagtttatatttataattttagtattttgggaggttaagtttgtaagattaggttgggtaatatagtaagattttatttttataaaaataaaattagttaggtgtggtggtgtgtatttgtggtttttattagggaggttgaggtgggaagatcggttgggttcgggaggtagaggttatagtgagttgtgattgcgttattgtattttagtttgggcgataaagcgagatttttttttaaaaaaataagttaaaatgttaatagttttttattggggtagtaaagtataagtgttcgatttggagttttgtaggtttggatttgttaattttgatatttatgttcgtttaagtgtatttatttaaaaaatgttaaaagttcgttaaaaggttttttaaaataatatataaaattcgtagtatatgggttggtataagtgtttattaaatagttgtttattagaatttttaattaaaatataattaggatttgggtataaattacgaattttagaaaggttggatattttaatagcgatgtgtttttttggaggattcgtagtttcgcggggtcgaggtttttggtttagggtaggttaagagaagagggtacggagaggaggtaatgtttttattttcggttttcggaagtacgttggtcggtttttaaattttttacggttagggttttgtttttttgtttattcggattttatttgtttttaatttttaaattcggaagcgtttttttttttgataagtcgtgtaatttagtagtacgtttattttttttaaaacgtgttatgtttttttggttatatatcgacgaatgtgacgtttatagtttttaaaacgtttattcggtagaatcgaaatttagtttaattaagtaatcgagaataaaattgattagtgtcgtttttaaacgtttattgaaagagtaattttcggaggtatagaagaaagggcgtagcgagggtaatagggtggagaagagttttagttggttaggatagtgtcgtttgaaattattagtttgttaagatttaaatatagatgaatgtggtataattttttatttttaaagtttaaggtttatacgatcgtttatagtttttttcgaggtagtggtagagttttagttggtgattgttttttaggtatttacggtagttattttaattttttagcgtttaagcgcgcgtatagacgtgaacgtcgttagaggggggagggggtggggcgatgtttaagtgtttacgtattcgtagtgcgacgtacgtaggcgtagtacggtttttcgggcgatagcggtggcggtttttcggggtgttcggtttttttttatttaggtcggtttcggttcgattcgtttttagaaatttattgtttggggttgcggattttttcgtcgtgttttataaaagtaaagtttggggatttggggggagtcggaagtatcgtttcgagatttttaaatattatcggggaaacggaagtggtcgtcggtggtaggtttgggggagatcggaagtgacggttcgtggggaagtcgggggcggagtcgcggggtggtgggtgtgtgtgtgtgtgtgtgtgtgtgtgtgtgtgtgtttggttgtgggttagttgtgtcgttttgttggaatatcgtgggaaggtagtagacgcgggtagttagttagtaggttcgtcgtttcgtgagtgtcgtttcgggtttatagtgagttaggagggttcgatgggcgtggcgcgcgtgcgcgaaattatttttttcgtagagtgtggggcgattatcgttttcgcgttgttttaggatttttcgatttttggggcgtttgttttgtcgtgatcggtgatgatattagtttttggtttcgtgttttttttttaatttgattggttttttgtttattgtgattggcgtcgtggagttttttttatttttcgttttttagttttttaagtcgtcgattttttgttttttgtgtttttttttttgtgtttcggaattagaagggggatggggataggtgtgaatgtgtgtgtgtgtaggagaaattttttaggtattggggtagggattaatgttagggagtttttcgggtatattttggtttgggtaatagcgggttttttttttttcgtttttttttaga

SEQ ID NO: 542 - DNA, 5856 bp, Artificial Sequence
  chemically treated genomic DNA (Homo sapiens)
tttaaagaagaacgaaggaaggaaggttcgttgttgtttagattagagtgtattcgaaagattttttagtattaatttttgttttaatatttaaaaagttttttttgtatatatatatatttatatttgtttttattttttttttgatttcggggtatagggagagaaatataaagggtaggagatcgacggtttagggagttggaggacgagaggtgggaggggttttacgacgttaattataataagtagggagttagttagattaggaaggaagtacgagattagagattagtgttattatcggttacggtaggataagcgttttagaggtcggaaaattttgggataacgcgaaagcggtggtcgttttatattttgcggagaaagtggtttcgcgtacgcgcgttacgtttatcgaatttttttaatttattatagattcgaaacggtatttacggggcgacggatttgttagttgattgttcgcgtttattgtttttttacggtgttttagtagaacggtataattaatttatagttaaatatatatatatatatatatatatatatatatatatttattatttcgcggtttcgttttcgatttttttacggatcgttattttcggttttttttaaatttgttatcgacggttattttcgttttttcgatagtatttggggatttcgaagcgatattttcggttttttttaggtttttaagttttatttttgtggggtacgacgagaaagttcgtagttttaaatagtgagtttttgagggcgagtcgggtcggggtcggtttaggtgggagggagtcgagtatttcgaggagtcgttatcgttgtcgttcgggggatcgtattacgtttgcgtgcgtcgtattacggatgcgtggatatttaagtatcgttttatttttttttttttttggcggcgtttacgtttgtgcgcgcgtttgagcgttagaagattgaggtggttatcgtaaatgtttgaaaaatagttattagttgggattttattattgtttcgagaggggttatggacggtcgtatggattttggattttggagatgggggattatgttatatttatttatgtttaaattttggtaggttgataattttaggcggtattgttttagttagttaaaatttttttttattttattgttttcgttgcgtttttttttttgtgttttcggaagttatttttttagtaggcgtttgggggcggtattggttaattttgttttcggttgtttggttgggttagatttcggttttgtcgggtgggcgttttaagggttgtgggcgttatattcgtcggtgtgtggttaaggggatatgatacgttttaggaaaagtaaacgtgttattaagttgtacgatttgttaagaaaagaggcgttttcgagtttgagaattgggagtaaatggagttcgagtggatagaaagataagattttgatcgtggggaatttaaaggtcggttagcgtgttttcgaaggtcgggggtggaggtattatttttttttcgtgttttttttttttaatttgttttgggttaagggtttcggtttcgcgaaattgcgagttttttagaaagatatatcgttgttggggtgtttaatttttttgggattcgtagtttatatttaggttttggttatattttagttaagagttttaataagtagttgtttaatgagtatttgtgttagtttatatattacgggttttgtgtattattttaaaaagttttttaacgagtttttaatattttttaagtgagtatatttagacgaatataagtgttagaattgataaatttaggtttataggattttagatcgagtatttgtattttattgttttaataaaaagttgttaatattttagtttatttttttgagagagggtttcgttttgtcgtttaggttggagtgtagtggcgtaattataatttattgtagtttttgtttttcgagtttaatcgatttttttattttagtttttttagtagggattatagatgtatattattatatttggttaattttatttttatagagatggggttttgttatgttgtttagtttggttttgtagatttggttttttaaagtgttgggattataggtgtgagttattgtgtttaattatattttagttttttattataaaaattttcggtcgggcgtagtgatttatatttgggaggatgaggcgggtggattacgaggttaggagtttaagattagtttggttaaaatggtgaaattttatttttattaaaaatataaaaattagtttggcgtggtggcgggcgtttgtaattttagttatttgggaggttgaggtagagaattgttttgaattcgggaggtggagattgtagtgagttaagatcgcgttattgtattttagtttgggtaatagaacgagatttttattttaaaaaaaaaaaaaaaaaatgtaaatattatattaaaatagaatagtattaataaattttaatatattggttatttaaattttgtttgttttttaattaaatcgtaagttttagttttcggtaaattttttgtggtagtttatgggatataaatttattaagttaggtgtggtggtttatgtttgtaattttaatattttaggaggttaaggtgggtcgattgtttgagtttaggagtttaatattagtttggggtaatatggtgaaatttcgtgtttataaaaaattagttaggcgtgatggcgtgtatttatattttttattcgggaattatttgagtcggggaagttaaagttatgtttgggcgatagagtgagattttgttttaaaaataaataagtaaataaataatttatcgaggaagatttattttttatagtattaattgttttagttatttggtgttatttaaggataatttatttggtaatttttattgtttattatttgagaatttattatttattagaaattaagtgttttgtaaatattattattaattatagtaaatatatattttggatttattatgtgtaagtttttgttaagggttttatgtgtattattttatttaattttataagattgatgatttgttaattttatagatgaaaaaatagatatagtagttaggggttggtggtgttttgtttgtttggagatagagtttttgtcgtttaagttggagtgtagtggtataattagggtttattgtagtttcgatattttaggtttaagtaattttttttttttagtttttttagtagttgggattataggcgtgtgttattatatcggttaatttttgtattttttgtagagatagagttttgttatgtagtttaggttggttttgaatttttgggtttaagttattcgtttattttggttttttaaagtgttgagattataggtatgagttatttgttttgtttgtagttagggtttggatatattttgtttgatattaatatttattttttttaatagttagattatatagtttttttgtagtaataaatgttgagtgaatgtgttagtgaatattgttagggtatatatatttttttaattgtaaattaaagagagtaatttatcgtgttttagtatttgtattatatttgttttaaagtatttattaagttgtattgtaatggtttgtttatatagttagttttttttttaacgatttttttaagattaggggttatgttttattcgtttttttatgttttcggggattagttagtttttgggaaataattgggatttgggatttaaaatagtttgttaagtgaatgaatgagaggtttagttaagttatttttttttagtgttgtatagtgtaataaataattagtttagatataggtttaaagattataggtttttttttggatagtttagttttttttataatttttgagaaattttggatatgttagggtgtattatggagtggttgtattcggaagagggggaggaagttttaaatattaagtaatttaggtttgggttggaaaataaggttgaagttatttattagtaggtgaaagggttaagggtcgaacgtaagggagttgaaagtagagtggattgagtagttagtaggggagagagtagttaaggtatatagagtattagtttttttttgtttgaagatgttttattaaatttgggtagttttgttttatttttatggtattatttttaattttatttattagtgttttgagtatagttaattgataattttgggcgtggatgggaaggaggtatggattgagattaggggaagtttatggtggaggttttgagggatttgggtggatggtttaggatgattggagattattttgggaaaggaagagaggaagggggtgtgagtgttgtgataatgaaagtaagaagaaaaatattagtattgtggttattaatgtagaggtatggtagaattggggggtggggtggttatttaggttgattggggaggggtaaagaggaaaagttatttaatgattttttgttatggatttaatttttagttggaaagaggaaggtagttaatatttttatttttaaattttgttgttttgattgatgaagaggttgaatttattttgtgttggaatttatttttttttgttttttttattgtttttttagtttttagaggtttatttgggttagtggtattttatcgtaggggtagtttttattaaggaggagttggtaatttttgattttgtggataatattgtttttaatatggttgttggttttgtttcgatgtagttttattttcgtgttattattcgtatgtgagtggtaaggaggtagaagtattattgggtttagtttttgtttaaagtgtgagaatttatttattaagagttggttttttagttggtatatttattatgtttggtttacggaatttagtggttgtattaattgttttttggagaaagatgtgtttaattaatgtttggtagtttgaaatttaaggagagttgggttttaataataaatataatggagtaaatagaagtcgggataggttagacgtggtggtttacgtttgtaattttagtattttgggaggttgaggcggatagattacgaggttaggagatcgagattattttggttaatatagtgaaatttcgtttttattaaaaatataaaaaattagttgggtatggtggtgggtatttgtagttttagttatttacgaggttgaggtaggagaatggcgtgaattcgggaggtagagtttgtagtgagtcgagatggcgttattgtattttagtttgggtaatagagtgagattttgttttaaaaaaaaaaaaaagaagttgggatattatggttggggtgatgtttatttttttttttttgttattattatttttgtaggaaagatgggttttgtgtgtttcggaaatggatttattatttgattgaagggagtatagattttagaattgaaggttggttttttttagtttttatttttttttgagtttggttttgtatttttgtttttatattttttttatttgttttgataggtcgttttgatatgaagattgagtttttttttagtttatgtttaggtggaattatgttgaatgagataggttagggttattagcgtttttttttttatagtgagtagggatataaggtaggaagggttggagggaaataagggagggtaggagaattttttattttgggttttatgatatttttttaggaagagttaggtgtttttaggggttttgattggtttgattttattttgtttttttagatcgtttattat

SEQ ID NO: 543 - DNA, 18997 bp, Artificial Sequence
  chemically treated genomic DNA (Homo sapiens)
atatttggtgatttttgtatttgatggattagttggtattatttagattgatgaattggtttatttgattttgtagcgttttttatttaggaatttagggtaagaagatagttttgattttttatgattttattttcgattattaggattcgtggtttattggtttttttaattaagttgtttttaaaaattttgattttcgaatgtttggggagattgatttgagtaataataaaatttcgtttttttgtatagttggttgtgtatgaattattttttttttattttaattgtttagttttgatgaattagttttgtttaggtagcgggtaaggtgaattttttgggaggttataaattttttttttatgattgtaagttattattgagtattttaaaagtaggtggagttgataaattgatagtttaggtttggtagttatagattatttttgttttaaatgggtattattgttatttgaataaattgtgaataaggtatatttttttgattgaatatagaaatgagtggaatagtttataagttgttttgtttaatgatagttattagttataagtggttatttagatttaaataaaagttaaataaaatttttttagttatattgtaattaagtatttttatttttttaagagatagtttaatgatttttaaaaaattttttttttttttttttttttttttattttttttttagttttttagaaatgtaattgtagttttttattttttttttattagatattttttatggggtaggtttatttaattatgtgtttagaagttttagagaggaatttttatttatcgggaggttgttttgagagataatagtttatttataatttaaagtatgtttgttataaagtttttttttatttggagagttttggttatttttataatttagttttgtttataaaaggtattagtagttattgtttagtagataaggtattgaaggtagtatgtagattttttaattattcgtttttttttttcgtgttatttatgttagtattttatgttttattttaaaagtattttttttttgttttaaaagtgaaatggtatttttaaggtagaaaattagtatttttttttttaaggtagttttggaataaaatattattttttttatattagattttatttttgttaagtggattttgtaagtagcgagagagtgaatttgtatttgggttataatattaattagtttaagtgtttaatagttatatatgtttagtagttattatattgggtagtgtagagatattgttatagaaaattttattgtatattgttgtttaggtattgatgattttagttttatgttgtggtgagtgatttgtttttggaaaggataatatagtggatttattttcgggtgttagtaagggggtaaaattgaggtttttttgagatttttaaatagttaggagggagggaaattagataaaggagttgaaaagttgttttattttattagaaattgaaaggatgaagggatatgggtttattgaagatatttattgttttattaggatttgattagaaatttgatattttaaaaatttgattttgtgttgtttgtaatttgattttttttaaatttttatttttgaaaataataatttattttatttgttttattaggaaataaggagagggggttttggttatattggggttaaagtttagaaggtagagattatatatgtaatagtagttaatagaagtaaagaggggaattttaaggtaaacgtgataatgtaagggaaaggaaatggaaaagatatttttttttatgcggagattttttttagaagagttattgtttatttaaattttggaggatttgtgttttttttggtaaataatgtgatttttttttgtagaggatgtatgatgtaaaattatggattttgtttttaagggaatttttttgtttttttatttttttattgttttatgtaatgaaatttttaaagtatattttgattttagttttagtttataaattagatttgttttttaagagttatttgagttgtagtttttttagtgttattttttgtatatttaaattattgggggcgttgtagtttggttaatttttaattatttagagaattaggagaagtagatatggttaattattaggattaatgatagttaataagagtaaatatttattgaatatttattgtttgttaaatattatgttaatagtttaatgtttaatattattttatttaatttttatataattttaatgagttaggtattgttatttttgttttatagaaaaggaaaatgagattgttagattgagtaatttgttttagattagataattagtaaatagtagaattaaggtttaaatttaggattgtttgattttagagtttgtatttttatttattattttggataagaattttaaattatattaatattttgatttaaattaattgaaattaatattagtgttagtaattttttattgatagattagttaaaaatgttttaatgattatagaattataaattgaatagagaagtaggtttttttttgttgttttaagtagtttagaaaagttttagtgtagtatattggtgtgattagtaggttttagaaataaatgtatttaataagtttatttggtgttttttattttttttttttttttgtgagagtttttggggagattttaatgatgatagttgatatggattaaaggtagataaaatataagggagaaaatattggaaggagtttggttgatggaatagaaattttttgaagaatttatatttgaatgattaaaaagtattagtttagtttgtaaagtttgaagttgaatattcgtgaggaagttatttttttatttgttgatgaggtagagagaaaggtttaatttgttagagaaattgatgttttttgttatattatattgaaataagaattagtttgttatttatttttttttttttttttttagtaatataggtttaggttgaatttatgtttatatagttgtataaatttttacgggtatgaatataaatttatttatttaaatagattttaaaggttttttaggttattttttttttttttagaatttaagtaaggttttgattattattgataatatattcgttagttaatgcgtgtagagtttttagtttaaaggtaaataaaaagtgaaaaggggtcggcgtagtggtttatttttataattttagtattttgggaggttgaagtaggtagattatttgaggttaggagtttaagattagtttggttaatatggcgaaatttcgtttttattaaaaatataaaaattagtcgggcgtggtggtaggtgtttttaattttagttattcgggaggttgaggtaggagaatggtttgaatttaggaggtggaggttgtagtgagtcgagatcgtattatttattgtattttagtttgggtgataagagtaaaattttattttaaaaaaaaaaaaaaaaaaagtgaaaaggtaggaacgttgttgtttatttgttgttttaggaattttgtttacgtatagtttaaaatattaagaagttgaaaataaagtatttggttatgtgtggaaaaatttatagttaaaaggtgagatgaattgggtttagaaggtcggatttacgtgaaattaaaagggtaacgaaagttagaatttaattttttaaaaaaagttaaaataggtcgggtgtagtggtttatgtttgtaattttagtattttgggaggtcgaggttggcggattataaggttaggagttcgggattagtttggttaataatggtgaaatttcgtttttattgaaaatataaaaattagtcgggcgtggtggcgcgtgtttgtagttttagttattagggaggcggaggttgtagtgggtcgagatcgcgatattgtattttagtttggtcgatagagtaaggtttcgttttaaaaaaaaaaaaaaaaaaatagttaaaatttttaaaataattttatttgttaaaatataaaatttgaaattattttagttttttttgtaaaatgagttggagagagtagggttgaattaggtatgttttttcgggtttttcgacgttgatatttcgggatattatattaggtttaagatattagtttgcggaaagagagttgttaaatttgattatatgttttttgtacgatattcgatagttgtttttttttttattagtttttttaaggttgtaaatatatttgatttacgtgagagtttttataagttagtataacgttaggttttaaggaggcgtttaataaatgttggtattgtagggttagatttcgagttttagtttagaattttgttgaggttaggttttttttttgtttttcgttttttattatatttatttatttttttaagtaattaagtttaaattggggtttgtgtagtgattggtcgcgtcgggttttattgcggatgaatttgatttgttttaatgatttgtgatagatatttgtagatagcgtttttaatagaattagggttaggttggtattaaattttaggaacgttaggtattgttttaaagtagatgtaaatcgttaaattttttaggatttagaaggattagagagagtcggatatttttggttagttacgcggtttttagtaaagtttattttttttttttttttagtgtgttttgttgttagagtaattgtgggcgttatcgagttgacgggcggaaatagaatagaaagagtatacgtttttagtttattgatagggttattgcgtagacgtattaatttttttgagttgtagttgagtttgttgatgtagttcgcgtttgcgtattagttgttacgcgttttggtcggttttagcgtttgcgtaaattggtatatcggggagggcggagttaggttacgagggtgcgtatgcgtaaatagtatattcggtgtggtcgacgggttttttaagagtttggggcgcggattggagtattttgcgtgtagttatgtcggcgtcggtagtgtttgttatttcgcggtttttagaagagtatttgagttttatttcgtagcgtttgaagttgttggacgcgtatttgttgtatatattgttgatcggggcgttgtagttcggttattgttttttcgtggggatttttttttttaatttttttttttcgggttttattttttgtgtggggagttttattttagcgggtaatggttttataagtgattataataataatgtgttattttggtgtgttgtttttgtttttatagtattttatattagattatcgttttttgaagttatgagaagagtttgtattgtttttttgttgtgaatggggaaattgaggtttagaaagtttagattatatgtttaatattaaacggtttcgtaggagttggatttaaaagtttaaagaaattattttcgtgtcgttattttatttggtgatttattttatttaatattggttcggggaaaattttattttaattttaatttaggtttaatataattttaaaattagtagattttttaaatgaaaaatttaattttgaattatttttgttattttggtttaattattattaattttcggtgaaacgttttaatgaaagtgtaaagaatataaatattggtgttttttttgttgaattattttttatttgattttgttttttagttgttattatttttttttttgttgaggaagttgttattttattgttttgaatttaatttttgtttatataattttattttagttttatttttttttttgattttaggatttggtaattttgtagattgttatatttagcgagaatagtttttattaatttttgttaaaatttgattttttttgtttaacggggatttagtgaatattgaaaataggcgtggtttttattattggtattatttgttattttgattttgaaaatatgttagtatttatggtttttttttagtgtgattattagttaggttattagttgtatttttagtttaatatgaggtattatggtaaaagttttggtatatgttttttattcgtaaagagtttatggtttagttggggtatagataaaatatagtattggaattgtttggaggtttggtatagtggtttatgtttgtaattttagtattttgggaggtcgaggtaggtagattatttgaggttaggagtttaagattagtttggttaatatggtgaaattttatttttattgaaaatatataaattagttaggtatggtggtatatatttgtaattttagttattcgggaggttgaggtagaatcgtttgaattcgggaggtggaggttgtagtgagtcgagatcgtgttattgtattttagtttgggtgagagtgaggtttagttttaaaaaaaaaaaaaaaaagtttggtgatagtggtgttgtgtttaaagttatagatttatagaatgtttattgtatatttatattgttttgatatattagagatattttttagaatttaaaataggtttgaggatttaatgatttgtgtattgaagttgtagattagttttttgattggatatttagttattatttttgatttttgttttagatgattaagatttagttgtttgtggtggcgtttttgtttttaggatgtgttaattattattcgattagatatattatttttttgttttaagtattttttattatttatttatcgttttttgttacggtattatatgtttttattagttagttcggagaaggaattttgatgagaatttttgatttaattttgtttgatgtttttgtttttaggtttggaagagtaggagtaaggtagggtttgaaagttgattttaaaaaagatgttttttttatgtagaagttattttgtttttataagtttttagggtttagaatgattttttatggatgttttgaagaatgtggtttgttgaagagtgggtatggattagagttatagattattagtgtaataaagttagaaggtttttttgagtaaatgatttttatttatgttaagatttgtttttgagttcgttgtggttgaaattgaattggtagattggattgttttttttttttttagtgggaattaggtggtttgttattgaagaaaaatttagtaaaagggtatattagtaatggggttaataagggggattaggatttttagatttgttagataatagataatagagttatagaaatgaaagtaattttaagaaaagaagggatttatgataatttttagttgttatagaagggtatgatttattttttttttgatagtattgatttttttaaattttgttttttttgttatttgttagtttagattattaattggagattggttttaatgggaaatttggacgtttattttttgttttgattgttggtaaaggtagttttgtttttttttatggtgttggggtttttaatttttttgtggaattttttgttgtaagagaatggaggagtttagtgagttgggagagggaaatgtaggcgatattgttgaaggattaggtagtgttgggtgttagatgtttgaatgttaggttaaggaatttggattttttttgagatggagttttgttttttttttttaggttggagtgtaatggcgatttcggtttattgtaatttttgttttttaggtttaagtaatttttttgttttagttttcgaagtagttgggattataggtatgtgttattacgttcggcgaattttgtatttttagtggagacggagtttttttatgttggttaggttggttttaaatttttgattttaggtgattcgtttgtttttgttttttaaagtgttgggattataggtgtgagttattgtgttcggttaggaatttggattttattttgtaggtaatagtaaagtttttgaagatgtttttttttttttttttgagacggagtttcgttttgttttttaggttggagtgcgttatttcggtttattgtaagtttcgttttttgcgtttacgttatttttttgttttagttttttgagtagttgggattgtaggcgtttgttattacgtttagttaagtttttgtatttttagtggagatagggttttatcgtgttagttaggatggttttgattttttgatttcgtgattcgttcgtttcggttttttaaagtgttgggattataggcgtgagttattatattcggtattgagggtgtttttttaaagaaaggaaaagatttaaaattggtgttagtatgtaggatgaattggagggaaatgttttttaattttttttatttttttttggtagtttatttttttttattttttttgtatgtgttagtttagtatatgttttttggaaattgattagtatattttaaattaatttagaacgttattaaatttttaaaaaatttgttgttattgggtttgatggtatgaaaatagtttgtttttttttatttttttatagttgagagatttaattatggttttaagaaggaattagaggtagaaagttgttattgagagatttttttttgtgtgtgttttggattattagagtataatatattggttttaaaaggattttagaggtagaatatttttttatttgagatagattttaaatatttagtagttgattgtttattttgtagttagatatttttagaagaggatatttgttttttttttagagttatattttagtgttggtaattttttagtttttttttttgtttaattgaaagttgtgtttatttaaagtgttatttaggagggataagtagaaaatattaagattgtttttaaaataagtttttggttttgaaataagttttaatttattttttaatttttatttgttttgttttttaatttatatgaggtaattttgttttaaaaaatagttttgttttttttagtttataaatttaaaattagtttgaatttgtaaggtaaggaggtttagtttagagttttttgttttacgggagttattaggttgttgtggattggggtttagtattttttttggaattatttattagatttgtggattttaatattattttttataattgttattcgagagattagaagtttgttatttatgtgtttgatagttttgtttttaaatattttttatattattgttatttttttattttttgttttagttttttaatattttttatgaagattattgtaattttttttattggtttttcggtttttggtttttagtttattttttattgtgtttgtaggtttgatttgatttgtaaatttgattgtgttatttttatgtataatttgtgttttttaaagtaaaattaaaattttttttttgatatataggtttttttatgatttggttttttcgttgtttgtagttttattttttgtttttgttttttttatattttgttttaatagtattgagttatttgttattttttgaatatttttatgtgttaaattatttgtttttgtttgattgtttttaaaatttttttattttttagattttttagtttaagtgtaatttttttttttttttgttattgtttttaaagagaataaggttttgttatgttgtttaggttggttttaaattttttggtttaagtagttttgttttagttttttgagtagttaggattataggtatatagtattatgtttggtttattgttttttggaatttttttttgattttttagtagattgaggttttttttttgtattttttttttattttgtatgtgtgtgtgtgagagagatatggtattgtgttgtatttgggtgtttgttttttttttggaaggtgagtttttgagggtaggggttgtttttttatttttttatttttagtgttgaatattgtatatgttaaatggtgagtaggtttatagttatgttaggaatagtgagtaatgatgtgttaggttttttgttaaggtgttgggaatttaattgtgaagtatatagacgtggtttttatttttatagagtttgtaattagtgggaaatatagataagtaaatatggatatggtgttgatggagaattattggtgagaatgggaatataatgtgtatttaattttgtttagtggttttgtaataatattttttttatatattcgtttttttaaagtaggttttataaattattttattttttttttttttttttatttttagttggtgattttgtttttatttttttattaaaaaaaagaagtagataagaatttttttatttttttattattgaattataatagattatttatttttatatttatattttttgattttttatggtggatgatgtgttttttttttgtgaaagttttgtttgtgtagaggatttagtttttttttgtttatttagggatttcgtttttgtaattatttttttgtttcgtgttattaatttttgttttttttttggattatttttattatataaatatgttttaatattgtttatttaaaaaaaattcgtttgattatagataattttttagttattattttattttttttttattattatagaattttttgaaagaataattaatgtttttatttttttttttaattatttattttttaatttatttttggtattggtttgttttcgttattttattgaattattttattgaaattatttttgttatgttgtaacgtttagtatttaatgtaggtattggtttttgtgtaaaaggaaagtttttttttgaatataatatttttttgtttgttttgttttattttattgtttttttttttttgttgttttgtgttgggcgtttttttgattgagagtatggttgtagatatttttattttgtatttttttttaaatagataaatttaaataatatttgtatatttataattatttttttatatttttagttttgaattgtttttcgaattttaaattagtaaatttagttgttaatttgatgtttttatttgatgtttgatatgtattttgaatttaatatgtttaagattaaatttgtttatttagttatttgtttttttattagttagtacgtggtgttaatgttggttgtggttttttttttttttttttttgagatatagttttattttgttatttaggttggagtgtagtggtataatttcggtttattgtaatttttatttttcgggtttaagtaatttttttgttttagttttttgagtagttgggattataggtacgtttttttatgttcggttaatttttgtatttttagtagagacgaggtttcgttatgttggttaggttggttacgaatttttgattttaggtgatttatttatttcggttttttaaagtgttgggattataggcgtgagtcgttatgttcggtcggttgtgtttttaaatgaagaaatttaagttttcggggttttttgattttttttattttttgtatttgttttattagtaagttttgttttttttaaaatatagtttgtatgtttttatttttgtttatttttattattatttttttgagttttttgggttttaagtaatttttttgtttttttttattttttatatttttgagacggagtttcgttttgttgtttaggttggagtgtagtggcgcgatttcggtttattgtaagtttcgtttttcgggtttacgttatttttttgttttagtttttcgagtagttgggattataggtattcgttataatgatcggttaattttttttttttttttgtattttttagtggagatgggttttattatgttagttaggatggtttcgattttttgattttgtgattcgttcgttttggttttttaaagtgttgggattataggtgtgagttattgcgtttggtttatttttatttttatttttatttttttgagacgtagttttattgtgtcgttaggttggagtgtagtggcgcgattttagtttattgtaattttcgtttttggagtttaagcgatttttttgttttagtttttttagtagttgggattttaggagtttgttattgtattcggttaattttttgtattttatttttagtagagatggggttttatttttttgattaggttggttttgaatttttgattttgtgatttatttatttcggttttttaaagtgttgggattataggcgtgagttattgcgttcggttttttgtttttttttaattttgcgaattattatattgttttatcgtttttataattgaatttatattgttttttgaggtttattatgttttttaggatttggtttttgtgtttttttttttgattattatagttttgttggtttgtttttgatttttttttttttttttttttttttttgagatggagttttgtttttgttgtttaggttggagtgtaatggtacgatttcggtttattgtaattttcgtttttcgggtttaagcggtttttttgttttagttttttgagtagttgggattgtaggtatgtattattaagtttggttaattgttttgtatttttagtagagacggggtttttttatgttggttaggttggtttcgaattttcgattttaggttatttattcgtttcgattttttaaagtgttgggattacgggtgtgagttattatgtttggcgtttgtttttgtgtttataatatgttaagattgtttttattgtttagaatgttttgtttttagatttttatatggttggttttttattttttaaatattggttttaaatagtaagtttttaaagagattttttgttatgattgaatttaagaaaagttttttagttattttttattattttgttttattttttttatagtatatatttttatttagtagtttttggtttatttgttaatttattgattatatgtttttttttataggagtgtaagttttttgagagttagattgttttgttttgtgttatatttttagtatttgaaatgatgtttgttatgtagtagatgtttagtaaatattttatggaataaatggatatttaaggggatagagtaaattagaattgttaaaatggaatagattgtttgaagaggtagtaaatttttatttttggaagtgtttagggagagattgaaggattattggtagtggagtattttgaataggtttttttttttgttttttttgtttttaatgtatttgagagatgtgatatttttattagtaatataggttttggaaagttgataattttttatttggaggtggtttattagattttgtaagtggtgagtatattttggaaagttttttacgtgattagtacgtttttttaagtatggttattttttattattttttgggtattgtatatattaaatggggtgttggtgtttatgatttttgaggttttttttaattttgtgggattttgatttatatgtttttattgaaataatttggttattatgattataataataataatattaatttattattttatttatttttatggataattttttttttttttttttatatttttttaaaatttaatatcgtgttttttattttaatgattattattaatagttttttatttttttagatttttttttagattttaattgaaatgataagataattatgtatattattatatgtaaataaaatattttattttttttttgagacggttttgatttgttttttaggttagagtgcggtggtatgattgtggtttattgtagtttgtaatttttattttttgggtttaagtaatttttttattttagtttttcgagtagttggggttataggtgtgtgttattatatttggttaattaaaatattttttttgtagagatagggtttttttattttttttaggttggttttaagtttttgggtttaagcgatttttttattttggttttataatatgttggggttatagttgtgagttattatgttttggttaagtgaaattaggaatgggttgggtgtgggggtttatgtttgtaatttttatttttaggtaagtagaggcgggaggattgttgggtaatatagggagattttgtttttattaaaaataaataaaaaaattagttaggtatggtggtgtatgattgttgttttagttatttagggggttgaggtgggaggattgtttgagtttaggaggtcgaggttgtagggagttatgattgtattattgtattttagtttgggcgatggagtgagattttgttttaaaaaaaaaaaaaaaaaaaggattggtttttttttatttaataagttttagatatgtttgttgttaatgtatagagaatttattttatttttttgaataattgtatgggattttattgtatgttagttgtatagtttaatttttttgatgtttagattgttttaattttttttttaattttataaatatatttttagaatgtttttgttttgtaagataaatttttttgttaaaaggtaaaattattttaaatattaatggatattgttagttgtttttttaagtggatgaatgaatttgtattttttatagtaggggtttatattggttatttttgttttagttattgtttttaatatttttaagggtttggatatttgaaaggattaatggtgtttttatggtgtttatatgtttaagtataatgaaaattgttgttatggtgataggttttggagaattagtttgatagttttttggtttttggattagatttgtttgttgtttttttttagttaatgatgggatgatgttagtttgaagcgagtttaggtttttttaagtaatgtaataatttattataggtataaagatatttcggaagagtgtatttttggaattgtttgtttttttttttttgttaatggtgattgttagaatttttaaggggatggagtgtggtagtggagagtttttatgaattattttttttaggttttttgttttttttgagataaataagtagttgttagaatttcgagattaaagatagtttatcgagaattgtgaggtttttaagaatgagcgtgttatttttataaattttgttatttattaaatgaatattttattagaaaataatttatatttttataattttttattatttagttcggattttttgttgttgttttaagtgtatttttatttaggtataattagaaatttttaaattagtagataagagagttttgtgggttttttggttatatatttttttttttgagaaagtttttaggttttagtgtaattttgagaagtaatatttttttttttttaatagagtgcgaaatttaattgtataatttgataaatttttaaatgtatttgtttaattattatttagattaagatgtaggatattattagtattatagatgtttttttgtatttttttagttattttttttttgtgaaagataaaaattattattttgttatagattggttttattaagttttaagttttttgtatatggaattatatagtatatatttttttgttttgttttgttttgagacggagttttttttgtttaggttggagtgtagtggcgtaatttcggtttattgtaatttttattttttgagtttaagtaaatttttttgttttagttttttgagtagttgggattataggtgcgtgttattatgtttagttaatttttgtagtttttattagagatggggtttttttatgttggttaggttggttttgaatttttgattttaggtgatttatttattttggttttttaaagtgcggggattataggagtgagttatcgtgtttggtttttgttttattttttaatttttttttttttagatggagtttcgtttttgttgtttatgttagagtgtaatggtacgattttggtttatttttatttttatttttattaatttttttgttttattgttttagtttgttaagtaattgggattataggtatgcgttattatgttcggttaattttgtatttttagtagataaggggtttttttatgttggttaggttggttttgaattttcgattttaggtgattcgtttgtttcggttttttaaagtgttgggattataggcgtgagttatcgtgttcggttttttttttgtttgtttttggttaagataaaatatgataaaatttattattttaattatttttaagtgtatagttttgtggtattaagtatatgtatattgttgtaaaattattattattatttatatttagaatttttttgtttttcgtaattgaaatttagtttttattaaatagtaattttttatttttttttttgttagtttttggtatttattattttattttttgtttttaggagtttgattatttttgatgttatataagtgaaattatatggtatttgtttttttgttatggtttatgttatttaaaataatgtttttaagatttagttatgttgtagtaggtattagaatttttttttttttaaggttgagtattttattgtatgtatatattatattttgtttattcgtttttttgttgatatttgggttgtttttattttttggttattgtgattaatgttgttatgaatatgggtatgtaaatattgtttgagagtttggttttattttttatttttttaattttttagatggagttttttttttgttatttaggttggagtgggacggagtgatgtcggtttattgtagtttttattttttgggtttaagcgatttttttgttttagtttttttagtagttgggattataggcgtttattattacgtttagttaatttttgtatttttagtagagacggggttttattatgttggttaggttggtttcgaatttttgatttcgggtgattcgtttggtttagttttttaaagtgttgggattgtaggtgtgaattattgtgtttggtcgagattttgtttttattttttttggatatgtatttagaagtggaattgttggattatatgatatggtaattttgtttttaatttttttgaggaaacgtagtattgttttttatattggttattttatttgatttttttatttgttagtgtataagggttttagtttttttgtatttttgttaatttttgtttttttgatattagatattttaatagatgtgaggtgatatttcgttgtaattttgatttgtattgttttagtgattaatgatgttgagtatttttttatatgtttgttggttatttttatattttttttggggaaatgtttatttaagttttttgtttattttaaaatttggttattattttgttgttaattgtattgtaggggtattttaatatattttgatattaattttttattagataagtgatttgtaaatatttttttttatttcgtaggtgtttttttattgttgtgttttttattgtatttttattatagaagttttaaattttgatatagtttaatttatttatttttattttgttgattatatttttggtgttatatttaataaattattgttaaatttaatgttataaaatttttgttttgtttttttttaagagttttttagtttttggtttttatttatttcggatttaggtttttgattcgtttcgagttaatttttgtagtatatggtataaggtaagggtttagttttatttttttgtttatggatatttagtttttttagtatcgttggttgagaagattgtttttttattgagtggttttgttagtttggttgaaaattatttgattttgtatacgagggtttttgtgtgttttttaaaaaataaagtaattaaattgatttattttttaattgtagtaaatgtatttttaaaataaatttataatggaaaatttgaattattatttttaaatagaaggttatattaaaaatattatggagttaggtagatgtgtttattcgtgtttgtggttttagttgtttaggaggttgaggtgggaggatcgtttgggttttagttcggtttgggtagtattattagattttgttttttgtcgagtttttagtggttttgtgtggttgtattttagaatattttttatttaattgagggggtatatttgtttttttagtatatatatttaggttttgttttgtggtttttgtgtgggagttgggtttttttgtttttggttttttttgggtatttgttaggttttagttggtttggttagttagtgtgtattttttaagttttgttcgggtacggtggtttatgtttgtaattttagtattttgggaagtcgaggtaggtggattataaggttaggagttcgagattagtttggttagtatggtgaaatttcgtttttattaaaaatataaaaaattagtcgggtatggtggcgtatgtttgtagtttcggttatttgggaggttgaggtaggagaattgtttgaatttagtaggtggagattgtagtgagtcgagattatgttattgtattttagtttgggtgacggagcgagattttgttttcgattttttaaaaaataaagtttttgattgtgttgtttaatttatttgtgtaatttatttatttttgtgtatagtagaagtttttttttattgtagtataatattttattgtttgtatatgttataatttatttattttattgttgatagatattagattgtttttagtttggggttatttgggtattatttttgtgtatgttttttgatgtatatatgtatttatttttgttagagtagaattgttgggttttcgggtatgtttgtgtttattagtatatttattttatatttttatataattatttttttgtgttttgttttttgtgtagt

SEQ ID NO: 544 - DNA, 18997 bp, Artificial Sequence
  chemically treated genomic DNA (Homo sapiens)
attgtataagaagtaaaatataaaaaaatgattatatagaagtataaaataaatatgttaatgaatatagatatattcgaggatttaataattttattttaatagaaatgaatgtatatatatattaaagggtatatatagaaatgatatttagatagttttaaattggaaataatttaatgtttattaatagtaaaatggataaattatagtatatataaataatagaatattatattgtaatgaaaaagaatttttgttatatataaaaatggatgaattgtataagtaagttgggtaatataattaaaaattttattttttggggagtcggggatagagtttcgtttcgttatttaggttggaatgtagtggtatgatttcggtttattgtaatttttatttgttgggtttaagtaatttttttgttttagttttttaagtagtcgggattataggtatgcgttattatgttcggttaattttttgtatttttagtagagacggggttttattatgttgattaggttggtttcgaatttttgattttgtgatttatttgtttcggttttttaaagtgttgggattataggtatgagttatcgtgttcggataaaatttaaaaaatatatattggttggttaaattagttggaatttggtaggtatttagaggaagttaaagataaaaaagtttagtttttatatagagattatagggtagagtttaagtgtatatgttgggggaataaatgtatttttttaattagatgaggaatattttgggatgtagttatatagagttattgagaattcggtaggagatagggtttggtggtgttgtttaggtcggattggaatttaagcgatttttttattttagttttttgagtagttgggattataggtacgggtgaatatatttgtttagttttatggtatttttagtgtgattttttatttagggataatgatttaggttttttattataagtttattttaaaaatatatttattatagttaaaaaatgaattaatttaattgttttgttttttaagaaatatataaaaattttcgtatataaaattaaatgatttttaattaaattgataaaattatttaatggggaaatagtttttttaattaacgatgttgggaaaattggatatttataggtaaaagaatgaagttggatttttattttatattatatattataaaaattaattcgaaacggattaaagatttaaattcgaaatggataaagattaaaaattaaaaaatttttagaagaaaatagagtaaaagttttatggtattggatttagtaatgatttattggatatgatattaaaagtatagttaataaagtaaaaatagataaattggattatattaaagtttaaaatttttgtgataaaggtataataaagggtataatagtgaaaaggtatttacggaatggggaaaaatatttgtaaattatttatttgataaagggttaatattagaatatattaaagtatttttataatgtaattaataataaaataataattagattttaaaatgggtaaaggatttgaatagatatttttttaaagaagatataggaatggttaataagtatatgaaaagatgtttaatattattaattattagggtaatataaattaaaattataacgagatattattttatatttattaggatgtttagtattaaaaaaataagagttggtaagaatgtagagaaattgaaatttttgtgtattaataagtgggaaaattaaatagggtagttagtgtgaaaaatagtattgcgtttttttaaaaaaattaaaaatagaattgttatattatataatttagtaattttatttttgggtatatatttaaaagaagtgaaagtaggatttcggttaggtatagtggtttatatttgtaattttagtattttgggaggttgaattaggcggattattcgaggttaggagttcgagattagtttggttaatatggtgaaatttcgtttttattaaaaatataaaaattagttgggcgtggtggtaggcgtttgtaattttagttattagggaagttgaggtagaagaatcgtttgaatttaggaggtggaggttgtagtgagtcgatattatttcgttttattttagtttaggtgataagagagaaattttatttgggaggttgggagggtgggggatggaattaggtttttaagtaatatttgtatatttatgtttatagtagtattagttataatagttaaaaggtgagagtagtttaagtgttagtagaagaacggataagtaaagtgtgatgtatatatataatggaatatttagttttaaaaggaaggaaattttgatatttgttataatatggttgaattttgaggatattattttaagtgatataagttatgataaagggataaatattatgtggttttatttatatgatattaagagtagttaaatttttagaaatagaaagtggaatggtagatgttagggattgatagagaggaggatgaggagttattgtttaatgggaattgaattttagttgcggaagataaaaaagttttggatatggatagtgatgatgattttataataatgtatatgtatttaatgttatagaattatatatttaaaaatggttaaaatggtaaattttgttatgttttattttgattaaaaataaataaaaaaaaggtcgggtacggtggtttacgtttgtaattttagtattttgggaggtcgaggtaggcggattatttgaggtcgggagtttaagattagtttgattaatatggagaaattttttgtttattaaaaatataaaattagtcgggtatggtggcgtatgtttgtgattttagttgtttggtaggttgaggtaatgaggtaggagaattggtggaggtggaggtggaggtgagttaagatcgtgttattgtattttagtatgggtaataagagcgaaattttatttaaaaaaaaaaaaattaaaaaataaaataagggttaggtacggtggtttatttttgtaattttcgtattttgggaggttaaggtgggtggattatttaaggttaggagtttaagattagtttggttaatatggggaaattttatttttaataaaaattatagaaattagttgggtatggtggtacgtatttgtaattttagttatttaggaggttgaggtaggagaatttgtttaaatttaggaggtggaggttgtagtgagtcgagattgcgttattgtattttagtttgggtaagagagatttcgttttaaaataaaataaaataaaaaagtatatgttatatgattttatgtataaaaagtttaaaatttggtaaaattaatttatggtaagatagtggtttttattttttatagggagaggataattgggaagatgtaaggaggtatttatggtgttggtaatgttttgtattttgatttggatagtggttagataggtatatttaaaaatttattaagttgtataattaaatttcgtattttgttaaaggaaaaaaaatattattttttagagttatattgaaatttagaggtttttttagagaaaaaaatatataattaaaaaatttataaagtttttttatttgttgatttaaaggtttttaattatatttagatggggatgtatttgaggtaataataaagggttcgggttgaatgataaaaagttataaaaatgtgaattattttttaatagaatatttatttaatgggtagtagagtttataaagatagtacgtttatttttgagaattttatagttttcgataaattatttttgatttcgaagttttagtagttgtttatttgttttaaaaaaggtagaagatttaagagagataatttatgagaattttttattgttatattttatttttttgaagattttaatagttattattgataaaaaaaaaaaaataggtagttttaggaatatattttttcgaagtatttttatgtttgtgataaattattatattgtttaagaaaatttaaattcgttttaggttagtattattttattattaattaagaaaaagtaataaataaatttaatttaaaggttagaaaattattagattagttttttagagtttgttattatggtaatagtttttattatgtttaaatatgtaaatattatggaagtattattgatttttttaggtatttagatttttaaaaatattaaagataatgattgaagtaagggtaattagtgtaaatttttgttgtagaaagtatagatttatttatttatttgggagagtaattagtaatatttattaatatttaaaatgattttattttttgataaaggaatttattttatagaataaagatattttgaaagtatgtttgtaaagttgaaaaaaaaattaaaatagtttaaatattaaggggattaaattatataattgatatgtaatgaaattttatgtaattatttaaaagaataaggtaaattttttgtatattgatagtaaatatatttaagatttattaagtgaaaaaaagttaattttttttttttttttttttttgagatagggttttattttatcgtttaggttggagtgtagtggtgtaattatggttttttgtagtttcgattttttgggtttaaataatttttttattttagttttttgagtagttgagataatagttatgtattattatgtttagttaatttttttgtttgtttttggtaaagataaggtttttttatgttgtttagtaattttttcgtttttgtttgtttaagggtagggattatagatatgagtttttatatttagtttatttttaattttatttggttagggtatggtggtttataattgtaattttagtatgttgtgaaattaaggtgggaggatcgtttgagtttaagagtttgagattagtttgggaaagatagggagattttgtttttataaaaaaaatgttttaattagttaggtgtggtagtatatatttatggttttagttattcgggaggttgagatgggaagattgtttgagtttaggaggtagaggttgtaggttgtagtgagttatagttatgttatcgtattttggtttgggagataaattaagatcgttttaaaaaaaaagtaaaatattttatttatatataatgatatatataattattttgttattttagttagaatttagaaaaaaatttgaagaaatagaaaattattaatagtggttattggagtaaagaatacggtgttgagttttgaggaaatatgagggaaaaaaagaaaaattatttatgaaggtggataaggtaataaattgatgttattattattgtgattatggtaattagattattttaatgaaaatatatgaattagagttttataaagttggaaaggattttagaggttataaatattaatattttatttgatgtatataatgtttaagaggtggtagggggtggttatgtttggggaggcgtattaattacgtgggaagttttttaaagtatatttattatttatagaatttggtaagttatttttagatggagaattattaattttttagagtttgtgttattgataaggatattatattttttagatgtattggaaataaaaaaggtaaaaaaaaaagtttgtttaaaatgttttattattaatgattttttagtttttttttgggtatttttaaagatggaaatttattatttttttaagtagtttgttttattttagtaattttgatttattttatttttttaaatgtttatttattttataaaatatttattaaatatttattatatgataagtattattttaggtgttaggaatatggtatagaataaaatagtttggtttttaaggaatttatatttttatggagagaaatatataattaataagttaataaataaattaggaattattaggtagagatatgtattatgaagaaaataaaataggataataaagagtgattgggaagttttttttaaatttaattataatagaaggtttttttaagagtttgttatttaagattaatatttgaaagataaggaattaattatgtaaaaatttgggggtagagtattttagatagtaagaataattttgatatgttataaatataaggatagacgttaggtatggtggtttatattcgtaattttagtattttgggaggtcgaggcgggtggataatttgaggtcgggagttcgagattagtttgattaatatggagaaatttcgtttttattaaaaatataaaataattagttaggtttggtggtgtatgtttgtaattttagttatttaggaggttgaggtagaagaatcgtttgaattcgggaggcggaagttgtagtaagtcgagatcgtgttattgtattttagtttgggtaataagagtaaaattttattttaaaaaaaaaaaaaaaaaaaaaaaaaaattaaggatagattaataagattatagtgattaaggggaaggatataagggttaaattttgaggggtatggtaagttttagaaaatagtatggatttagttataagagcggtggaatagtataatggttcgtaaggttaaaaagaggtagaaggtcgggcgtagtggtttacgtttgtaattttagtattttgggaggtcgaggtgggtggattataaggttaggaatttaagattagtttggttaagaaggtgaaattttatttttattaaaaataaaatataaaaaattagtcgggtgtagtggtaggtttttggaattttagttattagggaggttgaggtagaagaatcgtttgaattttaagggcggaggttgtagtgagttgagatcgcgttattgtattttagtttggcgatatagtgagattgcgttttaaaaaaataaaaataaaaataaaaataggttaggcgtagtggtttatatttgtaattttagtattttgggaagttaaggcgggcggattataaggttaggagatcgagattattttggttaatatggtgagatttatttttattaaaaaatataaaaaaaaaaaaaaaattagtcggttattgtggcgggtgtttgtagttttagttattcgggaggttgaggtaggagaatggcgtgaattcgggaggcggagtttgtagtgagtcgaaatcgcgttattgtattttagtttgggtaatagagcgagatttcgttttaaaaatataaaaaataaaaagaagtagaagaattatttaggatttaaagagtttaggggaatggtagtaaaaatggatagaaataaagatatataggttatattttggagaagatagagtttgttgatgaaatagatgtaggagataagagaaattaagggatttcggaaatttaaatttttttatttaaaaatataatcggtcgggtatggcggtttacgtttgtaattttagtattttgggaggtcgaggtgggtgaattatttgaggttaggagttcgtgattagtttggttaatatggcgaaatttcgtttttattaaaaatataaaaattagtcgggtatgggggagcgtgtttgtaattttagttatttaggaggttgaggtaggagaattgtttaaattcgggagatggaggttgtagtgagtcgagattgtgttattgtattttagtttgggtgatagagtgagattatgttttaaaaaaaaaaaaaaaaaaaattataattaatattgatattacgtattaattggtgaagaggtagatggttggatgagtaggtttgattttggatatgttaagtttaaggtatatattagatattaagtgaagatattaagttggtaattggatttattaatttggaattcgggggatagtttaaaattaaaaatataaaggagtagttgtaggtatataggtgttatttaagtttatttatttaaaaaaaaatataaagtgaaggtatttataattatgtttttagttagagaagcgtttagtataaaatagtagaaaggaaaaagtagtgaggtgagatagaataagtaggagagtgttgtatttaagaaaaaattttttttttatatagaagttaatatttatattaaatgttaaacgttgtaatatggtaagagtagttttagtgaagtaatttagtgaagtagcgaggatagattaatattaagagtgggttaaggaatgaatagttaagggaggaagtaggaatattaattatttttttaagaaattttgtaatgatggaaaggaaatgggatggtagttagaagattatttgtggttaaacggattttttttaaatagataatattagaatatgtttgtatgatgggaatgatttaggagagaaatagaaattaatgatacggaatagaggaataattgtagaagcggagtttttgagtgagtaagggaagattggattttttgtataagtagagtttttataggaaagagatatattatttattatgagaagttagagagtatgggtataaaagtaggtgatttgttatgatttagtggtgaaaagatgaaggaatttttatttattttttttttttagtgaaaaaataaaagtaagattattaattaagaataaaggaaaagaggaaaaatagagtgatttatgaagtttattttaggaaggcgaatgtataagagaaatattattgtaggattattaggtagggttggatgtatattgtgtttttatttttattaataattttttattagtattatatttatatttatttgtttgtattttttattaattataaattttgtgagagtagaagttacgtttgtgtgttttatagttgaatttttagtattttggtagagaatttagtatattattgtttattatttttgatatgattataggtttgtttattatttaatatatatagtgtttagtattgaggatggagagatgagaagatagtttttgtttttaagggtttattttttagagagaaggtagatatttaaatatagtataatgttatattttttttatatatatatatataaggtgaaaaaggaatatagaggaaagattttaatttgttggagagttagggaagggttttaaagggtaataagttaggtatagtgttgtgtgtttatagttttagttatttaggaggttgaggtaggattgtttgagttaaggagtttgaggttagtttgggtaatatagtaagattttgttttttttaaaaatagtaataaaaaaaaaaggaaattgtatttgagttgagaagtttaaaaagtgaaggaattttgaaggtagttaagtaaaggtaaatagtttgatatatgagagtgtttagagaatgataagtagtttaatattgttggagtagagtatagaggaggtagaggtaagagatgaagttgtagatagcgaggaagttagattatgaaagagtttgtatgttaaaaaaaaagttttaattttattttgggaaatataaattgtatatgggagtgatataattagatttgtaagttaaattaagtttgtaaatatagtagaagatggattggaaattagaggtcggaaggttagtaaggaggattatagtagtttttataagagatattgagaggttaaaatagaggatgaaaaagtagtaatgatatgaaagatatttagaaataagattattaggtatatgggtggtaaatttttaatttttcggataatagttatgagagataatattaggatttatagatttgatggataattttaaaagaaatgttggattttagtttataatagtttaatagttttcgtgagatagaaaattttggattaggtttttttgttttatagatttaaattggttttgaatttgtaaattaggaaaaataaaattattttttaagataaaattattttatatagattagagaatagaatagatgaaagttgggaaatgaattaaaatttgttttaagattaaagatttattttgaggatagttttaatgttttttatttattttttttaaatagtattttaaatgagtatagtttttagttgggtaaaaaaggaaattaaagggttgttaatattggaatataattttaaaaaagggatagatgtttttttttagagatatttaattataagataaatagttagttattggatgtttgaaatttgttttaaatagaaaaatattttatttttgaggtttttttaaagttaatatattatattttgatgatttaaaatatatataaaaaaagattttttaatgataattttttatttttggtttttttttgaaattatggttaagttttttagttatgagggaatagaagaaaatagattatttttatattattaggtttaataataataggttttttaaaggtttggtagcgttttgaattggtttaaaatgtattggttaatttttaaagagtatatgttaaattaatatatgtagagggaatagaagagaatagattgttaaaaaaaaatagagaagattaaagaatatttttttttaatttattttatatgttaatattaattttaaatttttttttttttttaaaaaagtatttttagtgtcgggtgtggtggtttacgtttgtaattttaatattttaggaggtcgaggcgggcgaattacgaggttaggagattaagattattttggttaatacgatgaaattttgtttttattaaaaatataaaaatttagttggacgtggtggtaggcgtttgtagttttagttatttaggaggttgaggtaggagaatggcgtgaacgtaggaggcggagtttgtagtgagtcgagatggcgtattttagtttgggggatagagcgagatttcgttttaaaaaaaaaaaaaaaagtatttttagaagttttattattatttataggataaagtttaaatttttggtcgggtatagtgatttatatttgtaattttagtattttgggaggtagaggtaggcggattatttgaggttaggagtttgagattagtttgattaatatggagaaatttcgtttttattaaaaatataaaattcgtcgggcgtggtggtatatgtttgtaattttagttatttcggaggttgaggtaggagaattgtttaaatttgggagatagaggttgtagtgaatcgagatcgttattgtattttagtttgagaaaaaagagtaaaattttattttaaaaaaagtttaaattttttggtttggtatttaaatatttagtatttagtattatttaattttttaatagtatcgtttatattttttttttttagtttattggatttttttatttttttgtaataggaaattttataggaaagttagaaattttagtattataaaaaggaataaggttatttttgttaataattaaaataaaggataagcgtttaaattttttattaaaattagtttttagttgatgatttaggttaataaatggtagaagaggtaggatttaggaaagttaatgttgttaaaagaagggtaaattatatttttttgtggtaattaagaattattatgaattttttttttttttgaagttgtttttatttttatagttttattatttgttatttaatagatttggaaattttaattttttttattggttttattattaatatgtttttttattaggtttttttttaatgataagttatttagtttttattggagaggagaaaggtagtttagtttgttaatttaattttagttataacgggtttaaaaataggttttggtataagtgaaagttatttgtttaaaaaaattttttggttttattatattgataatttataattttagtttatgtttattttttagtaaattatattttttaaagtatttatgaaaaattattttagattttagaggtttatgaaggtagggtgatttttatatggagaaggtattttttttaaaattagtttttagattttgttttgtttttatttttttagatttggaaataaaaatattaaataaaattaaattaaaagtttttattaaggtttttttttcgggttggttaataaaaatatatagtatcgtggtagagggcggtgggtgggtggtggagaatatttagagtaaaggggtagtgtatttggtcggatgatggttaatatattttgaaggtaaggacgttattatagataattaggttttggttatttaggataaaagttaaagatggtaattaaatatttaattaaaaggttaatttgtaattttagtatataagttattagatttttagatttgttttaaattttaagaaatatttttggtgtgttagaataatgtaaatgtataataagtattttataggtttgtaattttaagtatagtattattgttattagattttttttttttttttttgaggttgagttttatttttatttaagttgaagtgtaatggtacgatttcggtttattataatttttatttttcgggtttaagcgattttgttttagtttttcgagtagttgggattataggtgtgtgttattatgtttggttaatttatgtatttttagtagagatggggttttattatgttggttaggttggttttgaatttttgattttaagtgatttgtttatttcggttttttaaagtattgggattataggtatgagttattgtgttaggtttttagataattttaatgttgtattttgtttgtattttaattagattataaattttttacggataaagaatatgtgttaaagtttttattataatgttttatattggattgaaaatataattgatgatttgattgatgattatattgaaaagaaattatgaatgttggtatgtttttaaagttaaagtagtaggtgatattagtgatagaggttacgtttgtttttagtatttattgaattttcgttgggtaagaaaagttagattttaataaaaattgatggagattgttttcgttaaatatagtagtttataaggttattaaattttggaattaaaaggaaaaataaggttaaaatagagttatgtgaataaaaattgggtttaggatagtgaaataatagtttttttaataagaaaaaaagtagtagtagttaaaaggtaaaattaagtaaaggatgatttaataagaaaagtattagtatttatattttttgtatttttattgaaacgttttatcggagattggtaatgattaggttaagatgatagagatgatttaaggttgggttttttatttgaaaagtttattaattttagagttgtgttaaatttaagttaaagttggaatagggtttttttcggattaatattaagtgaagtggattattaagtggagtagcggtacgaaggtggtttttttagatttttaagtttaatttttacggagtcgtttggtattaggtatataatttaagttttttgagttttaatttttttatttataataaaagggtaatgtaggttttttttataattttaaggggcggtggtttgatatagagtattatgaaaataaaagtagtatattaaagtaatatattattattatgattatttatagaattattattcgttaggatgaaattttttatataagagatgaagttcgagagaaaagagttgaaggggaaggtttttacgaggagatagtaatcgaattgtagcgtttcggttagtagtatatatagtaggtacgcgtttagtaattttagacgttgcggagtggagtttaagtatttttttaagaatcgcgaaatgatagatattatcgacgtcgatataattgtacgtaaggtattttagttcgcgttttaaatttttggaggattcgtcgattatatcggatgtgttgtttgcgtatgcgtattttcgtgatttaatttcgtttttttcggtgtgttaatttgcgtaggcgttgaggtcggttagggcgcgtaataattaatgcgtagacgcggattgtattaatagatttaattataatttagaaaagttaatgcgtttgcgtaatggttttattaatgagttggggacgtgtattttttttgttttgttttcgttcgttagttcggtgacgtttatagttgttttggtaataagatatattgggaggaagaggggaataagttttattggggatcgcgtagttaattagaggtattcggttttttttggtttttttgagttttggaagatttaacggtttgtatttattttgaggtaatgtttggcgtttttggggtttgatattagtttgattttaattttgttaagggcgttgtttgtagatgtttgttatagattattggaataagttaagtttattcgtagtgagattcggcgcggttaattattgtataggttttagtttagatttaattatttgggggagtgagtgggtgtggtgaggggcgggaggtagggaggaagtttgattttagtagggttttgaattggaattcgggatttggttttgtaatgttaatatttattgggcgtttttttggggtttgacgttgtattaatttgtagggatttttacgtgaattagatatatttgtagttttaaaagagttggtgaagggagggatagttgtcgaatgtcgtgtaaaaagtatatggttaagtttagtagtttttttttcgtaagttggtattttgaatttggtgtaatatttcgggatgttagcgtcgaaaggttcgaaagagtatgtttggtttaattttattttttttaatttattttgtagaagaaattgaaatggttttaggttttgtattttaataagtgggattattttgagggttttaattgtttttttttttttttttttgagacggagttttgttttgtcggttaggttggagtgtagtgtcgcgatttcggtttattgtaattttcgtttttttagtagttgggattataggtacgcgttattacgttcggttaatttttgtatttttagtagagacggagttttattattgttagttaggttggtttcgaatttttgattttgtgattcgttagtttcggttttttaaagtgttgggattataggtatgagttattgtattcggtttgttttaattttttttaagaaattaagttttggttttcgttgtttttttaattttacgtgaattcgattttttagatttagtttattttattttttagttgtaagtttttttatatatgattaggtattttatttttagttttttaatattttgaattgtacgtgagtaaaatttttaaaatagtaggtgaataatagcgtttttgtttttttattttttttttttttttttttgagatgaagttttgtttttgttatttaggttggagtgtagtgaatggtgcgatttcggtttattgtaatttttattttttgggtttaagttatttttttgttttagtttttcgagtagttgggattagaggtatttgttattacgttcggttaatttttgtatttttagtagaaacggggtttcgttatgttggttaagttgattttgaatttttgattttaggtgatttgtttgttttagttttttaaagtgttgggattataggagtgagttattgcgtcggtttttttttattttttatttgtttttagattggaaattttatacgtattaattaacggatgtattattagtggtgattaaagttttatttaagttttagaaagaagagaaataatttaagaaatttttagagtttatttgaatagatagatttatatttatattcgtggagatttgtgtagttatatgaatataagtttagtttaaatttatgttgttgagaaagaaaaaaaaagagtggataataagttggtttttattttaatataatatggtaggaagtattaatttttttgataagttgaatttttttttttgttttattaataagtaggagggtagtttttttacgaatatttaattttaaattttataggttaggttgatgttttttaattatttaggtgtggattttttagggagtttttgttttattagttaggttttttttagtgtttttttttttatgttttgtttgtttttgatttatgttaattattattattaagatttttttaggaatttttataggagagaagaagagatgaaaaatattaaatggatttattgaatgtatttgtttttgagatttgttagttatattaatatattatattagggtttttttgaattatttaaaatagtaagaaaaggtttatttttttatttagtttatgattttataattattgaaatatttttaattgatttgttaataggaaattgttaatattagtgttgattttaattagtttaaattagaatattaatatagtttaaaatttttgtttagagtagtggataagagtgtaagttttagaattagatagttttaggtttgaattttgattttgttgtttattagttgtttaatttggaataagttatttagtttgatagttttattttttttttttataaaatagaaataataatatttggtttattgaaattatgtgaggattaaatgagataatgttaagtattaagttgttagtatagtgtttggtagatagtaaatgtttagtaaatgtttgtttttattaattattattaattttagtaattaattatgtttgttttttttagttttttgaatgattaaaagttagttaaattatagcgtttttaataatttgggtatgtaaaagatagtattggagggattgtaatttaaatggtttttaaagggtagatttaatttataagttgaaattgaagttagagtatattttaggggttttattatataaaataatggaagagtggaggagtaagagggtttttttaagggtaaagtttatgattttatattatatattttttataaaaagaaattatattatttattaaaagaaatataaattttttaaagtttgagtagataataatttttttaaaggaaattttcgtatggaaaagaatgttttttttatttttttttttttgtattgttacgtttgttttaagatttttttttttgtttttgttaattgttattgtatatataatttttattttttaaattttggttttagtgtgattaaaattttttttttttgttttttaatagaatagataaaataggttattatttttagaaataaaaatttaaggagaattaagttgtaaatagtataaagttaaatttttaaagtattaagtttttgattaagttttagtaaagtagtaaatatttttagtgaatttatatttttttatttttttagtttttgatgaagtggaataattttttagtttttttgtttggttttttttttttttagttgtttgggagttttaaaaaagttttagttttgtttttttgttggtattcgaaagtgagtttattatattgttttttttaagagtagattatttattataatatggggttgaaattattagtgtttgagtaatagtgtgtaatagaattttttgtgataatgtttttgtattgtttagtatagtaattgttagatatatgtggttattgagtatttaaattagttagtgttgtaatttaaatgtaggtttattttttcgttgtttgtagagtttatttaataagagtgagatttggtataaagaaaatgatattttattttaaagttattttaggggaggaagtattggttttttgttttaagggtattattttatttttggagtagaaagagggtgtttttgaaatggggtatggaatgttggtatgaatggtacgaggggaggaagcgagtggttggggggtttgtatattatttttagtgttttatttattggatagtgattgttggtgttttttgtgggtaggattgggttgtaaaagtggttaaaattttttaggtaagagaaagttttgtagtaggtatattttgggttgtagataggttgttgttttttaaggtaatttttcggtgggtgagagtttttttttggagtttttaagtatatagttagatgaatttgttttatagggagtgtttgataaagaggaggtaaaaggttataattgtatttttaaagagttaaggaggaagtgaggagaagggggaaaagaagagagattttttaaaaattattaaattattttttagaaaaatggggatatttggttatagtgtgattaaggaaattttatttggtttttatttaaatttaagtagttatttgtggttagtggttgttattggatagaataatttatgagttattttatttatttttatgtttagttaaagagatatattttgtttatagtttatttaaatggtagtgatatttatttgaaataagaataatttatagttgttaggtttgagttattagtttattagttttatttatttttggaatatttagtgatgatttatagttatagaaagagggtttgtaattttttaaggagtttattttgttcgttgtttagatagagttggtttattaagattgggtaattagaatggagaaagagtaatttatatatagttagttgtgtaggagaacggaattttattattatttaaattagtttttttaagtattcggggattagagtttttaaggataatttggttggggaagttagtgagttacgagttttgatggtcggggatgaaattataaggagttaaagttgtttttttgttttgagtttttgggtggggggcgttgtaagattagatgagttagtttattaatttgagtggtattagttgatttattaagtgtaggggttattaaatat

SEQ ID NO: 545 - DNA, 5682 bp, Artificial Sequence
  chemically treated genomic DNA (Homo sapiens)
  unsure 3955: n is a or g or c or t
tttagatgtgaggtatagataggtatattatatattttggtagtatagaggaaggtattaggtatgatgtaatggtaagggagattttttggaggaatgttgtttggttagtttaatagaggtgttaagattttaagtattagttttattgttagtaagttatgtggtttggggttagttttttaatttttttaaatattagttggtttatttgtaatgagggtgataatatttgtttatagttttgtattttttggtttttaagaaattgtataatttttttttttttttattatttttttttttttttttttttgttatttgtattttttaacgtggggttttttaagttttatattttgggtttttttatttttatatgttatgtttttttggtttaaattttgtttgtagttatatttttatttattttattttaattttgttttcgttttaatcgtatgttggatatttttacgtagatattttgttaaggtatttgaaatttaataagtgtaaagttgaatatggatagtttttttaaatagggttgttaattttataaattttaaattttcgagttttttttaatatttttttttttattgttttttatttaattagttgttaaattttgtggtttattattttgaaatttgtttggttagagtaggaatggaaatttaaaagtttataataattgtgttaggagttttatagagtaataggattggaattttttaatatagatttattaattttaaaattaaaagatatttttgttttttaaatatttggattgttgtaattagttaaattggatttttgtttatatagttatttttattttagtattttagatgtaaattttaaattatttaggtgttttttttttataagtgttaatcgttttttaatgtttttgaatggtgtaaaaggtataggttttgtttttaaggtttttttaaatttttttttagttttttttatttttttgttttattgttattgttttaatttagttttttatattttttttaaattaaattttttattatttttggaattaataggattgattttaaatttttgttcgtattttatttttttttttatttttgttttattgtattgatatttgttatatttagttgaattattgggtttttagtttttttcgttttaattattatattttttttttttttttttgaagttttatattattttggttgtgatatttgtatagtatttattatggaaaatttttttattagattgtagatttttaaatataagtattgatatttagtgggtttttgtatattagggaagtttattaaatagtttttgatttagttattgtatggtttttgggataagagtaagaatcgtggttttttgttttgttaaaattataaatttattttttttgtattttgatttaattatataagtttgttttggattggaaggtttatagagattattttagtgttaaatgttatttaattaatgtagaaataagtttttgagaggtgtagtgatttagttgaggatatattgatagtttttggtagataagtatgaagttttggaattattttttatattataagtttttgggtttttaaattatttttttaagtatttaatttattattttttgtatataagaaatttttgtttattttaataaaaagaatgtagtacggtaggataggagaagtataggttttggaattaaattaggtttagattttgatttggtcgttagttagtgtatgggttttggtaaatagttttttagtttgtttttttgtttgtaaaatatggatagttatttttattttatgaagttgtgttggtgaaatggtataatgtgtataaagtaattggaatataataaatgaggttatttatttaaaataatttttagtaagttataaatttatatatttgtttttttttgaggaatgtttagattttattatagattttttttttaaattgagtaaatatatagtggatttttttgtttttttttttttagaatgttgaaatttggttgattgtaattattatttaagattttatttagtaattgttcgtaaaattttttttttttttttttttttgagacggagttttgttttcgttttttaggttggagtgtaatggcgcgattttggtttattgtaattttcgttttttaggtttaagtgattttttcgttttagttttttaagtagttgggattataggtatttgttataacgtttagttaatttttgtatttttagtagagacggggttttattatgttggttaggttagtttggaatttttgattttaggtgatttttttgttttggttttttaaagtgttgagattataggcgtgagttattacgttcggttaaaatttttttttaaaaaaagttattgttaataattaagtatgttggaaggtgaatgtttaggatatttagtgttattgagttgtgtgatagagataatatttttgatattttgtagagtttattgttttttttttatataaagttatgatatttatataataaatatgtagagagttttaatagattttaatgttaagttttttaatagttgtataattggttttgtttgaatttgttttttttataatgttattttgttttttatattaattttgtgagtttaagtaggaatgaagattatttatttttaatggtaggatagaagggagtggtggttaaggttattggaggttattgggggaataaatgaagattttatgttatttttaaatattgttaggatttaatatattttgtgtttttatatttaatatgggagtaaaggttagatattttaatattaaatatgaggatgatattagatggttttaaaagttttttattataatttttaaattttataatgttcgaatattgttaggttttagtgaaattttatagtagttttttgtttggaattattgtaggattggttttagtaatgggtaatataaggtttggttttatatagtaggtatgggttaaagaaaatgttatgattgaaaaattgttgtttttttttttaaaaagtttatattaattaggaaagagttattagaaaatttttaggaaagaatataatgataggatataataaatatttttatagttggtttatagattaaagtataattttaagtagggaattttatttaacgaggtaaggtatttaagggaaaaggaatttaggttaggattttgttagttagatttagataaattattatagggaagtatgtttttgaggttattttttatgaagaagggtaatttattttgttatttatattttttttgttttcgataggggtggttttaagttggatagatttttattttgattagtattatataggtttgtggtttttaaatttggttgtatagtgtggtattttaagtaattttgatatttagttttatttttaaagatgttgatttaatttgtttaaggtgtagtttgggtttttggattggaattaatttatatatttattaatgatagattggataaagaaaatgtggtatatatatattatagaatattatatagttataaaaaaggatgagtttatgttttatgtagggatatggatgaagttggaaattattaattttagtaaattaatataagattagaaaattaaatattgtatgtttttatttataagtgggagttgaataatgagaatatatagatatagggaggggaatattatatacgggggtttgttggagggtgggggttaggggagggatagtattaggagaaatatttaatgtagatgttgggttgatgggtgtagtaaattattatggtacgtgtatatttatgtaataaattgtatgttttgtatatgtattttagaatttanagaatatatatttatatatgtataaatatatatgaatatataaatataaatatatatataagttttttacgtgattttaatgtgtggttagttttgtaaattttaggttatttattttaaagggtttgtaataagttttttttttaaaatttattttattattatttagcgttttggggtttgtttgtttttattgttattttattttatatcgtttcgaggcgcgcgcgcgcgcgcgtatatatatatatatatatatatatatatatatatatacgtatattggtgaatttttttttatagttagtttggagtaattttaaagtggtgtttttcgtaaataaggagaattcgggtgaagaaaatgatttttattcgaataaggtatgaataatgtttattttttattgtgttatttaatttgtttttttaggtttttgtttttatattagagagtgttttaggagatgacgttttttttttttagttatttttttattttcgtgttggtttttgatagattttttagtagagggtttaagacgcgggtagagtatcgcgttttagcgtttgagttttagttttcgaattttatcgtatttgtaggtttttttggtagtatttaagcgcggggatgtttcgtttagacgaatttacgtgcgggtagtaaggtttgcgatatttgagtatttttttttttttttcgtttatatttcgtttgtgtttacgtagcgaggagatatttaggtttttagaaggtaggttatcgtaggttttatttagtagtggagagagtgagttttagagggtgttgttagcgagtttttttttttttttttttttatttttttcgagtttagggttttcggggcgtatgacgtcggagttttttgatcgtatttttgattataataaatttttattttattcgttttgtttgttttatttttggtgacgtagagttttagtttagatttcgtttaaagtatttatttaattggtattgcggagttacgaggtttttgtttattgtaattcgtttcggtcgttgggcgtagttgcgattcggcggagtttcggcggcgcgtttttgttttaattcggcgcgttatgatcgtcgcgcggtcgagcgtgttcgcggcgttgttttttttcggggagttgtttcggttgttgttgttggtgttgttgtgtttgtcggtcgtgtggggtgagtaggggttcggcggtcggggaagtttttgggttgggtgggaggtttaagtcggtttttgagatacgtataggggtcggcgatttggtaggtggggagtttggttcgcggtcgtggttttcgtcgttttgtgtttttaaggttttcgtcgtttattagtatttggggtttttgttgtgtcggtttttagttgatttggttttaggggtcggcgtggagggttaaagaggtttcggttgggtttgcggagtagttaagtttggtaaaatcgaaagggagggtttaaagagattgtatttttaatttttaaaaagttggtttaaaaggatgggaggttagatcgttgatcgttttttattttcgatagagtttagtcgtgtggagtatacgatgttgtaaatttgtatgttattttttttaggtgtggtattttaagggggtttgtgttttgaaaatagtaattgtgaggatatttgatagttattttttttagttttgtttttgtttttttagg

SEQ ID NO: 546 - DNA, 5682 bp, Artificial Sequence
  chemically treated genomic DNA (Homo sapiens)
  unsure 1728: n is a or g or c or t
tttagggagataaaagtagaattgaaggaaatgattattaagtgtttttatagttgttgtttttaagatataagtttttttgaaatgttatatttgaaagagatgatatgtaagtttgtagtatcgtgtgttttatacggttggattttgtcgagagtggggaacggttagcggtttggttttttatttttttagattagttttttgggggttaaggatatagtttttttgagttttttttttcgattttgttaggtttggttgtttcgtaaatttagtcggggtttttttaattttttacgtcgatttttaaagttaagttagttgggggtcgatatagtaggagttttaaatgttggtgagcggcgagagttttaaaggtataggacggcgggaattacgatcgcgggttaagttttttatttgttaagtcgtcggtttttgtgcgtgttttagagatcgatttggattttttatttagtttaggggttttttcggtcgtcgggtttttatttattttatacggtcggtaggtataatagtattagtagtagtagtcggggtagtttttcgaggaggggtagcgtcgcgggtacgttcggtcgcgcgacggttatggcgcgtcgggttagaataaggacgcgtcgtcgggatttcgtcgagtcgtagttacgtttagcggtcggagcgagttgtagtaagtagaagtttcgtggtttcgtaatattagttaaatgagtgttttgggcggggtttgggttggggttttgcgttattaagggtgggataaataagacgggtggagtaggggtttgttgtggttagaggtgcggttagagggtttcggcgttatacgtttcgggggttttagattcggggagagtggggaggggaaggaggaggagttcgttggtaatattttttgggatttattttttttattgttgggtggggtttgcgatgatttgttttttagaaatttaaatattttttcgttacgtaaatataaacggggtgtaaacgggagagggggaggggtgtttaagtatcgtaggttttgttgttcgtacgtgagttcgtttaagcggagtattttcgcgtttgagtgttgttaaggggatttgtaggtgcggtggagttcgggggttgagatttaggcgttgagacgcggtgttttattcgcgttttgggttttttattgggaggtttgttaaaggttagtacgagggtggggaaataattaaggaggaagggcgttattttttagaatattttttaatgtgaaaatagagatttggggaaataggttgaataatatagtagggagtgaatattgtttatgttttgttcgggtgggagttattttttttattcgggttttttttatttacgaaagatattattttgggattattttagattgattgtagagagaaatttattagtgtgcgtgtgtgtatgtgtgtgtgtgtgtgtgtgtgtgtgtgtgcgcgcgcgcgcgcgcgtttcggggcggtgtggggtgggataataataaaaataaatagattttaaaacgttgaatggtggtggggtggattttaagaggaaggtttgttataaattttttagaataaatagtttgaggtttgtaagattggttatatattagaattacgtggggagtttatatatatatttatatttatatatttatatatatttatatatatataaatatatattttntaagttttggaatatatgtgtagaatatgtagtttgttatataggtatatacgtgttatggtggtttgttgtatttattaatttaatatttatattaggtattttttttaatgttattttttttttaatttttattttttaataggttttcgtgtgtgatgtttttttttttgtgtttgtgtatttttattgtttaatttttatttatgagtaagaatatgtagtgtttggttttttggttttatgttagtttgttgaggttgatggtttttagttttatttatgtttttgtataggatatgaatttatttttttttatggttgtgtagtattttatggtgtatatgtgttatattttttttatttagtttattattgatgggtatatgggttggttttaatttagaggtttaaattgtattttagataaattaaattagtatttttggggatgggattgggtattaggattatttaaagtgttatattgtgtagttaggtttgagaattatagatttatatggtattggttagagtaaagatttatttagtttaggattatttttgtcgaaaatagaaaggatatagatggtaaggtgggttgtttttttttatagagaatagttttaagaatatgtttttttgtaataatttatttgggtttggttagtagagttttagtttagatttttttttttttaaatgttttatttcgttaagtgaaattttttatttggaattatattttggtttatggattagttgtgggggtatttgttatattttattattatatttttttttgaaggttttttgatagtttttttttggttggtatgagttttttgaggaggaaaatagtaattttttaattatagtattttttttgatttatatttattgtatagaattaaattttgtgttgtttattgttggagttaattttatagtgattttaagtaagggattattgtaggattttattgaaatttaataatattcgaatattgtggagtttagaagttatggtggggggtttttaaaattatttagtgttatttttatatttgatgttaaaatatttaatttttatttttatattggatataaaaatataaggtatgttaggttttggtagtgtttagaagtggtatgaggtttttatttatttttttaataatttttagtaattttaattattatttttttttgttttgttattagagataggtaatttttatttttgtttgggtttatagaattggtgtgaaaggtaaggtagtattatgaaaaagataggtttaagtaagattagttatgtagttgttagaagatttaatattgaagtttgttaaagttttttatatgtttattatgtgaatgttatagttttatatggagagaaaataatgagttttgtaaagtgttaaaaatattatttttattatatagtttagtgatattaaatgttttaagtatttattttttagtatatttagttattggtaataattttttttaaaaggaaattttggtcgggcgtggtggtttacgtttgtaattttagtattttgggaggttaaggtaggaggattatttgaggttaggagttttagattagtttggttaatatggtgaaatttcgtttttattaaaaatataaaaattggttgggcgttgtggtaggtgtttgtaattttagttatttgggaggttgaggcgggagaattatttgaatttgggaggcggaggttgtagtgagttaagatcgcgttattgtattttagtttgggggacgagagtaaaatttcgttttaaaaaaaaaaaaagaaaagaaattttacgaataattattggatagagttttaagtaatagttataattagttaaattttaatattttgaggggaaggaaataaagaaatttattatgtatttatttaatttagaaaagagatttatgataaaatttaagtattttttagaaaaaagtaaatatgtgaatttataatttattaaagattattttaaataaatggttttatttgttgtgttttagttgttttatatatattatattattttattaatataattttatgaagtgaagataattatttatattttgtagataaggaaataggttgagaggttgtttattaaagtttatgtattaattagcgattaggttagaatttaaatttagtttgattttaaaatttgtattttttttgttttgtcgtattatattttttttattggaatgagtaaaaattttttgtatgtagaggatgatgaattaggtatttggggaggtgatttgggaatttaggggtttatgatatgagaagtagttttaaggttttatatttatttattagaaattattagtgtgtttttagttgagttattgtattttttaagggtttatttttgtattgattaaatagtatttggtattaaaatagtttttatagattttttaatttaaaataagtttatgtaattaagttaaaatataaagaaaataggtttatgattttgatagagtaagggattacggtttttatttttattttaggaattatataatgattaaattaaagattgtttaataaatttttttagtatatagaaatttattaagtgttaatatttgtgtttgagaatttataatttagtagggaggttttttatgataaatgttatataaatattataattaaagtggtatggggttttagaaaggaaagaagggagtgtggtaattggagcggggaaggttaaaggtttagtgatttaattaaatatgataagtgttaatgtaatagggtaaaaataggaaaagagatgagatacgaataaaggtttggggttagttttgttgattttaggaatagtaaggagtttagtttagggagagtatggagaattgaattgaggtaatggtaatggaataagagggtaagagaggttggaaagagatttgagagagttttaaaggtaaggtttgtgttttttatattatttagaagtattaaaggacggttgatatttgtaaggaggaagtatttgggtaatttggaatttgtatttaagatgttggaatgggaatggttgtgtaagtaaagatttaatttagttaattataatagtttaggtgtttagagaataaaaatgttttttagttttaaaattaataaatttatattaaggagttttagttttgttgttttgtaaaatttttgatataattattatagatttttgaatttttatttttgttttgattaaataagttttaaagtaataagttatagaatttggtaattgattagataaggaatagtggggaaaaagatgttgaagaggattcggaagtttggagtttgtgagattagtagttttatttaaaagaattatttatatttagttttatatttgttgaattttaaatgttttggtagagtgtttacgtggaaatgtttagtatgcgattgaaacggaggtaagattgaggtggagtgggtagagatgtgattgtaggtaaggtttgaattaagggagtatagtatgtggaaatagagaagtttaaggtgtgagatttgaggagttttacgttagaaagtataaatgatagagaaagggaaaggagaaggtagtggaaaggaaagaggattgtgtaattttttgaaagttaaggaatataaaattgtgagtaaatattattatttttattgtaagtgaattagttggtgtttagggaagttaagaaattagttttaaattatatggtttgttggtagtagaattagtgtttaggattttaatatttttgttagattggttaggtaatatttttttagaaaattttttttgttattgtattatatttggtatttttttttatgttattaaagtatgtaatgtgtttatttatgttttatatttgag

SEQ ID NO: 547 - DNA, 17959 bp, Artificial Sequence
  chemically treated genomic DNA (Homo sapiens)
ttagtgggtgatgtttgatatttatttttagtatttagggttggaggggttggatatttttatgtatgtatgtatatacgtgtgtatatatatatgtatatataaagtatttataagataaagtaaatgttagaaaagattattggttatgtgttatttatatgttatatatattttttattttttgtttagttattattggttattttttatttaggtagtagttgtgagaaattaaatgtatttatgttttagaattatggggagaaaataattgttgaatgttttttttgtgtttattatggttttaggtgttgggaatatttagtgggtaagatggattaggtttttttttttatggagttgatattttagttagtggagaaaaataataagttagtagatagataaatgaggaattttagatgaggatagagtgttataaagatagtaagatagagtaggttttttgaaaagttgattttagaataagaagaagttaattacgcgaggatttggaagagatagttttcggtagtggtgttgtaggatttttttgttagtttagttaaaaagagcgtttttgttatataattacgaaagattaggtttatagatattttgaagggtggggaaaatggaatttattaggtaaaaaggaaaaaaaggaaatagggatttttagtaaagtaagagttttgttagtcggtttttcgcgttatagattgaattttagattttattcgggaagaggttaggttttttttttttgtaaagggcgtgaatttttgtggttttattttatttttcggtgtgtaggtagttagagtttttttgcggatttttttatgtttggttgttttagtgggagtggttaatataaagttttaaggggaagaattggtttgttttgttagaggaattttagaaaggttagtgtggttagaggagttaagagggaggagtttataattgggtaggatttttattatgtagggtttggtaggttatgtgtgttaggggttgtatttggttgtttatgaagatattaattataaggattttatttaatagaaatttgttttttatataataaaaaagtttggacgaggagtttatagttttgaagcgtttttatggatttttagatttttatatgtttttgatttttttgttttgttatttttagtttgtgatttttatgtttttgattgttttatagttgcgatatgattgttttatttttggttttttgtttgaatttaaggtggtataaatgatgttattaggaggaaggggtgtttttatattaagaatgtaaattttttttaaaatattttagtagatttttatggttaaaattgtgttatttggttatttttagttataagggaagttgaaaaataaatgttttttttttgcgaagtttattatttttttaatagtattttttttattagaaatgttattgagtagatagattattttatattgtaatgagtagtttggattgtattttagaggagaagttatttgtcgataggtgggaaattaagagttttttgaagatgtaaaattaatttggttgttatattgttaggagtagaatgtatttgaattacgtagtatttaaatataatacgttagtggtagtgaatttgtataggtttgtagtaattttaatttttgtttttttagaaggaagaatttaattgaggggtataaagtagaaagagagattgaggtaattttaaaggaggagtgaaagtttattaaaaagttttagatttggaataaaaggaaagtatatttggaagatggttaagtaggtaattttagagattaagtgtacggtttgatttttgatttagggttttatatattggtatatttttggagttttgtattttttgattttttagggattagttttattttttgattttttttttggggtaggttgtttatatgtatagtgatttgttagcgtttggaaagtgagtaggggtagtgtgtttattggaagtgtatatatgtttatttgaggtaatttttttttattagttttatgtttttagaaggttatatattagttaaacgttgttattttgtttttcgatgtgtggtaaagagattttattaggaagttgttgattattatttttaggttttttttatttattgggagattgtttttttttggtattgattgtaattaattattattttagagaaatagtgtaataattttttgattattatttgatggttatataatatttttggtggtgtgggttgtgggggaagagtttttttttgttttgtttaggtcgattagttatttattgtaagataattagagttttttaattagtataaatttggagaataggttataggtaaagagatataatttgttagattttagggtagtttaggggttattagggtttttttggagttttgtttttttttgtgaaggtttttttttttattttttagggttttttattaatagtatttgttattgagtttaagatgttgtggttcgtaatatgtaattttgttttaggtattattaagggtaaaaatattattaattaaatgatattataatgtgtttttttaatttaaaatttttattttatatttttaagaaataattttttaggtttaagatatacgatataagtttttaattatatagtatttttgtatatatataaaaaggaagttatttatgaaattaattagttaggtatttttaaatttttaagaacgtgagtgatgtgttatttttttaaagagtaatttagtattaattttaggatttttttttaaattgttggtatttatttggaagtttggatgtgaatgtaagataatggtaagtatattatgattgtagtttggttaataattattttattatcggtgttgaaatgtgtgtatggagtggggaatgtaagattaatgtatgttatgtgtatttttatgtgtgttttgatgtatagagttgcgtagtattgagttagataataaatagagaagttaaggtggcggtggtgagtttggagtttagtggaggggtagaaagagagaaattaagttgtagatgtggtatttataagcgtttgtaggtggtggtggtggtgagtttggagtttaggggaggagtagaaatagagaaatgaggttgtagatttggtatttgtaagtatttgtatgatagtcgtttataggttgtatgtgattatttatgggaagtttagatagagaagaaggttaatgttgagttttgcgatatttaaatgtttataaatttagaagagggcgaattgttaagttgatagagtgagtagttagggtggttagagaattggagggtaaggtagtgatgtggtattttcggagtaaaggaggagggggacggttagttgtattaagtgttgttaagagtttaaatagaatgaaagtagaaaatgattattggatttggtagtatataggttataagtgatttttataaaaggattttttatggttgagggtagtgtagtagaatttgatgaaaattagataaattggattggagggagtgataagagatgaggagtttagtttttttgaatagttttgttgttaaagggaaaagtatagttaagcgaggggtggtgtttttttcgttaaagagattaggtttgtttgaatgcgaatttagtaaggtattgcggaagttaatagtagttgtaaaatattggggtaggcgggaagaatacgatttaaggtacgagagttaggggttagttacggtaataggaagatgatggtgaaaattaaaagtttttgagagtggttttaatttaggaagtttattttgttaaggttaaggacgtgtattgatataattttaggaggttttgatgatatgtgtttagggtggttaggaaatattttggttttatatatttgagggagatatgagatattaattaatacgtaagatgtaggttggttttttaggaggtaaaatgtgaagtggaggcgttcgggttataggtatatttaaaggttttttgattggtaattggttgagagttattatttaaagatttggatttagtagaagggaatgttcgggttgtatgaaggagttgtggagattaaggtgttattatgtagatgaagtcgggaatatattgtaaatgttttttattagagttttttattagttttagggttttcgtgcggatgtttgtgaggttatgtttgattttcgttttttattaaggtttgaattagttttttaagataatttagaaggttataggcggaggggagggtttattcgttggttgtagggtttagaattttatttttggtttataacgaggagggtagggatagaagttatcgtttttgttttttagcgttggtttttattcggaaagtaggtttttttttcgtatcgttttttaataaatttttgttttttcggttttcgtcgttgttatttgggttttttttttcgcgttttattaggcgttgtcgcggtaggggttgagggttttaggggacggtcgtttttttgtcgggacgtttcggttttggttcgtattgtggggcgtagttatttagtcgtcgtcgcgtagttaggagttcggttgagcgcgttcgttgtaggagttatttttagttgggttttatttaatttttcgtaattttagttttcgtagttagtcggggatttcgttttttttttttttttttttttttttatttttttattttttttttttttttttttttttcgttttcgttttcgttttcgttttcgttttcggttatagtattcgacgtggcgcggtcggttgcgtacgtatcgtatgtttggtttcgcggtttagtagggcgggcgggtcgcggtgacgttagtgcgtatgtcgtcggtgggttcggttgcgttacgtcggcgcgcggcggtcgcgtttttttaacggtagtggtatttattcggttcgcgcggtttcggcgttttacgcgcgcgcgtcgttttttcgttcgttcgtttttcggcgtttatatttgagtttattcgcgtacgttcgttcggttcgagaatcgcgtcgtcgtttcggtttcgcggaagtttcgtcgcgttatgttttcgtttttcgaagggaaattagagattaaagttggatattcgttcgtcggtattgattttttttttttttttttacgcgcgggtgtcgggggcgggttcgaattcgggggcgtcgggcgggggtttcgcggggagggtttcggcgagcgttgagacgggtttcgggttttgatgttcgttcgaggggcgcgggtcgcggagaggtcgggcgtttaggttcgggaggagttcgtcggagtttcggtttcgtttgtcggcggcggcgaagcgtttttttttgaggatcgcgggcggtcgcgtatttgtgcgattgcgcgtaggtttcggtgttttgggcgaatttagttgtataatttataataaagttttggcggataatatttatttagaggatatagatgtttagaaagaaagtagtagaagtaatgaaaagttagtggtgttaatattatggtgatgattaattagaggttgttagcgttttatatcgatttaagaattaaggagcggaaataatttttattattaattatttaatatgatttttatcgttagttttttttatatttagatttttttttttttttaaagttgttttttttgattttgagtaaattttaaatttttgagttaaggaagttaaagttaggaaagagcggttttttttagaatatagggatttaagtagtttttatgtttttgttatttttttttttttttgggtatagtttttgtttgtattttggattttgtttagacgggtttgttttcgtttttatttttttttttagtggtagtcggtttatatggagggatattggtgagaagattaaaggttttgggttttagaagttaagttattttaatgtatggatgcgtgaggtttttttaggttttaatagtacgttttagtgttataaatttagttttgtaggaatagaagtttttgagaaatatggttttttttggtggtatatttgcgttatttttttgataataaagatttttggttaggcgcggtggtttatgtttgtaattttagtagtttgggaggttaaggagggtggattatttgaggttaggagtttaagattagtttggataatatggtgaaattttatttttattaaaagtagaaaaattagttgggtatggtggcgggcgtttgtaattttagttatttaggaggtcgaggtaggagaatggtttgaattcgggaggtagaagttgtagtgagttaagattgagttaaagtattttagttttggcgataaagcgagcgagattttattttaaaaaaaaaaaaaaaaaaaaaaaagatttttattatttttttttgttgtttttcgttatagggcgggaattttttgtattagtataatgaataggagtcgttttttaaatatgttgtagtttagagtaggtaatattttttagtggtgacggaggttttttataataaaattaattggtattgggaaagaaaaatgtttaattgatgttagagaatttaagaggtatggggttttagaaaattattttattgtgatggaaaatggttttgggggaatttgtgttgtattggttttaagaaaaaaagtattttaaagggagttttttttttgatgggattttttttaaggataattgatttttattttattatagcgggtttttgtttattgtggggaggagcgttttgatttttatttcgggtagggttgtttttaggaattgtagtagttatttgttttggttttttattttttaggatatgggttatattaaagcgtatttgttggaatgatatagaattaaagtatagtaattaaattgtatatagagatatatttataaagaagttttttgttttgttttttgaaatagagttttattttgttatttgggagtgtagtggtacgattttggtttattgtaattttcgttttttaggtttaagagatttttttgttttagtttttcgagtagttgggtttataggtgtttgttattatatttggttgatttttgtatttttagtagagatcggattttgttatgttggttaggttggttttgaatttttgattttaggtgatttatttattttagttttttaaagtgtttatatggagatttttaaggttagaggtataaattgtatatatttattttttgggagaaattttttgttggattttggttttttttgaattgtagagtaaatagttaggttttgtgaattatagagtaagtagtttatttatttttgaggagggaagaggtagtttatttgtgttagtgtagtagtgagtttgggttttaagtttgaagatattattttacgttttattggggtttagttttttttttttatgaaattcgaggtttgggtttcggggtaagttatagggtggggttgtgtttgttgtagtgagttttacgtttcgttttagtattagggtattagtattgtttattttttaggtaaatttttttagtaattttagggtaatttttttagatttacggggtgagtttttgcgggtggttgttattatttgttatttgtttttaagattatagttagaggaggggtttaatagtagtattttttaaatgttagtagtattttttaaatgttaatagtattttttaaatgttaatagtattttttaaatgttaatagtattttttagatgttaatagtattttttaaatgcgtttttttagatgttatagaggattatgtgtgaattttttttggtaggaagttttggtgtttttgtttagtttggtattgttagagagtaggtagttttgaagggtagatagtttttaaaaaaaaaaaaaaaaggcggtttattatattaaaggataattattaaggatagttaagagtatagtttataaattaaaattattgttttaaaaatgttgagaatgtttttattaagtgtttaaattggataatagatttgtgttttaatgtttaattagaaataataaaatttttttatagtgattattttaatgtttttttgtgttttttttttgttgttgtttggtttatattttttgtatatttttcgtaatttttttgttttttttcgtgtattaattttcgtttttttgtttgtttttttgtttttagggttgggtttttttgatttttttattttcggggtggtataaaatatttaataagtattttagagtttttttagggtttttttttattttttattgtttttatagtaaatcgggtttatattttttttaattttgagttttttgtattgtgcgtagggatgtaggtggtttttttggtcggtttaggtagtagattggtggaaatattaatgaagtttgttgagtgttataatgtgttgatatatttttaagcgtttggtacgtttaatttatgaaattattagttattttaatattgagatatcgaggatagtgtcgtttaaaaatttgatttagagtcgggtgtcgtggtttacgtttataattttagtattttgggagatttaggtggggagagtatttgagtttaggagtttaagattagtttggttaatatggtgaaatttcgtttttattaaaaatataaaattagtcgggtgtgttggtgggtgtttgtaattttagttattttgtaggttgaggtaggaaaatcgtttgaatttgggaggtagaggttgtggtgagttaggattatattattggattttagtttgggtaagaagagcgaatatttcgtttaaaaaaaaaaaatttgatttaattgtttggagtgtttgttgttaatttttttgagttagtgatttagtgggagcggtcggaaaggttgttgttttttggaattttagtagttcgatagacgattttattattggttaggtgtttttttttaaggtgggagacgaatgaggtagtttgtaaaggtttttgaagagtgttagagaaaggtgttgtgtaaatataggtattgttatttataagtgatggatggtattgtattatgttttggtaaatgtgttgtcgtttgtagttttttgtagaagtaatttagttttaatgatttgagattttattattgtttttgattataaaatatttgtagagaaatggggtgagtgtttgtttgatgagttattgtaaatgtagattagtagagttagaattagcgagattttttttgttttatttaatagtagttatagtattttatagtagaaaagaggatttaattataagtttcgttattatttatttttgttagtttttgtgagtttgtggtagtgagatgtgtaaaatttttttgttaaatatattttgttggttttgtttttttttattttttagtggagttaaaattatgtgttagtagagtttttataaatttgttatatgatagttttgaatgttattaattttatatgtggttttttttgaaaagtagattttatatttttttttaaagtgaattaaatggaaatataagtacgattatatttattttaagttatgttattttttttagtaattttagagtaatttagtttttttttatattaattgatacgttagatatgagttaaggatgttttttaaaagtttagtgtaattttttttgaattatttttttgtagaaagatttttagattatttattgttagaaatagaagattaatttgttttttattaattttgtggttatagatttgttaagtatagttttagtgttaattagttaggattagaaattgaatggtttaggtaagaggtttgtttttgtttttaatatgttaaggaaaataagattttttagttattatttttttttagaagttttttgttaaggtggtttatggtattttattttttttttagtttttttttgttgtttttgtttagatagggttttttttaggtttgagtgtagtggcgtgattttggtttattgtaattttggttttttgggtttaagagattttttcgttttagtgtgttgagtagttgggattataggtgtgtattattataattagttaatttgtgtattttgtgtagatataaggttttattatgttgtttagttaggttttaaatttttgggtttaagcgatttgtttattttggttttttaaagtgttgggattttaggtatgagttatcgtatttagttttttttagttatttttggttatttgtgatttttaacgtttttgtgagtgttttttttatttcggttagtgttttgtgtatttttatttggttttgtgattgtttttttttttttagttttagaagttttttttgtttttatagagaatgtttatttttgtataaagtattatattaggtatagagaatggtattttttgttgtaataaataatttaaatttttagtggttaaattaatttaggtttattttttttttgggtggggtttttttaataaagagtaatttagaggtttagatattttttgttgtataatattagttttttattgtgtggttgttgttgaggggataagtgtaggtcgtcgtgttggggttcgtatggtgtggtttataagtggtatgtattattatattagttttttatggttgttgtattaaattataataaatttagtggttttaaataatatagttttattatgttatagttttagaggtgagaagtttaagatgggttttattgggttaaaattaaagtatttatagggtaattggttttttttggaggatcggggagaattttatttttttgttttttttagtttttagaggttgtttattttttttggttcgtggcgtttttttttataagttaaggaaagtttttttaaaggtagtaatgattagttatatttttatattatatatttagagttttgattttttcgttttttttttttatatttagagatttttgagattatatgggtttatttgggtaatttagaataatttttttatttttagtttatgattttaagtatagaatagtagttttttttttttttttttagtttatagttagttgatgagtaattttaattttatttataatttttattttttttggtcgtgtagtttagtatatttataggttttagagtggggggacgtgatgatatgatgttgtttattaaagttatttttttttatattattgggtaggatttagtttgatgtttttaatttaattacggggaagttgggagtgagattggtaaatatttgattagttttagttttaattaatttttaatgatagtttttttaaagtatttttaggtagtcgattttatttttttttaaattttttgaattagtttttttgtatttaaggatatatatgtagttgttttatgtattttttagtttgaaaggggtttagttagatgttcggtaaggtgtttattttggtttagttagtatttattttgttttttgggttagaaattatgttaaggatggaatatatattgttgtggaagatggagtgtttggtttaggggggttttattatgtttttgaattttattttttaatagggttgtttcgtgtaatttaagagtttttttatttttatagtttatgattttgagtatagaatagtagtatgaagttaacgagagtgtaaatttaggaaagtatttggggttttagtttattttttagtataaattattatttttattttatttatgtatatttgaaagtttttgtaagggttttatttggtttgggggtaaggtttttattggggttttttataatttatgtttgttattgggttagattgttagtatttattttttgtatacgtttttatcgttttttatttttttattttttttattttttagggtttttatttttaggtgtatgggtttttatagatgtgagtttttatttgttagtgattttttttttttttggtggagttattttttttaattaagataggttatagttttttgttttgttcgtattgggaagttttatttatttaattttattagtttttttgtttatttgttattatattgttttatttgagattttttggtttaattataatttgtagtattggttgttttttgttttgttttgttttttttattggaatagtttttagaatttttcgttattttttttaggtagaagagtttttttttgaataatatttttatagttttttttaggtaagaataaaggtagtatatatttgtgagttatattttagtatttgtagtggatgtttttgggatatttgtgtgagttaatagttttttttagttttttgttggaaattgttttttggtttatggaatttttttagtattttttttttttttttttcgtagtagtattttttagtttgttatttggtattagtagatagtaagttattagtgattgtattttatagttaggtattttgatatttgaggacggatgtttggtttagggttttatatagttatttgtttttttggtgtttgtttattttttagatgtgatcgtaggtaaagttttttttatttttttttttatttgggtaggtagttgttttgtggagagttttttattttaaatttatttttttttatttaggtagtgtaataatttggttttgtttgtaggtcgtttttttgagttatttttagaagttatggtgttttgttttttggaaggaatttgattaaggaaaggtttatttacgattaagggtggaatttagtttgtcgtttgttagttgtgcgatttggggtcgttggtttttttttttttttgttttaggatttatttcgtggggttgttgtgtagtgaaagatgcgtggattttaagtggttagagcggtgtttgttatagagtggtgatgaggagtagaagttggatttgtgatttttttaaagtttttttaggtggtgatgtaatgacggaggttttggtggtggttagtattacgatgggtaggtgttttatagggtatggtttttattttttagtaattcgtagggtagcgttttttaaggaattgttgtgaagagagggtgaagagttggaaaagtattaacgatttgaggattttagaggttttttttgagtattaaatgttaatttaaaaatttatttaataagattagttaatagttgagtatattttgtgtgttaggttttgttggaggtattttatgtgttttaatttatgtaatttttagttggttttgggagaggggaatatttttattttttttttataggtggtagattttgaggtatagagagttttagtaatttgtttatatatagttatatatataagtatatacgtatgtatatatgtgtatatatttatgtataggtatatgtatatatatatatatataggtagaattgggatttgattttaaggttttggttttagtatttgtgtttttattttttgtatagtatttttgttaagaggaagtttattttttatatttgaagtttttatttgaataataattattacgataaaaatttaaggtttttttgttttttttaaaaatattgatttgtaaataattttgtaaagatttttgtaaaagtaattttttttttgtagttttataaatgaagagttttagagatagtgatataataattataataaatatgtgttgttatattttttggtagtattgtaagttaaaatgaatttgttttagttttgagttattattgttattattgttattttttattgttatattaattattaaatataattgagagggattaatgaagttaattgtttttagaaattaaattaaatgtaagtgttaatgttgggtgattgagttttgatattgtgtgtttattttagtagaggagcggataggttgttttgtaggagttttagaagatttgattattttaaatgttattttaatatttattattagttttttttatagttagttgtatagttttttttatttttattttatgaatatatttgtgagttatagtttaaaagttttatgtgtgttaagttggaaagatttagagattatttttaaatgggtatttgtattgttggtttggtttgttttaataaaatattatagattgggtggtttaaattatagatatttattttttttagtttgggaggttgaagtttaagattaaggtgttggtagttttgtttttttttgagattttttttttgggtttgtagatggtatttttttgttgtttttttgtaggttatttttttgtgtgtgtacgattcggtgttttttttttttatagagatattatttttattatattagagttttattttaattttttattttaatttaattgttttttaagattttttttttaaatataattataatttaagggtatgttagttaggattttaatttatgaattttggggggatattatttagttcgtaatagtattttttattaatttttgatgagtatgggaaagaggtgggatagagtagggagggaaatgaatttttaaaaaatatttagtgggatagtttttttaagtttttttttgagttcgaaatatttataattttgagattttgtgttttaagagagtggaaaatgattttaaggtgtaggtagataattgtatttttagtttttatttttgattgggaggttaattacgtaggttgggaaatttttttaattttagattaaaaagttgtttgtaaatggtaggttttttttgttttgtttttggttttttgtttttttaaaagaatttgattttgaagtgaaaggaatttttggaaatttaaaacgaagaaggaattgaaatttagatttttagtatgagaggtgggtttataggaggtagggagtagttaaggttggatgtttagaggttatatttttggggaaaggtggaagagggaaatttgtttagtggttttaggagggttaggaagtcggattgtgttaggttgggttttatatggggatagaggtttttttgagaatttgtaaataaaggtttgtttttatatgagtttagttcgtatttgtattgtttggtaatttgttttttgagaaatttgttttgaaaaggatttttagatatttatatttttggtttgataaaaatacgtgtagtatttttttagagggttgttgtttgtattataggttttatgagatttttattggtaaagtttagtgaagatagattttttttttaagttttttaggataagagtaagaatttataggtaaaaatagatagtaggattagattttagaggattttagaaaattaaataattggatatataattaaaatgattaaatatataaaggaattgaacgtataagaaaagaataagattttattaaatatttggtgaatttgagataaaagttgtaggaatgaaaaatagagtgattaaaaattaattgatgggatatagagtagatttttgagaggattattgaataggattttgtttttttttgttttaagtagaatgtttttttcgttgagaagaggtgcgggtagtagggagattttagttttaaatttaagttagaggaaatagtcgttattttttttgtttttttttgtttttttttaatagttagttgttggggtagtgttggttttgggagtaaacgttattatttttttttagtcgggttggttaagttttttagggaaattgaagattagtatatttgaagtatgtaagttttaggttgttttttttattttttttttcgtttattagtagtataaagaaagttggtttgggttttcgtgattcggtagggtttatttagtttaaaatgttagaggatatggtgtggtaagttgattgtatcgtgatgttagtcgttttgtggtagagatttagagatttgaagggtaaagtttagtaaggtttatatttagagtttggggggttaatgattataaggaaaatgattttgttttttagttagtattttattttttcgaacgtttttttttttttaatagtttgaggaggtttattttttttttgtagatgaagtagggaatttttgagaatttgagatattagtttgagattatatagttgagggcgtggaggaacgtgtcgattttaaatatatgttggtggttattatgcgaggttggttttttggatttagggttagttagtatttttaaattttgtttatggaatattgtagttttgatggaggataattggtattatagttaaaaaaaaaaaaaaaaaaaaagttgtgtggttagataggttggggagagttggtaagttgtatgttttttgtaagttttttttatgtaggtagtatattaagggttaagaaggttttttttggggaaatttatttaattttgtttaatttggtattttttatttttaatagatgttagattattcgattttttataatatagtattaatatattagttataaaggaattgtatattaaattataataagagattattttatatttattaggatggttataattaaaaagatatataatagtaagtgtcgggaatatgtggagaattggaatttatatattggtgggaatgtgaaatagtgtggaggttttggaagatagtttggtggtttttagaaggataaatttagaggtattatgtggtttggtagttttatttttcggtatatatttaaggaaatgaaaatatatgtttatataaaaatttacgtgtaagttttttatagttgtattgtttataatagttaaaaaagtagaaataacgtaaatgtttaattgatgagtggagagatataatgtgatatatttatgtaatagaatatttgataagaagaggaatgagatatttatacgtgttgtaatatggatgaattttgaaaatacgttaagtgtaaggagttagttattaaaggttatatagtttataattttatttatattatatgttcgaaataagtaagtttaggtgattggtttttaggagttgggaggggtggaatggagggtaattgtttatggttgtggggtttttgtttggggtgatgaaaattttttaaaattgattatggtaatggttgtataattttgaatgtatttaaaattatcgaattatatagtttaaatgaatgaattgtattttatatgaattatatatttataaagttgttttttaaaattaagttaatatttgttagcggtagggttttatagtatagtttgggtaaagttgtagtagaagttttgttgttatttgtttgggttttgtgaaggtatagtagttgttttatgttatttattattatattattttattaaaaatattttcgatatttgagaaagtaaattttataggggagggttgaggtgagtttttgtgttgagattgtggagaattgaaagtagtagttattttttttgtgtagtttgtgttttcgttatattgttgttttgataaaatatttgaaaggtgattagatagaaaaataagagttttggaaagtttttgagtggatttgtagtaagagattatgttgagtgttgtattattttgaatttatttcgataattttgattttttttagttaattatttttattgttagattttttagattgatttgtggttattgagtaattagaatttttttagttggtttttttgatttataggtagttttatttttatattaattttatattttttgtttttattttagt

SEQ ID NO: 548 - DNA, 17959 bp, Artificial Sequence
  chemically treated genomic DNA (Homo sapiens)
attgaaatgaaaatagagagtgtgggattaatgtggaaatggggttgtttgtggattagggggattagttggaaaggttttggttgtttagtggttataagttagtttggagaatttggtaatgaaaatgattaattagggaaggttagggttgtcggggtaaatttaaaatgatatagtatttaatataattttttattatagatttatttagaaattttttaaggtttttgtttttttatttggttattttttaagtattttgttagagtagtagtgtaacgagggtataaattatataaagagagtggttgttgtttttagttttttatagttttaatataagagtttattttaatttttttttgtgaaatttatttttttaaatatcgaagatgtttttgatggggtgatatggtgatgggtgatatgggatagttattgtgtttttatagagtttaggtaagtggtaataaaatttttattgtagttttgtttaaattgtgttgtgaaattttatcgttggtagatgttaatttagttttaaaaaatagttttatagatatgtaatttatgtagaatataatttatttatttaaattgtataattcgatggttttgagtgtatttagaattgtataattattgttataattaattttaggagatttttattattttaaatagaaattttatagttatgaatagttattttttattttattttttttagtttttggaagttagttatttggatttgtttatttcggatatgtgatataagtggaattataaattatgtggtttttggtgattggttttttgtatttagcgtgtttttaaggtttatttatgttatagtacgtgtaagtattttatttttttttttgttaaatattttattgtatggatgtattatattgtatttttttatttattaattagatatttgcgttgtttttatttttttggttattatgaataatgtagttgtgaagaatttatacgtaagtttttgtatggatatatgtttttatttttttgagtatatatcgagaaatggaattgttaggttatatggtgtttttgaatttatttttttgaaaattattaagttgttttttaaagtttttatattattttatatttttattagtgtgtgggttttaattttttatatgttttcgatatttattattgtgtgtttttttaattatagttattttagtgggtgtgaagtggttttttattgtggtttgatgtgtaatttttttatggttaatatgttaatattgtgttgtaaggggtcgggtaatttagtatttattaagagtgggaaatgttaggttgaataaaattaaataggtttttttaagagagatttttttggtttttagtgtgttatttgtatgaggaagatttataggaggtatatagtttgttagttttttttagtttatttgattatataattttttttttttttttttttttggttataatattagttattttttattagggttatagtgttttatgaatagaatttggaaatgttggttggttttaaatttaaaaagttagtttcgtatggtagttattagtatgtgtttggggtcggtacgtttttttacgtttttagttatgtggttttagattagtgttttagatttttaaagattttttgttttatttgtagaaaggagataaatttttttagattattaagaagagagaggcgttcgggagagtggggtgttggttagaaagtagggttattttttttgtagttattggttttttaggttttggatgtgggttttattgagttttattttttaagtttttgagtttttgttataagacggttaatattacgatatagttaatttgttatattatgttttttggtattttaaattgagtggattttgtcgagttacgaaaatttaggttaattttttttatgttgttgatgaacgggaaggagaatgggagaggtagtttggggtttatatgttttaggtgtattggtttttaatttttttgggagatttggttagttcgattggagggagatggtgacgtttgtttttaggattagtattgttttagtagttggttgttagaaaagggtaaaagagagtaaggaaaatgacgattattttttttggtttgggtttagaattaaaatttttttgttgttcgtatttttttttaacggagaggatattttatttggggtagaaggaaatagaattttgtttagtaatttttttaaaaatttgttttatattttattaattgatttttaattattttattttttatttttatagtttttgttttaaatttattaggtatttgatggggttttattttttttttgtgcgtttaatttttttatatatttaattattttagttgtatatttaattatttgattttttgaagttttttggagtttaattttgttgtttgtttttgtttgtggatttttgtttttgttttgggagatttggaggaggaatttgtttttattgggttttattagtaaggattttatggggtttgtgatgtagatagtaattttttggggagatgttatacgtgtttttgttaggttaggagtataggtgtttgaaaattttttttaaggtagattttttagaagataaattgttaaatagtataaatacgaattgaatttatgtaaaagtaagtttttgtttataaatttttaaggagatttttgtttttatgtggagtttagtttgatatagttcggttttttggtttttttagggttattgggtaggttttttttttttatttttttttaggggtgtggtttttgagtatttaattttggttattttttgttttttgtgggtttattttttatgttaaaggtttgaattttagtttttttttcgttttgggtttttaggaattttttttattttaaggttaaatttttttaaaaaagtaaaaagttaaagataaaatagaaaagatttattatttgtaggtagttttttaatttaagattaaaaagattttttagtttacgtagttggttttttaattagaaatggagattgaaaatataattatttatttatattttagggttattttttatttttttgaaatataggattttagagttatgaatgtttcgggtttaaggaagagtttagaagaattgttttattaaatattttttaaaaatttatttttttttttgttttattttattttttttttatgtttattagaaattgatgaaagatgttattacgggttgaatagtgtttttttaaaatttataggttgaagttttaattgatatatttttaaattgtaattgtatttggagagagggttttaaaagataattaagttaaaatgaggaattgaggtagggttttaatataatagaaatggtgtttttataagagaaagagatatcgggtcgtgtatatataaagaaatggtttgtaaggaaatagtaagaaagtgttatttgtaagtttaggagagaggttttaggagaaagtagagttgttaatattttgattttggattttagttttttaagttgggagaaataaatgtttatggtttaagttatttagtttgtggtattttgttaaggtaggttaaattaataatatagatgtttatttaaaaatgatttttgaatttttttaatttggtatatataaaatttttaaattgtaatttatagatgtgtttataaagtaaaaataaaaagagttgtgtaattaattataaagaaaattaatgatgaatgttaaggtgatatttgaaatgattaagttttttgaagtttttgtagggtagtttgttcgtttttttgttgaaataagtatatagtgttaaggtttagttatttagtattagtatttgtatttaatttagtttttaaaaataattaattttattaattttttttagttatgtttggtgattaatgtagtaataaaaagtggtaataataataataataatttaaagttgagatagatttattttaatttataatattgttaaaaaatatgatagtatatatttattgtgattgttgtattattgtttttagaattttttatttgtaaaattataaaagaagaattatttttgtagaaatttttgtagaattatttgtaaattagtatttttaggagaaatagaaaaattttagatttttgtcgtggtggttgttatttaaatgagagttttaaatgtaaaaaataagtttttttttagtagaagtgttgtgtagaggataagaatatagatgttggagttagaattttgggattaaattttagttttgtttgtgtgtgtgtgtgtgtgtatgtgtttgtgtataagtgtgtgtatatgtgtgtatacgtatgtgtttgtgtgtgtggttgtgtgtgggtaagttgttgaagttttttgtgttttagggtttgttatttatgaagaaagagtgaaaatgttttttttttttagggttagttgaggattatatgagttaggatatatgaaatgtttttaataggatttggtatataggatgtgtttaattgttagttagttttattaaatgggtttttaagttagtatttagtatttaagagaggtttttggagtttttaaatcgttggtgtttttttagttttttattttttttttatagtagttttttaaagagcgttgttttacgggttgttggggaatgaaggttatgttttgtaaagtatttgtttatcgtggtgttgattattattaggattttcgttattatattattatttgaggaagttttgggagaattatagatttaatttttgttttttattattattttgtggtaggtatcgttttaattatttggagtttacgtattttttattgtatagtagttttacggagtagattttgaggtagggagaaggggaagttagcggttttaaatcgtatagttggtaagcggtaaattgggttttatttttaatcgtaggtaagtttttttttgattagattttttttaggaagtagagtattatggtttttgagagtaatttaaaggaacggtttatagatagggttaggttattatattatttagataagggaaggtgagtttgaaatgaaaagttttttatagagtagttgtttgtttaagtgggaaggggagtggaggaagttttatttacggttatatttgggaggtaagtaaatattaaggaggtaaatgattatgtgggattttgggttaagtattcgtttttaggtgttaggatgtttggttgtaagatgtagttattggtggtttgttatttgttagtgttaaatagtaaattagaaaatgttattgcgggaagaagaaaggggaaatattggaagagttttatgaattagggagtaatttttagtagggagttaggaagggttgttaatttatataaatgttttaaaagtatttattgtaggtattggagtatgatttataagtatatgttatttttgtttttgtttgagaagagttatggaaatgttatttaaagggaagtttttttatttaaaagaagtgacgaaaggttttgaggattgttttagtggaaggaataaaataaaatagaaaataattagtgttgtaggttatgattaaattaaaggattttaggtagagtaatgtagtggtaggtaagtaaaggggttggtgagattaggtgggtagaattttttaatgcgaatagggtaagggattatggtttattttagttaagaaaaatgattttattaggagagaggagaattattggtaagtggagatttatatttatggaagtttatgtatttgaaggtgggaattttaaaaagtggagaggataaaggggtgagaggcggtaagaacgtatgtagagagtgggtattgatagtttggtttaataatagatataagttatagaagattttaatgagaattttgtttttagattaagtggagtttttataggagtttttaggtgtgtatagataaggtagaagtaatggtttgtgttaaaaaatgagttggagttttagatatttttttgaatttgtattttcgttggttttatattgttattttgtgtttagaattatagattgtgaaggtgagaaggtttttaaattatacggagtaattttgttaaagaatgaagtttagagatatagtgggatttttttgggttaaatattttattttttatagtagtgtgtgttttatttttgatatagtttttgatttaaaggataaaatgagtattgattgggttaggatgggtattttgtcggatatttgattgggttttttttaagttgggaggtatatggagtagttatatgtatatttttgagtgtagggaggttgatttaaaaagtttaggggaaagtaggatcggttgtttggaagtgttttggaaaagttgttattgggaattggttgaggttaggattagttaggtgtttgttagttttatttttagttttttcgtagttggattgggggtattaaattgggttttgtttaatagtatggggaaaagtgattttggtgggtagtattatgttattacgtttttttattttggaatttgtgagtgtgttgggttatacggttaggggaaatgagggttgtagatggaattaaggttgtttattagttgattgtaagttgaggaagaagaagggaaattgttattttgtgtttagaattatagattgaaggtgaggagattattttggattatttaggtgggtttatgtaattttaagggtttttgaatgtgaaagagggaggcggaagagttagggttttgagtgtgtgatgtgaggatgtgattggttattgttgtttttgaagaagttttttttggtttgtggaggaaggcgttacgagttaaggaaagtgggtagtttttagaagttggaaaaggtaagaaaatgggatttttttcgattttttagaaggaattagttgttttgtggatattttgattttagtttagtgagatttattttggattttttatttttagaattgtaatataataaaattgtgttgtttagaattattaagtttattgtgatttggtatagtagttataggaaattgatgtgatgatgtatattatttgtgggttatattatacggattttagtacggcgatttatatttgtttttttagtagtagttatataatgaaaagttagtgttatatagtaaggggtgtttgggtttttgaattgttttttgttaagaagattttatttaggagagaaataaatttggattagtttggttattgagaatttaggttgtttgttataataggaagtattattttttatatttaatatagtattttatataaaagtgaatattttttatagaaataaaaaaaatttttgaagttgggaagggaaaagtagttataaaattaagtaagaatgtatagggtattggtcgaaatgaaaaggatatttataaagacgttagaagttatagataattaaaaatggttagggaaggttgggtgcggtggtttatgtttggagttttaatattttgggaggttaaggtgggtaggtcgtttgagtttaggagtttgagatttgattggataatatagtaaaattttgtgtttatataaaatatataaattagttggttgtggtggtgtatatttgtagttttagttatttagtatattgaggcgagaagattttttgagtttaggaggttaaggttgtagtgagttaagattacgttattgtatttaagtttgagagagattttgtttagataagaataataaaaaaaggttagggaagaggtgaaatgttatgggttattttgatagaaggtttttgaaaaaagatagtaattaaagggttttgttttttttggtatgttgggaataagggtagattttttatttggattatttaatttttggttttgattggttgatattgggattatgtttagtaaatttgtgattatagggttaatagaagataaattagttttttgtttttagtaatggataatttgaaagtttttttgtagggagataatttagggagaattatattagatttttgaaaggtatttttaatttatgtttgacgtattaattagtgtaagagagaattaagttattttgaagttattaaaaaaagtaatatggtttgaaataaatataatcgtgtttatatttttatttaatttattttgagaggggatgtagagtttgttttttaaagaaaattatatgtaagattagtaatatttaaagttattatgtagtagatttatgagaattttattgatatatggttttggttttattgggaaatggaggggaatagggttagtaaaatgtatttaataaagagattttatatattttattgttatagatttataaagattggtagaaatgagtaatagcgaggtttataattaggtttttttttttgttgtggaatgttatgattgttgttagatgaaatagaaagaatttcgttaattttaattttgttaatttgtatttgtaataatttattaaataagtatttattttatttttttgtaaatattttgtagttaagagtagtggtaaggttttaaattattaaggttggattatttttatagaggattgtagacgatagtatatttgttaggatatgatgtagtgttatttattatttgtaaataataatatttgtatttgtatagtatttttttttaatattttttagaagtttttataaattgttttattcgttttttattttgggaggaggtatttggttagtgatggagtcgtttgtcgggttgttgaagttttaaaaggtaatagttttttcggtcgtttttattaggttattagtttaggggagttggtaatagatattttaaataattgggttaggttttttttttttagacgaaatattcgttttttttgtttaggttggagtttagtggtgtgattttggtttattataatttttgttttttaggtttaagcgatttttttgttttagtttatagagtagttgagattataggtatttattagtatattcgattaattttgtatttttggtagagacggggttttattatgttggttaggttagttttgaatttttgagtttaggtgttttttttatttgggttttttaaagtgttgggattataggcgtgagttacgatattcggttttgggttaggtttttaaacggtattgttttcggtattttaatgttaagatgattggtgattttatgagttaaacgtgttaagcgtttagaagtgtgttagtatattgtgatatttaataaattttattagtgtttttattagtttgttgtttgaatcggttaagaggattatttgtatttttgcgtatagtatagagagtttagagttgaggaaggtgtgggttcggtttgttatgggggtagtgaggggtgagaagaggttttggggaaattttggagtgtttattgagtattttgtgttatttcgggaataaagagattaagaagatttagttttggaagtaagaagataggtagagaggcgaaggttagtgtacgaaggaaaataaggggattgcggggaatgtataggagatatgggttagatagtaataaagagaagatataaaagaatattaagatagttattgtaagagaattttattatttttgattgagtattgaggtataagtttgttatttaatttaagtatttaatgaaagtatttttaatatttttaaggtagtgattttgatttatgaattgtgtttttggttatttttgatgattattttttagtgtagtgggtcgttttttttttttttttttaaaaattatttattttttagagttgtttattttttggtaatgttagattaaataagaatattagagttttttgttagaaaaggtttatatatggttttttgtaatatttaggaaagcgtatttgaggggtgttgttggtatttgaggggtgttgttggtatttgaggggtgttgttggtatttgaggggtgttgttggtatttgagggatgttgttggtatttgaggggtgttgttattgggttttttttttaattatggttttggagatagatgatagatggtgatagttattcgtaagagtttatttcgtaagtttaaaggggttgttttgaagttattagaggagtttatttgggggatgaatagtgttggtattttgatgttgaagcgggacgtgagatttattgtagtaaatatagttttattttgtgatttgtttcgaggtttaaatttcgaattttataaaggagaaaaattgagttttagtgaagcgtgaagtgatgtttttaaatttagaatttaagtttattgttatattagtataaataagttgttttttttttttttaggggtaaataaattatttattttgtaatttataaagtttagttgtttattttgtaatttaaagaaaattagagtttagtaaggaattttttttagggagtgagtatgtatagtttatatttttgattttaaaaatttttatatgggtattttggaaggttgaggtgggtggattatttgaagttaggagtttaagattagtttggttaatatggtaaaattcggtttttattaaaaatataaaaattagttaggtgtggtggtaggtatttgtaaatttagttattcgggaggttgaggtaggagaattttttgaatttagaaggcggaggttgtagtgagttaagatcgtgttattgtatttttaggtgatagagtgagattttgttttaaaaaataaaataaaaaatttttttatgggtgtgtttttgtatgtaatttaattattgtattttggttttgtattattttaatagatacgttttaatgtaatttatgttttggggagtggagggttagagtaggtggttgttgtagtttttggaggtagttttgttcggggtggaaattaaggcgtttttttttatagtggatagggattcgttgtggtggaatggaagttagttatttttaaaagaaattttattaaaaaaaaaattttttttgaagtatttttttttttaaaattaatgtaatataaatttttttaaaattattttttattatagtggaatgattttttaaaattttatgttttttaagttttttggtattagttagatattttttttttttagtgttagttagttttgttgtagagagttttcgttattattgaaaaatattgtttattttggattgtaatatatttaaagaacggtttttatttattgtgttggtgtagagaattttcgttttatagcggaggatagtagagaaggataatgggaattttttttttttttttttttttttttgagatggagtttcgttcgttttgtcgttaaggttggagtgttttggtttaattttggtttattataatttttgtttttcgggtttaagttatttttttgtttcggttttttgaatagttgggattataggcgttcgttattatgtttagttaatttttttatttttagtagagatggggttttattatgttatttaggttagttttgaatttttgattttaagtgatttattttttttggttttttaaattgttggggttataggtatgagttatcgcgtttggttaggaatttttattgttaagaaaatggcgtaaatgtgttattaaaagaagttatgttttttaaagatttttgtttttataagattgagtttatgatattaaggcgtgttattaagatttaaaagaattttacgtatttatatattgaagtgatttggtttttgagatttaaggtttttgatttttttattagtgtttttttatatgggtcgattgttattggaaaggagagtagaaacggaaatagattcgtttggatagaatttaaagtgtaaataggaattgtgtttagagagaggaggaggtggtagaagtatgaaggttgtttagatttttatgttttaagaaagatcgtttttttttggttttaatttttttggtttagaagtttaggatttgtttaaaattagaaaaagtaattttgggggaaaaaaaaaatttggatgtggaagaaattggcggtgaaagttatattgagtgattaatgataaaaattattttcgttttttggtttttgagtcggtatgaaacgttggtagtttttaattaattattattatgatattaatattattgattttttattgtttttgttattttttttttagatatttgtattttttaagtaaatattattcgttaaaattttgttataagttgtgtaattgggttcgtttaaggtatcggagtttgcgcgtaatcgtataggtacgcggtcgttcgcggtttttaggaagaaacgtttcgtcgtcgtcggtaagcggggtcgaagtttcggcgggtttttttcgggtttgggcgttcgattttttcgcggttcgcgtttttcgggcgggtattaaggttcggaattcgttttagcgttcgtcggggtttttttcgcggagttttcgttcggcgttttcgggttcgagttcgttttcggtattcgcgcgtggagagagaggaaaagagttagtatcggcgggcgggtgtttagttttagtttttagttttttttcgggaggcgaagatatgacgcggcggggttttcgcggggtcgaggcggcggcgcggttttcgggtcgggcgggcgtgcgcgagtgagtttaggtgtgagcgtcggggagcgagcgggcgggagaacgacgcgcgcgcgtggggcgtcggggtcgcgcgagtcgggtgagtgttattgtcgttaagggggcgcggtcgtcgcgcgtcgacgtggcgtagtcgagtttatcgacggtatgcgtattgacgttatcgcggttcgttcgttttgttgggtcgcgaagttaagtatacggtgcgtgcgtagtcggtcgcgttacgtcggatgttgtggtcgggggcgggggcgggggcgggggcgggggcggaggaagggaggggagagaaggggtgaagaagtgagagggagaaggaaggagagggaggcggggttttcgattggttgcggggattggagttgcggaaagttaagtagggtttagttgaggatggtttttgtagcgaacgcgtttagtcgggtttttggttacgcggcgacggttgggtgattgcgttttatagtgcgggttagggtcggggcgtttcggtagggaggcgatcgttttttgaggtttttagtttttgtcgcggtagcgtttaatgaagcgcggaaaggagagtttagatggtagcgacgggggtcgagagagtaggaatttgttaaaagacgatgcgaggggagagtttgtttttcgagtgagggttagcgttggggagtagagacggtggtttttgtttttgtttttttcgttatgaattaaaaataaaattttaagttttgtagttaacggatggattttttttttcgtttgtggttttttaagttattttgaaaaattagtttaggttttgatgggaagcggaagttaaatatggttttataaatattcgtacggagattttaagattaatagaggattttgataagaaatatttgtagtgtattttcggttttatttgtatgataatattttggtttttataatttttttatgtaattcggatatttttttttattgagtttaggtttttagatgataatttttaattagttgttaattagaaaatttttaaatgtatttatgattcggacgtttttattttatattttattttttaaagagttaatttatattttacgtattgattgatgttttatgttttttttaaatgtataaaattaagatgttttttggttattttgggtatatgttattagaattttttgaggttgtgttaatgtacgtttttaattttggtaaaataaattttttaaattgagattatttttagaaatttttggtttttattattatttttttgttgtcgtggttgatttttggttttcgtgttttggatcgtgtttttttcgtttgttttagtgttttgtaattgttgttaattttcgtaatgttttgttggattcgtatttagataggtttaatttttttagcgaaggaaatattatttttcgtttggttgtatttttttttttgataataaaattgtttagggaggttgagttttttattttttgttattttttttagtttagtttgtttggtttttattaagttttgttgtattgtttttaattatgggaggtttttttgtggaagttatttataatttatgtgttgttagatttaatggttattttttatttttattttatttgagtttttagtagtatttgatgtagttggtcgtttttttttttttttgtttcggaggtgttatattattgttttattttttagttttttggttattttggttgtttattttgttagtttggtagttcgtttttttttagatttataaatatttgagtatcgtaaggtttagtattggtttttttttttatttagattttttatagatagttatatgtagtttgtggacgattattatgtagatgtttataggtgttaaatttgtaattttatttttttatttttgttttttttttgaattttagatttattattattattatttgtagacgtttatgggtgttatatttgtaatttaatttttttttttttgtttttttattgaattttaaatttattatcgttattttggtttttttatttgttgtttaatttagtgttgcgtaattttgtgtattagggtatatatggagatgtatatagtatatattggttttgtattttttattttatatatatattttaatatcggtaataggataattgttggttaggttgtagttatgatatgtttgttattgttttgtatttatatttaaatttttaagtgggtgttagtagtttagaagagaattttgaaattaatattgggttattttttaaagagatagtatattatttacgtttttaaaggtttaaggatatttaattgattaattttatgagtaattttttttttatgtatgtgtaaaagtgttatatagttaaaaatttatgtcgtatgttttaagtttaaagaattattttttggaagtataaaatgaaaattttaagttgaaagagtatattgtggtattatttaattggtagtgtttttatttttagtggtatttaaaataaagttgtatgttacgagttatagtattttagatttaataataaatgttattggtaaggaattttggggggtgggggagaaagtttttataggaaggagtagagttttagaggggttttggtggtttttggattgttttgaggtttgataggttgtgtttttttgtttgtgatttgttttttaggtttgtattgattgggaaattttggttgttttatagtaggtagttagtcggtttgagtagggtaggagaggattttttttttataatttatattattagaaatgttgtgtgattattaggtgatggttaggaagttgttatattgtttttttaaaataataattggttgtagttagtgttagggaaaggtagttttttagtagatagaaaaaatttgaaagtggtggttagtagttttttggtaagatttttttgttatatatcgagaggtaaaatggtaacgtttgattggtatatgattttttaggaatatgaggttggtaagggaagattgttttaagtgagtatgtgtatatttttaataaatatattgtttttgtttattttttaagcgttggtaagttattgtgtatgtggatagtttattttaagggaagaattaggggataagattgatttttgaagaattaagggatgtaagattttagaagtatgttaatgtataaaattttaagttaaaggttaaatcgtgtatttgatttttaaagttatttgtttggttattttttaagtgtattttttttttgttttagatttaaagttttttaataaatttttattttttttttaaagttgttttagtttttttttttgttttatattttttagttgaatttttttttttgaagaggtaagaattgaggttgttgtagatttgtatagatttattgttattaacgtattatatttgggtgttacgtgatttaggtatattttgtttttgatagtgtgatagttaagttaattttatatttttaaagaatttttgattttttatttatcggtaaatagttttttttttagaatataatttaagttatttattatagtgtggaataatttgtttatttaatagtatttttaatgaaggaaatattgttaagaaggtagtgaatttcgtaaaaaaaagatatttattttttagttttttttgtagttaggggtagttaagtgatatagttttgattatggaaatttgttggggtgttttggggaaaatttatatttttaatatggggatattttttttttttggtgatattatttgtattattttgaatttagatagaaggttaaaggtagaataattatatcgtaattgtgaggtaattaaaggtatgaaaattataagttaaaggtgatagagtaggaaggttaaaggtatgtgggaatttgagggtttatggaggcgttttagagttgtggatttttcgtttagatttttttgttgtgtgggaaataaatttttattaaataaagtttttgtggttggtgtttttatgggtagttaaatgtaatttttagtatatatggtttattagattttgtatgatgggggttttgtttagttgtgagttttttttttttggtttttttggttatattggtttttttgaggtttttttagtaggataagttaatttttttttttgggattttgtgttagttatttttattgagatagttaagtataaaggggttcgtagagaaattttgattatttgtatatcggaagatggggtggagttatagaagtttacgttttttataggggagaggagtttgattttttttcgggtggaatttgggatttaatttgtgacgcgggaaatcggttagtaggatttttgttttgttgaaagtttttgtttttttttttttttttttgtttaataaattttattttttttattttttaaagtgtttgtgagtttaatttttcgtggttatgtgataaggacgttttttttagttaggttaataagaaagttttataatattattgtcgagaattgttttttttagattttcgcgtagttaatttttttttattttggaattagttttttaaggggtttgttttgttttattgtttttatagtattttatttttatttgaaattttttatttatttgtttgttggtttattgtttttttttattgattagaatgttagttttatgaggggagaaatttaatttattttgtttattaggtatttttagtatttaaaattatggtgggtatagaagaagtatttaatagttattttttttttataattttagaatatagatatatttaattttttataattgttatttaaatgaagagtagttaatgatgattaaatagagaatgaaaaatgtatatagtatatagatggtatatggttagtgattttttttgatatttgttttattttgtaaatattttgtgtgtgtatatgtgtgtgtatacgtgtgtgtatgtatgtatgggagtgtttagtttttttagttttagatgttgaggataaatgttaggtattatttattgg

SEQ ID NO: 549 - DNA, 6090 bp, Artificial Sequence
  chemically treated genomic DNA (Homo sapiens)
tagagatggaatgtttaaattaggataatttagggaggtgtgggagaggtgtagggggattataagggatggagtaggaatttaaggtagtaatagtagagttggtattaattttaggtttaaaaagataaaggagagagagtggttattaaaatttagaaagagaaaattcggtaaaagacgggatttggtgaggagtagtaatttgtgtttggttgtggattgtggtaattttgtagggaggagagtagaggaatgattattttggttttatttttttttttttttttttattttatgttaggtgttttattggttaaatttattagtaattagaggataaggaatgtattaaaataattttacggtttagagagtagattagatgtagagtgataaatggattatatttagtataatcgtaggtttatttgttgattcgttttttttattagattgagttatttgaggatagagaatgttttttttatatttgtatttttaatatttggtggatattagatatttaagaaatgtttatggacgggattagagaagatggtaaattgggtattagatggaggtttgtgttttttgagtttgtcgtatgttttttggcgaatttaaggtaaaatgagaaatagaatgagttttgtatttttgtttggtaaaagaaaatatgatttggtgagaagaaatgaatatttttagtatttagtgttgggaggaattggaattagttatgtgattgtttttattagaggtttttaattgcgtaacggatagaatttttaatggtgaaattataatgtagaaatatttttttttttttttttttttttttttttgagacggagttttgttttgttatttaggttggagtgtagtggtattatttcggtttattgtaagtttcgtttttcgggtttattttatttttttgttttagttttttaagtagttgggattataggtatttgttattatatttggttaattttttgtatttttagtagaaatggggttttatcgtgttagttaggatgtttttgattttttgatttcgtgatttgttcgtttcggttttttaaagtgggaaatatttttaaaaatattagtttttgataaaattaaagttatgttataaaaaagtaattaaaaggtggaaatgagataatatggtttattttgagttgagaatattttgttagaaaatgattgttttagattttaaatttgattttttatataaatttttagtgtaattttttttgtattatttttttttttattagttaaaagatggaaaggataaattgaggaatttacgttggaggagtatggatttattagatggtagaaatttgggtttttgaatgattattgtggagttgatttttgtttatgttttgtaaatttttgtgttgagagtaagtaatatatttttaatgtgttaaatttttgggatttgttgggttttatagtaatggttattttattttaatacgattgtaaaataatgttttaaaatttatagtcgggtttgtttaaaatattatcgttattattattataatttatagtttatattataattatttttatagaagttttttttaattggtattttataatttgtggttttttatattgttgttttttatgtgtgagatgtttttttgagttttttttgttagggatatgatagaaaataaaatatttaatattttggtgtattttataatgtataaagttttgttttatgtattatttttttagatttttttaataaatttaaggaatatgtaagggtttataattatttttattttataggtgatgaaattgagacgtttatatgtaaagtggaaataattatttatttatttatttatttattaaataaaaatttcgttaatttatttaaagattaattgagagaattattttatttgtttggaatttggtatgtgttaagagaaaagtttttttaatttttttttttaagaagataatttattgttatataataaattattttgaaataatgatttaaaatattaaaagttattgattttgtttatagaatttgaattggaagatataaataattgggagtgagggtggggttggatagttggtttttttgggtatttttcgttttttttgtggttttgttatatgtttttatatggtagttttagggtaattatgatagttgaaggttttagagtgggtggagggggagagggagggagggaaagagagagagagagagagagagagaaagagaagtaagtaggtagaagttttaatgttttatgatttaattttggaaataaattatattgtgttattgttattatttttttttagaagtaagtagatagggttggtgaatatttattgagaggggaattagattttattttttgattgggggagtgttaaagaatttgtgaatatgtttttaaatgattatattttttttttttaaaatgtttgtttaaattggtgtatataaaaagttcgggggttagtgatttatttaaggttattaagttgttaaatggttttattaatattagatttaattttgtgattttaaattttatgtttttttttattattttagataattttcggtgaatattattgtttattagggtagttaagatattttagttgttaaatagatttagtttttttaattgtttcggataatatattttttattttgtagaaaataaatattatttatatggtagttatttataaatattttttaagtttattttaaatatttgtgttttaaatttttttttttaatagatgtatttatttgtatttttttagatgaattattttttttttgttgttgttgttatttttgattgtattttttattttttaagatttttttgtattattaagtttattgtttaagttaatattattttttaatttggggatttttttttgatttttgtgtgttttttttgtgggttattaatgtaatgttatttaagattaggatttggttgggcgtagtggtttacgtttgtaattttagtattgtgggaggtcgagtcgggaggattatttgaggttaggagtttaagattagtttgattaatatggtgaaattacgtttttattaaaaatataaaattagtcgggtatagttatatgtttgtaattttagttattgggtagtttgaggtaggagaatcgtttgaattcgggaggcggaggcggagtttgtagtgagttaagattttataattgtattttagtttgggttataagagcgaaaattcgttttaaaaaaaaaaaaaagattaggatttgatataaggtttgaggggtatttttttgttttgttttgttttgtttttaagaggttaaaatttttatagttgaaaatttttgttgaattatagagatttgaattaatttagtttagaaagtttggggatttgaataacggtatggatcggaaatttttttatttgttagtttttattattttaggtagtaaaatagatttttttttaggagttttttatcgtttggggttttttagtagtgggatgtggggaattaattttttttcgtttttatttaaatattaggtgggagtaaggggtgggaagtagagaaagtggatagaggtttttagtggatatgggatttttgtgtagattagtatagtttttagaaattttatgtaagtaatataggtattgttatattttttagtggttattttttaaaaagtaaataggtgaggtcgggcgcggtcgttacgtttgtaattttagtattttgggaggtttaggcgggcggattacgaggttaagagatggagattattttggtcgatacggtgaaatttcgtttttattaaaaatataaaaattagttgggtatggtgacgcgcgattgtagttttagttattggggaggtcgaggtaggagaattatttgaattttggaggtggaggttgttacgttttattatattttagtttggcgatagagtgagatttcgttttaaaaaaaagaaagtaaataggtgaaattaattttaataatatattttgtttaatttaacgtatttaaaatattattatttgaaagtgtaatgaatataaaaatatttatgagatattttttatttttatatttatattgttttggattttaatgtgtattttatatttatagtataattaatttgggattagttatattttagtttaataatagttaatagtatatgggatagcgtaaataaattttgcgtttttgttgtttttttgggtttcggagattttaattttttttttagattgtaaatttttttgtttttaagtttcggttttaatattagttcggtagaggaatttagtttaatgaggtacgttttttttttgttattttttattttattaatttgtttcgtggtaaacgtaggattgattttttaaaattattttattaattagtttatatatttattatttatttgttttattagaatgtaggttttcggaaggtagggatttaaaaaaatttgttttgttttatgtgatttttttatattaagtatcgtgttcggtataagttgggattttagtatatatttcgggacggaagaatcgtgtttttttagaatttagttagagggtagtttagtaatgtgttataggtggggcgttcgcgtttcgggcggacgtattggtttttcggtcggcgtgggtgtggggcgagtgggtgtgtgcggggtgtgcgcggtagagcgcgttagcgagttcggagcgcggagttgggaggagtagcgagcgtcgcgtagaattcgtagcgtcggtttggtagggtagttcggaggtgggtgggtcgcgtcgttagttcgtttgtagggtttttattggtcgtttgtcggtcgtttttcgtttaaaaggcggtaaggagtcgagaggttgtttcggagtgtgaggaggatagtcggatcgagttaacgtcggggattttgtttttttcgcggaggggattcggtaattcgtagcggtagggtttggggtcggcgtttgggagggatttgcgttttttatttattttttagttgtgttttcgtcgcgtttcggttagttttcggcgttggcgtttatggtcggttttcgatagcgtttcggagggatcgggggagtttttaggcgttcgggtgagtagttaggcgcggtttttcggttttttcgattttcggcgttagtttttgtttttttagttagggcgcggtggggtttgttcgggtagtgtttcgagtaattgggaaggttaaggcggagggaaatttggtttcggggagaagtgcgatcgtagtcgggaggtttttttagtttcgcgggtcgggtgagaataggtggcgtcggttcgattaggcgttttgtgtcggggcgcgaggatttggagcgaattgttgcgtttcggtgggtcgttttttttttttttttgttttttcgggcggtcgtacgtcgggtcggtcgggtaacggagagggagtcgttaggaatgtggttttggggattgtttcgttcggggaaggggagagggtggttacggtgttaggagaggcgcgggagtcgagaggtggcgcgggggtgttatcgttgtcgtaggttggagagagattgtttttagtgaggcgcgtatcgtttgggcgagggttttattttttcgcggcgtttttggaggtgggaaagttgggtgggtatgtgtgtagagaaaggggaggcggggaggttagttattttcggagtcggttttgattttaatagatcgtttagcgtttggggacgtcgatttcggggtgtcgtggtgttcggttttacgcgcgcgcggggttgaggggtcgggggcgtttttggtcgtttagttttaataaagggtgtttttttttatttcgcgaggaggggtagtttcggagattcggtttttagcgagcggggttttagcgtcggggaggtttatttttttttggggttgttattttattattattattgttttttttttttttttaaaagg

SEQ ID NO: 550 - DNA, 6090 bp, Artificial Sequence
  chemically treated genomic DNA (Homo sapiens)
ttttttgaagaaaaaaaaaaggtaataataatagtaaaatggtaattttaaaaggaagtagattttttcggcgttaagatttcgttcgttgaagatcgggttttcggagttgttttttttcgcggggtggagaggagtattttttgttaaagttgggcggttagggacgttttcgattttttagtttcgcgcgcgcgtggggtcgggtattacggtatttcgaggtcggcgtttttaaacgttgggcggtttgttgggattagaatcggtttcggaagtgattggttttttcgttttttttttttttgtatatatgtttatttagtttttttatttttagggacgtcgcggaagaatgaagttttcgtttagacggtacgcgttttattgggagtaatttttttttagtttgcggtaacggtggtattttcgcgttatttttcggttttcgcgttttttttaatatcgtggttatttttttttttttttcgagcgaggtagtttttagagttatatttttggcgatttttttttcgttattcggtcgattcggcgtgcggtcgttcgggggagtaagggagggaagggagcggtttatcgaggcgtagtagttcgttttagattttcgcgtttcgatataaagcgtttggtcgggtcggcgttatttgtttttattcggttcgcggggttggggaagtttttcggttgcgatcgtattttttttcgaagttaagttttttttcgttttggtttttttagttgttcgaggtattgttcggataaattttatcgcgttttggttgggaaagtaaaagttggcgtcgggggtcggggggatcggggagtcgcgtttggttatttattcgggcgtttgggagttttttcggttttttcggagcgttgtcggaggtcgattataggcgttagcgtcggagattagtcggggcgcggcgggaatatagttagggagtgagtggggggcgtagattttttttaggcgtcggttttagattttgtcgttgcgagttgtcgagtttttttcgcggagggaataaagttttcggcgttggttcggttcggttgttttttttatatttcgaagtagtttttcggttttttgtcgttttttgggcggagggcggtcggtaggcggttaatggggattttgtaagcgggttggcggcgcggtttatttattttcgagttgttttgttaggtcggcgttgcgggttttgcgcggcgttcgttgttttttttagtttcgcgtttcgggttcgttggcgcgttttatcgcgtatatttcgtatatatttattcgttttatatttacgtcggtcggggagttagtgcgttcgttcggaacgcgggcgttttatttgtgatatattgttaagttgttttttgattgggttttagggaaatacggttttttcgtttcgagatgtgtattgggattttagtttgtgtcgggtacggtgtttggtatgggaaaattatatagaataaaatagatttttttaaatttttgtttttcggaaatttgtattttggtgggatagatagataataaatatgtaagttaattaataaggtaattttggaggattagttttacgtttattacgaaataggttaatggaatagagaatggtaggaagggagcgtattttattagattgggtttttttgtcggattggtgttggagtcgaggtttgaaggtaagaaggtttgtaatttgaagaaagggttgaggttttcgagatttaaagaagtaatagagacgtagagtttatttgcgttattttatatgttattggttattgttgagttgaaatgtagttagttttaaattaattgtgttgtaagtgtaaaatatatattagagtttaagatagtatggatatgagaatgaaaaatattttatgaatatttttatatttattatatttttaaatgatagtattttggatacgttgggttaaataaaatatattattaaaattaattttatttgtttatttttttttttttgagacggagttttattttgtcgttaggttggagtgtagtggagcgtggtaatttttatttttagggtttaagtgatttttttgtttcggtttttttagtagttaggattatagtcgcgcgttattatgtttagttaatttttgtatttttagtagagacggggttttatcgtgtcgattaggatggtttttattttttgatttcgtgattcgttcgtttgggttttttaaagtgttgggattataggcgtgacgatcgcgttcggttttatttgtttattttttaaaaggtggttattagaaaatataatagtatttatgttgtttgtatgagatttttgaggattgtgttggtttatataaagattttatatttattggagatttttatttattttttttattttttattttttgtttttatttaatgtttgggtggagacgaagaagggttgattttttatattttattgttggagaattttaaacggtgaaaagtttttaaagggaaatttattttattgtttagaatgatgaaaattgatagatgaagagattttcgatttatatcgttgtttaaatttttaggttttttaaattgagttggtttaaatttttgtggtttaatagaaatttttaattgtgaagattttggttttttgaaaataaggtaaaataaaataaaagaatattttttaggttttatgttaaattttagttttttttttttttttgagacgggttttcgtttttgtggtttagattggagtgtagttgtgaaattttggtttattgtaaatttcgttttcgtttttcgggtttaagcgatttttttgttttaggttatttagtagttgggattataggtatgtgattatgttcggttaattttgtatttttagtagagacgtggttttattatgttggttaggttggttttgaatttttgattttaggtgattttttcggttcggttttttatagtgttgggattataggcgtgagttattgcgtttagttaaattttagttttaaataatattgtattaatgatttataggaagggtatataggaattaaggggaagtttttaaattgggagatggtattagtttaagtagtgggtttgataatataaaagggttttgagaggtgagaaatatagttaaaaataataataataataaaaaaagagtgatttatttgggaaaatgtaaatgaatatatttgttgggagaaaaaatttaaaatatagatgtttgggataaatttggaaggtgtttatggatgattgttatatgggtaatatttattttttgtaaaataaaaaatatattgttcgaggtaattaaaaggattgaatttatttggtagttagaatgttttaattattttaatggataatgatgtttatcggagattatttggagtagtgaaaaagagtatgaaatttggagttataaaattagatttagtattggtggaattatttaatagtttaataattttggatgagttattaattttcgagttttttgtgtatattaatttagataagtattttagaaaggggaaatgtggttatttaaaaatatatttataaattttttgatatttttttaattaagaggtggagtttaattttttttttaataaatatttattaattttatttgtttgtttttaagaaaaggtagtggtagtggtatagtgtaatttatttttaaggttaggttataaggtattagagtttttgtttgtttgtttttttttttttttttttttttttttttttttttttttttttttttttttttttttatttattttaaagtttttagttgttatgattattttagggttgttatgtagagatatgtgataaaattatagaaagaacgagagatgtttagagaagttagttgtttagttttatttttatttttagttgtttatattttttagtttaagttttgtgagtaaaattaatgatttttaatgttttaagttattattttagagtggtttgttatgtagtaatagattatttttttaaaaagaaaaattaagaaaattttttttttaatatatattaggttttagatagatgaaataatttttttaattaatttttaaataaattagcggggtttttatttaataaataaataaataaataagtggttatttttattttatatgtaaacgttttagttttattatttgtgaaatgaagatgattatagatttttatatattttttgggtttgttgggagaatttaaagagataatgtatgaaataggattttgtatattataaaatatattagaatgttggatattttattttttattatgtttttagtaaaaaggatttagagaggtattttatatatagaaggtaataatataagaagttataaattatgagatgttagttgagaaggatttttataaaaataattatgatatggattatggattataataatgatggcgataatattttaaataaattcgattgtagattttagaatattattttatagtcgtattagggtaaaataattattgttataagatttaataaattttagaggtttaatatattaaaaatgtgttatttgtttttagtataaaggtttgtagggtataagtagagattagttttatagtagttatttagaaatttaggtttttgttatttaatgaatttatgtttttttagcgtaagttttttagtttattttttttattttttggttgatgagagaagagataatatagggaggattgtattgaaggtttatgtaggaggttagatttgaagtttgagataattattttttggtaagatgtttttagtttaaagtggattatattattttatttttattttttggttgtttttttgtaatatggttttggttttattaagggttaatatttttaagaatgttttttattttgggaggtcgaggcgggtagattacgaggttaggagattaagagtattttagttaatacggtgaaattttatttttattaaaaatataaaaaattagttaggtgtggtggtaggtgtttgtagttttagttatttgggaggttgaggtaggagaatggggtgaattcgggaggcggagtttgtagtgagtcgagatggtgttattgtattttagtttgggtgatagagtaagatttcgttttaaaaaaaaaaaaaaaaaaaaaaaaaagaatgtttttgtattgtggttttattattaaagattttgttcgttacgtagttgagagtttttgatagaggtagttatatgattgattttagttttttttagtattgagtgttaaaagtatttatttttttttattaaattatatttttttttattagataaaagtatagagtttattttgttttttattttgttttggattcgttagaaagtatgcggtaagtttagaaagtataaatttttatttaatgtttaatttattattttttttgatttcgtttataagtattttttgagtatttagtgtttattaaatgttagggatatagatataagagaaatattttttgtttttaggtaatttagtttgatgagggagacggattaataaatagatttgcgattgtgttaaatataatttatttgttattttatatttaatttattttttgagtcgtaagattattttaatgtattttttgttttttggttgttggtaggtttagttaatggggtatttgatatgagatgaaggagaaggaaggagagtgaagttaagatagttatttttttgtttttttttttgtaagattgttatagtttatagttaaatataggttgttgttttttattaggtttcgttttttatcgggttttttttttttgggttttggtaattatttttttttttttgtttttttgagtttagggttggtgttagttttgttattattattttgggtttttgttttattttttatggtttttttgtattttttttatatttttttgaattgttttaatttgagtattttatttttg

SEQ ID NO: 551 - DNA, 9838 bp, Artificial Sequence
  chemically treated genomic DNA (Homo sapiens)
atttttgtgttatttagagaagtagttgttagttgcgcgggtttgttgagtatttgaagtaggattagtgcggtaaggaattacgagatgttattttgaacgtatttggatggttttgtggagcgaggggttttggattgaatttcgtaggttttagtaatttttcgaattgttgacgagtttataagttttatttgttattaggattttttgtggttattttagttttgattagtttattagaaatttattttttttttttttttttttgagatggagttttatcgtttgttaggttggagtggaatggtattatttttgtttattgtaatttttatttttcgggtttaagtaattttgtttcgggtttttgggtagttgggattatatgcgtgtgttattacgtttagttaatttttatatttttagtagagatgaggttttattatgttggtttggatgattttgattattcgattttgtgatttattcgttttggttttttaaagcgttgggattgtattattgtgttcggttttgtaaatatttttttagaggtagagttttgttgttttttagatgagtatagtggtgtagttagtttattgtattttttattttttggatttttttgttttagtttgttaggtagttgggattttaggtatgtgttattatgtttagttaatttttatttattttgagatagaattttgtttggtttggttggtttcgaatttttgattttaagtgatttgttcgtttcggttttttaaagtgttgggaattataggcgtgagttattgtgttgatttaatttttattttttttgtagtaatggggttttattatgttgtttaggttggtttttttttcgggtttaagcgatttttttgttttagttttttaaagtgttgggattttaggtgtgagcgttaatagtttagaaaattatttgtttttttaaatagtgtttaagatgtgaggaggtttaattttgttagtgttgataaggttaatatgattatttttcgttttttattttgtttttaggaaggtaggtggggattgtgaagtagggttgtggggttttcggtaaaggcgggggtagttttggttttgtattgttaaggttaagttttagttgaggttttgtttatatgtaggtatgtttgaggtttggtttggttgtcgtatttgaattggggttgtaattgacgttgtttttagtagttagggtaacggattattgtgtttcgagaattttattttatcgtttaggatggagtgtagtgttgtgattttggtttattatagtttttgttttcggatttaagtgtttaagtaatttttgtgttttagtttttcgagtagttggaattataggcgtttattattaggtttgtgtaatttttgtatatttaggtgagatggggttttattatgttggttaggttggttttaagttcgatcgtaagagattagttcgttttagttttttaaagtgttggggttataggtgtgagttattatatcgggttttatttttttttagtagtgtaaacgttaagatggtatgtggaagttgaatttttttttttttttgagatagtttttgttttgttatttaggttggagtgtagtggtttaattttggtttattgtaagtttcgtttttcgggtttacgttatttttttgttttagtttttcgagtagtcgggattataggtattcgttattatgttcggttaattttttgtatttattagtagagatagggttttatcgtgttagttaggatggttttgatgttttgatttcgtgatttgtttatcgtggttttttaaaatgttggaattataggcgttagttattatgttttgttatttttttttttttgagatggagttttttttcgttatttaggttgtagtatagtggtatgatttcggttcgttgtaatttttattttttgggtttaagtaatttttttgcgttagtttttcgagtagttgggattataggtatgtgttattaggtttggttaatttttgtatttttagtagagatagggttttattatgttgagtaggttggttttgaatttttattttaagtgatttgttcgttttggttgtttaagttgttgggattacgggcgtgagttattatatttggttaatttattgtacgttgaaaatgtaaataaaaaatataaaggtcggtttgtggtttacgtttgtaatcgtagtattttgagaggtcgaggtcggcggattatagatattgagattattttggttaatatggtgaaattttgcgtttattaaaaatataaaaattagttgggagtggtggcgtgtatttgtagttttagttattcgggaggttgaggtaggagaatcgtttgaatttaggaggtagagattgtagtgagtttagattttattattgcgttttagtttggacgatagaaggagattgttttaaaaaaaaaaaaaaaaaaaaaaaaaggttgggtaaggtggtttatgtttgtaatttttgtattttgggaggtcgaggcgggcggattaggaggttaggagatcgagattattttggttaatacggtgaaattttgtttttattaataaatataaaaaattagttgggcgtggtgacgggcgtttgtagttttagttattcgggaggttgaggtaggagaatggcgtgaatttgggaggtggagtttgtagtgagtcgagattgtgttagtgtattttagtttgggtgatagagcgagatttcgttttaaaataataataaaaaatgaatttaggtcgggcgtaatggtttacgtttgtaattttagtattttggaaagttgaggtgtcggattatttgagtttaggagttcgagattagtttgggtaatatggtgaaatttcgtttttattaaaaatataaaaattagtcgggcgtggtgatgggtatttgtaattttagttatttgggaggttgaggtacgagaatcgtttgaattcgggaggtggaggttgtagtgagttggatatcgtcgttgtatttttgtttgggtgatagagtgagattttgttttaaaaaataaaattaaaaaaaaaataaatttgatattttttagtgttgttagttggtatatattatgttttaataaaatgtttgttgttattttttattttgagacgaagagggattttgtgtatgataattttagattgattttatttgtattttaagtatttagaatgtgggtaatagtttttagtggaggaaattgttatatagggattaaagtagttttagggtttattttaggagttgttaggcgcgttcggttataggtgagttatttattcgtttaatcggtgttttaggaaggtaggaagcgggatgtagggttttagttttatttttcgtagttttagtatttgggttagaggagaggcgggcggggcgatgaagggatcggaagtcggtttttttttcgttcgtttgattagcgtcgattgtagttaatgaaattagggatggcgagtgtttagttagtggtgaggttgtattcgggtgtgggtgtcgaaaaggtagttgggggcgggacgtcgaggtgcggtacgagcggcgggcgtatcggttaataggcggcggggttcgtttttcgggggtgggtattggcgggtgcggtgacgtcggcgtaggcgcgtcgcggcggtaggggcgcggggtttttggaggcggcggcggtggttagcgcggcggcgtcggtcgtatttttcgggttgcggagggtaaagagcgggttcgggtcgaggttggagggttgggtggggttagagcggcgtttcgggggttcgcggaggacgagggagggagagaatttgaggagttggtaggtttggggatttatttgggtgatcgggtcggggaaagggttcggtcgggcgtgcgaggggcgtagcggttttagggatgttggagcggagttttagggatgggtaaggttttgggggcggggggaggttttgtaaagggagttattggggtttgtttaggggtttgtgcggagattgcgggcgagaaggggtagaggacggtggaggagatttagatggggttttttttggcggttcgttttggggggtaggggagacggcggttgggggattttgatatatggagcgtggaggaagaggttaattttgcgaggatagtggaggttagcgggggagggaggtaaagtgggtttttaggagcgtggaaggcgtcgttcggtttttggaaaatttagaattggagggagttagagatggttgggggtgggcgggggtgttttatcgatgagggttttaagagatttgtcgagggtaaggattaggaggggttaaggtagtaatttgggaattttgatcggaatggtagtattttgggaggtttgggacgatcgtttgagttttggagttttaggttgtagtgagttatgattgtattattgtattttagttagggcgatagagcgagatttttttttaaaaaataataatattaataataaaagaagtagatttgagaatttcgttaagatattggttagggagtaaggtagttttgggatttgaggttgaggagaacgtgtaggaatggtgggggattttggttgagtaggttgagagaagtttaggagtgagaggtaaaaaaagacgtaggtagcgtcggggaaattagaattatgtgtttggagagagttttgcggggtgaaggtggtttagtggggttgttattaaatttttgagtggttatggggttttaagaggtgatatgataggatttagtttagtaaatatagtatttttttttgtcgagtttggagttttagagtggagaggtgggaggtttgtgtttgttggataggtttgtttattaatttaggagaaaagggtggtgttttagttttttatttttgtttttttttgttttttttagggttgttattaggggatttttgaggttttatttttaggttgcggtgattgtattttttttggagtggaagttgttggaaggcggatcggtcgttatgtttacgtttaggtaggaggacgtggaggattattatgagatgggggaggagttgggtaggtgagttgtttgttcgtacggttgggttttagggataggagagaggcgttgtggggttttttgaatagtagttttttttttttgttttttattttgtatgttgagaaggaatgagttagtattatgcggtgggggaacgaatttgggtcgtggagttagatagtttcggttgtgaatttttgtttgggaattttttgtgtgttttttgtggggagaaaagtaattgagtcgttatagtagttaagatcgtgtttggtatggggtattagagtaatagatgttagttgtttttgttattaaaagatgtgttttttgtttgggtaatatagtaagattttatttttataaaaaataaaaatgaaaaaaaattaattaggtgtggtagtttatgtttgtagttttagttattagggaagttgagacgggaggatggtttgagtttaggagttggaggaggttgtagtgagttatgatcgtgttattgtattgtagtttgggtaatagagtgaaattttatttatttaaaaaaaaaaaaatttttttgtgttaatttttttttgtgggaggtattttagtttttttgtttagtttttggatgtttaaagtggggggagggaggggcgtgttttttagttgggtttaaatttcggttaattgtttaatatgtttgtgggaaaaagtagaggtttttttttttagggaggtagttgattttttgtttgtttgggttttggagggtttttttggggttttattttttttagattagttaggtattattaggttttgtttttttttgtagagtttttagttttatttggtgagtttgttattggttagtttttttggagtttttttatgatgttattagaagggaatgtaaataagtgagttttgtgttaggttagggagagtgttgtaggtttttttgggattttgaggttttttttttaggaattttttcgttagtggtagagaaagtatgtttttttttttttttttttatgttttagtgttgattttttttgttaggggtcgtttggtaaaagttagtaaaatttagttaaattttttttaattcgtcgattttatttttaggaattaatttattggaaaattgtatatatatggatggaatgatttaagattggggtagttgttagaacgtttattagaataatagttttttttttttttttttgatattattttattttgtcgtttaggttggagtgtagtgatgcgatttcgatttattgtagtttcggtttttagtttagtttttcgagtagttgggattataggagttcgttattatttttggttaatttttgtatttttagtagagataggattttattatgttggttaggttggtttcgaattattgattttaggtgatttatttgtttcggttttttaaagtgttgggattataggcgtgagttatcgtatttcgttgggaatagtagttttttaaatggttttttttaaattattgtattagggttggaataggatgtagtttgtaaaaagaattaggtagggttaggtgcggcggttttcgtttgtaattttagcgttttgggaggttaaggcgggaggatcgtttgagtttaggattttaagattagtttgggtaatataagttgatttttattttttaaataaatagaaatttataattttaaaaaaagtatttagttttttgtttttgtcgtgaagttttggaggtttggtgtgtattttatgtcgtagtttttttcgggattggttatattttacgggtttgatagttttgggtggttagtgtttgttgttttgacggtattgttttaggtagtggtttggaatatttttagagatatatgaagtgtaagatgaaggtttagaatgtagtaatttttgtttgtttgtttgagacggtgtttggttttgttgtcgagattggagtgtagtggtgttattttggtttattgtaattttcgtttttcgggtttaagtgatttttttgttttagttttttaagtagttggaattataggcgtttattaacgtgtttagttaatttttgtatttttagtagagacggggttttgttatgttggttaggttggttttgaatttttgattttaaatgatttgttcgtttttgttttttaaagtgttgggattataggtgtgagttattgtgtttggttttagtttatattttttttttgagacggagttttgtagtgtcgttcgggttggagtgtaatgtcgtaattttagtttattgtaattttcgttttttaggtttaagcgattttttttgttttagtttttcgagtagttgggattatagatgtttgttagtacgttcggttaatgtttttgtatttttagtagagacgtggtttttattatgttggttaggttagttttgaatttttgatatcgtgatttgtacgtttttgttttttaaagtgttgggattataggcgtgagttattgtgttcggttttttagttcgtatttttaaatattatgaattttattagtagaaattgtcggtgtgtaggttacgtttgggtcgtgtttgggttgtggtaggtatttaggaagtgggttgggagtgatatttgagattattattgaggagggtttgttgtgtttttatttgcgttgggggttggggaagttatagagaagcgaagagggtgggtttagtttttggggagtttttttttcggttggggagatgaggtacgttttatatttcgtagaggaattgagagtttgttagtggttttgtttttaaggagtaagtttgtggttagtgagatcgggggttgtttggaggtgggcggttgtggtttgttgttgttgtaggaggatttagtggtagaatttgaaatttggttggtaatagtaaaatagggaaaggcgtggtttatagaattaggttgtttaggtgtgtagcggtcgtaggtgtgattgggtgttggtgtatatggtgttttgtgttttcggggtcgaagtttattttagtatggaggaggcgttttggtagagtgaatgacggggtttatgtgttattcgtagtgtttggtggttttttttttttggtttggtttgtttttaggtaggttttttaggtagttttttacgtggtggtttttgtcgcgagtttggatttaagtttagtagagggagagagagattttttttttttagtaggcgtttagagttttgtggattggatcggtttttttgggttggaaggcgtggttttttgtttgtttaggtttagtcgtgtttttttttattttttttttgggttattgagttttatagattgagagtgagcggtaaaggttgttttgggatagttgggtttgttagtaggagatagcgtggagtcgggaggtaggtacgtaggaattcggtatttagtagtagttgtttgttttttgttagagtatttgggttttggagtttgtagtatttggtttgaaggtttgaattttttcgttattgattgattgtatgattttgggttagttgtttttttttttttagttttggtttttttaaaatgcggatattggttagatgtagcggttttatttgtattgttaatatttggggtgggggagtgggaggattttttgaggttaggagttttaaagtagtttgggtaatacggtaagattttgtttttataaaaaataaataaattaggtgtggtagtgtgtttttgtagttttatttatttgggagggattatttgagtttaggagttcgagattagcgtgggtaatatagtgagattttatttttataaaaagaaaaaaaaattaattgggtgtggtggtatgtgtttgtagttttagttgtttgagaggttgaggtaggaggattgttcgagtttaggaggttaaggttgtagtgagttatgattgaattattgtattttagtttgagtaatagggttagattttgttttaagataaaataaaataaaaataaaaaaagcggatttggtatttgttttgtattttttatttttttgaggtaggattttgttacgttgtttaggttggagtatagtggtataattttagtttattgtaatttttgttttttaggtttaagcgatttttttgttttagttttttaagtagttgggattataggtattcgttattatatttagttaattttttgtatttttggtagagatagggttttattatgttggttaggttgtttttgaattttttagtttaagttatttgtttttttcgaatttttaaagtgttgggattataggcgtgagttatcgcgtttggtttttttagtttttttttgatatgtattgaattgtttatttttttattttttaaaaatacgtcggtgttatggtgttaacgtgtggttttgtatttttttttatatatttgttgggtatagttttgggaggggtgggaacgtcgcgtttgatggtgtggggcgttaaggaattgttttttgagaaggcgtagagtttgtattttcgtagtggttagtttatgttttttaagtgtttggtgtagggtcgcgtttaagaggagtaagtggaggtgacggggagttagttatttttatttatttttttcgttttttttatttttatttatttttttttttttttttagt

SEQ ID NO: 552 - DNA, 9838 bp, Artificial Sequence
  chemically treated genomic DNA (Homo sapiens)
gttggaggagggggagggagtgagtgggggtggaggaggcggagggagtaagtgggggtggttggtttttcgttatttttatttgttttttttgggcgcggttttgtattaggtatttgaaggatatgagttggttattgcgggggtgtagattttgcgtttttttagagagtaattttttagcgttttatattattagacgcggcgtttttattttttttagggttatgtttagtaggtgtgtggaggggagtgtagagttatacgttaatattatggtatcggcgtatttttgaaaagtgaaagaatgaatagtttaatgtatattaagagggaattgagggggttaggcgcggtggtttacgtttgtaattttagtattttgggagttcgaggagggtagataatttgagttgaggagtttaagagtagtttggttaatatggtgaaattttgtttttattaaaaatataaaaaattagttgggtgtggtggcgggtgtttgtaattttagttatttgggaggttgaggtaggagaatcgtttgaatttgggaggtagaggttgtagtgaattgagattgtgttattgtattttagtttgggtaacgtagtaagattttgttttaaaaaaataaaaagtgtaaggtaagtgttagattcgttttttttgtttttgttttgttttgttttgagatagggtttggttttgttgtttaggttggaatgtagtggtttagttatggtttattgtagttttgattttttgggttcgggtaatttttttgttttagttttttaagtagttgggattataggtatatattattatatttaattaatttttttttttttttgtaaggatgaggttttattatgttgtttacgttggtttcgaatttttgggtttaagtgattttttttaagtaggtgggattataggaatatattattatatttgatttatttattttttgtagagatagggttttgtcgtattgtttaggttgttttggaatttttggttttaagagatttttttatttttttattttaagtgttggtagtataggtggagtcgttatatttggttagtattcgtattttaaagaaattaaggttgagaaaaggaaagtaattagtttaaggttatgtagttagttagtggcgggaggatttaaatttttaaattaggtgttgtaggttttagagtttaggtgttttaataggaagtagatagttgttgttgggtatcgggtttttgcgtgtttatttttcggttttacgttgttttttgttaatagatttagttgttttagggtagtttttgtcgtttatttttagtttgtgggatttagtggtttaggaaaggggtggaaggggatacgattggatttgggtaagtagaaaattacgttttttagtttaaagagatcggtttagtttatagggttttgaacgtttgttgggaagagaggatttttttttttttttgttgggtttggatttaggttcgcggtaggggttattacgtagaaggttatttaagaagtttgtttaagaatagattaggttaggagaggggagttattaggtattgcgggtggtatataagtttcgttatttattttgttagggcgttttttttatgttggagtggatttcggtttcggggatatagggtattatatgtattagtatttagttatatttgcggtcgttgtatatttggataatttggttttgtaaattacgtttttttttgttttgttattgttaattagattttaggttttgttattgagtttttttatagtaatagtagattatagtcgtttatttttagatagttttcggttttattggttatagatttgttttttagaggtaaggttattggtaggtttttagtttttttacggaatgtgaaacgtgttttatttttttagtcgggaaagaaattttttaagagttgagtttatttttttcgtttttttgtaatttttttagtttttagcgtaggtgggggtatagtaagttttttttagtgatggttttaggtgttatttttaatttattttttaagtgtttgttataatttagatacgatttaagcgtggtttatatatcgataatttttattgatagagtttatgatgtttaaaaatgcgggttgggaagtcgggtatagtggtttacgtttgtaattttagtattttgggaggtaaaagcgtgtagattacgatgttaggagtttaagattagtttgattaatatagtgaaagttacgtttttattaaaaatataaaaatattagtcgggcgtgttggtaggtatttataattttagttattcgggaggttgaggtaaggagaatcgtttgaatttgggagacggaggttgtagtgagttgagattgcggtattgtattttagttcgggcgatattgtaagatttcgttttaaaaaaaaagtgtgggttggggttaggtatagtggtttatatttgtaattttagtattttgggaggtagaggcgggtagattatttgaggttaggagtttaagattagtttggttaatatggtaaaatttcgtttttattaaaaatataaaaattagttgagtacgttggtgggcgtttgtaattttagttatttggaaggttgaagtaggagaattatttgaattcgggaggcgaagattgtagtgagttaagatggtattattgtattttagtttcggtaatagagttagatatcgttttaaataaataaataaaaattgttatattttgggtttttattttgtattttatgtatttttgagaatgttttagattattatttgaagtagtgtcgttagaatagtagatattggttatttagagttgttaaattcgtgaggtgtggttagtttcgagaaaaattgcgatatgaaatatatattagatttttaaggttttacggtaaaaatagaaggttaaatattttttttaaaattatgaatttttgtttgtttgagagatgggggttaatttatgttgtttaggttagttttgaagttttgggtttaagcgattttttcgttttggttttttaaagcgttagaattataggcggaagtcgtcgtatttggttttgtttggttttttttataagttgtattttattttagttttgatgtagtggtttggggaaggttatttaagaggttgttgtttttagcggggtgcggtggtttacgtttgtgattttagtattttgggaggtcgaggtaggtgaattatttgaggttagtagttcgagattagtttggttaatatggtgaaattttgtttttattaaaaatataaaaattagttaggggtggtggcgggtttttgtaattttagttattcgggaggttaggttggaggtcgaggttgtaatgagtcgagatcgtattattgtattttagtttgggcgatagaatgagatagtgttaaggaaaaaaaaaaaaggttgttattttggtaaacgttttagtaattattttagttttaagttattttatttatgtatgtatagttttttaatgaattaatttttagaggtgaaatcggcgagttaaaagaaatttggttgaattttgttgatttttgttaaacgatttttagtaggaggggttaatattgaagtatgagaagggggaggagggagtatgttttttttgttattaacgaggaaatttttgaaggagggattttaggattttaaaagagtttgtagtattttttttagtttgatatagagtttatttatttatatttttttttggtgatattatggggaggttttagggaggttggttagtagtaaatttattaaataaggttggaggttttataaaaggaggtagggtttagtggtgtttggttagtttggagggggtggggttttagggggattttttaaggtttagataggtaggaaattagttgtttttttggaagaggaaatttttgtttttttttataagtatgttaaataattgatcgaggtttgggtttagttgggagatacgtttttttttttttttattttaaatatttaagagttgggtaaaaaaattaaagtgttttttataaaagaggattaatatagggagatttttttttttttaaataaatggggttttattttgttgtttaggttatagtgtagtggtacgattatagtttattgtagttttttttaatttttgggtttaagttattttttcgttttagtttttttagtagttgggattataggtatgagttattatatttggttaatttttttttatttttattttttgtagggatggagttttgttatgttgtttaggtagaagatatattttttaataataaaagtagttggtatttgttgttttggtgttttatgttaggtacggttttggttgttgtaacggtttaattatttttttttttataggaaatatatagaggatttttaagtaggaatttatagtcggggttgtttgattttacggtttaaattcgtttttttatcgtatgatattgatttatttttttttagtatataggataaagaataggaaaggagagttgttgtttagaaaattttatagcgttttttttttatttttggagtttagtcgtgcgggtagatagtttatttgtttagttttttttttattttataatggttttttacgtttttttgtttgaacgtggatatggcggtcggttcgttttttagtagtttttattttagggaaagtgtagttatcgtagtttggagataggattttaggagttttttaatggtaattttggagaagatagggaaagatagaagtgaggaattgagatattattttttttttttagattaatggatagatttgtttagtaaatataagttttttatttttttattttgaagttttaaattcgataaaaagaggtgttgtgtttattgggttgggttttgttatgttattttttagagttttataattatttaaaagtttggtaatagttttattgggttatttttatttcgtaaaattttttttagatatataattttgattttttcgacgttgtttgcgtttttttttgttttttatttttagattttttttaatttgtttagttaaaattttttattatttttgtacgttttttttaattttaaattttagggttattttattttttggttaatgttttaacgaagtttttaagtttattttttttgttgttggtgttgttgttttttgagaaggagtttcgttttgtcgttttggttggagtgtagtggtgtaattatggtttattgtagtttggaattttaaggtttaagcgatcgttttaggttttttaaagtgttgttatttcgattaaaatttttaagttattattttaattttttttggtttttgttttcggtaggttttttaagatttttatcgatggaatattttcgtttatttttaattatttttgattttttttaattttgaattttttaagaatcggacgacgttttttacgtttttgaaagtttattttgtttttttttttcgttgatttttattgttttcgtaagattaatttttttttttacgttttatgtattaaagttttttaatcgtcgttttttttattttttaaaacgggtcgttaaaaagggttttatttgagttttttttatcgttttttgttttttttcgttcgtaattttcgtataagtttttaggtagattttagtggttttttttgtagaattttttttcgtttttaaggttttgtttatttttaaggtttcgttttagtatttttggggtcgttacgtttttcgtacgttcggtcgagtttttttttcggttcggttatttagatgggtttttaaatttattagttttttagattttttttttttttcgtttttcgcgggttttcgaagcgtcgttttggttttatttagttttttagtttcggttcgagttcgttttttatttttcgtagttcggagaatacggtcggcgtcgtcgcgttggttatcgtcgtcgtttttagaagtttcgcgtttttgtcgtcgcgacgcgtttgcgtcgacgttatcgtattcgttagtgtttattttcgggaaacgaatttcgtcgtttattggtcggtgcgttcgtcgttcgtgtcgtatttcgacgtttcgtttttagttgttttttcggtatttatattcggatgtagttttattattggttgaatattcgttatttttgattttattggttgtagtcgacgttggttaagcggacggaaaaaaggtcgattttcggtttttttatcgtttcgttcgttttttttttgatttaggtgttgaagttgcgagaagtgaggttgaagttttgtatttcgttttttgtttttttggagtatcggttgggcgaatggatggtttatttgtggtcgagcgcgtttggtagtttttggagtggattttgggattgttttagtttttatgtggtagttttttttattgaaaattgttatttatattttaaatatttaaaatgtaaatgaggttaatttggggttgttatatatagggttttttttcgttttaaaatagagggtaatagtaagtattttattgagatatagtatgtgttaattgataatattgggaggtattaggtttgttttttttttaattttattttttgagatagggttttattttgttatttaggtaggagtgtagcggcggtatttagtttattgtaatttttatttttcgggtttaaacgattttcgtgttttagttttttaagtagttgggattataggtgtttattattacgttcggttaatttttgtatttttagtagagacggggttttattatgttgtttaggttggtttcgaatttttaagtttaggtgattcggtattttagttttttaaagtgttgagattataggcgtgagttattgcgttcggtttaaatttattttttattattattttgagacggagtttcgttttgttatttaggttggagtatattggtataatttcggtttattgtaagttttattttttaggtttacgttatttttttgttttagtttttcgaatagttgggattataggcgttcgttattacgtttagttaattttttgtatttattagtagagatagggttttatcgtgttagttaggatggtttcgattttttgattttttgattcgttcgtttcggttttttaaagtgtaggaattataggtatgagttattttgtttagtttttttttttttttttttttttttttgagatagtttttttttatcgtttaggttggaacgtagtggtgagatttgggtttattgtaatttttgttttttgggtttaagcgatttttttgttttagtttttcgagtagttgggattataggtgtacgttattatttttagttgatttttgtatttttagtagacgtagggttttattatgttggttaggatggttttaatatttgtgattcgtcggtttcggttttttaaagtgttgcgattatagacgtgagttataagtcggtttttatattttttatttatatttttaacgtataatgggttggttaggtgtggtggtttacgttcgtaattttaatagtttgggtagttaaggcgggtaggttatttgaagtaggagtttaagattagtttgtttaatatggtgaaattttgtttttattaaaaatataaaagttagttaggtttggtggtatatgtttgtaattttagttattcgggaggttagcgtaggagaattgtttgaatttaggaggtggaggttgtagcgagtcgagattatgttattatattatagtttgggtgacggagggagattttattttaaagaaaaaaaagtggtagggtatggtggttaacgtttgtaattttagtattttgggaggttacggtgggtagattacgaagttaggatattaagattattttggttaatacggtgaaattttgtttttattaataaatataaaaaattagtcgggtatggtggcgggtgtttgtagtttcggttattcgggaggttgaggtaggagaatggcgtgaattcgggaggcggagtttgtagtgagttaagattgagttattgtattttagtttgggtgatagagtaaagattgttttaaaaaaaaaaaaaaatttagtttttatatattattttaacgtttgtattattaaaaaagaataggattcggtatggtggtttatatttgtaattttagtattttgggaggttgaggcgggttgattttttacggtcgagtttgagattagtttggttaatatggtgaaattttattttatttaaatatataaaaattatatagatttggtgataggcgtttgtaattttagttattcgggaggttgaagtataagaattgtttgagtatttgaattcggaggtagaggttatagtgagttaagattataatattgtattttattttgggcgatagagtgagattttcgaaatatagtaattcgttattttgattgttggaaatagcgttagttatagttttaatttaaatgcgatagttaaattaaattttaggtatatttatatgtgggtaaaattttagttgaggtttggttttgataatgtagggttagagttgttttcgtttttgtcgagaattttatagttttattttatagtttttatttgtttttttgaggatagagtaaaaggcggaaaatgattatgttaattttattagtattgataagattaggtttttttatattttaggtattatttagaaaaataaatagttttttaagttattggcgtttatatttgaaattttagtattttgggaggttgaggtagaaggatcgtttgagttcgggaaggagattagtttgagtaatatagtgagattttattattataaaaaaagtaaaaattaggttagtatagtggtttacgtttataatttttagtattttgggaggtcgaggcgggtagattatttgaggttaggagttcgagattaattaggttaagtaaaattttgttttaaaataaataaaaattagttgggtatggtggtatatgtttggagttttagttatttggtaggttgaggtaggagagtttaggaggtggaggatgtagtgagttgattgtattattatatttatttgggagatagtaagattttgtttttaaaaaagtgtttataaggtcgggtatagtggtataattttaacgttttgggaggttaaggcgggtggattataaggtcgagtgattaagattatttaggttaatatggtgaaattttatttttattaaaaatataaaaattggttgggcgtggtagtatacgtatgtaattttagttatttaggagttcgaggtagaattgtttgaattcgggaggtggaggttgtagtgagtagagatggtgttattttattttagtttagtaaacggtgagattttattttaaaaaaaaaaaaaaaaaaaatgggtttttaataaattagttaggattggggtgattatagaaaattttgatggtagatagaatttgtgagttcgttagtaattcggaaagttgttgaaatttgcgaagtttaatttagagtttttcgttttatagggttatttaaatgcgtttaaagtgatatttcgtaattttttgtcgtattgattttattttaaatgtttagtagattcgcgtagttggtagttgtttttttgaatgatataggggt

SEQ ID NO: 553 - DNA, 5768 bp, Artificial Sequence
  chemically treated genomic DNA (Homo sapiens)
  unsure 1021, 1064, 1104, 2848, 2986, 2989, 2992, 3053, 3278, 3950: n is a or g or c or t
  unsure 4084, 4472, 4476, 4569, 4586, 4621, 4645, 4738, 4741, 4743: n is a or g or c or t
  unsure 4749, 4751, 4777, 4781, 4799, 4861, 4988, 5014, 5016, 5034: n is a or g or c or t
  unsure 5046, 5114, 5166, 5168, 5249, 5257..5258, 5270, 5590, 5617: n is a or g or c or t
  unsure 5641, 5725: n is a or g or c or t
ggagtttaaggttatagtaagtcgtgattgtattattgaatttatattttgggtaagggaataagattttgttttaaaatgaaaattttaaaaattattttcgtgtttaatataataggaaaaggaggatataattttaatttagatggtttggttttgagagtatgtgtaattaattattgttgaaaagggttgttgtttaagaattatttggttattggtttttagttttttgttttagtgttttgtaaaagaatttcgaatatgtatattttttttatatatttttaagttgatatttgaaatattataaaatattttaatgatatatttaaatagatgtaaaggatataattttaagtgttttgtaaatattgatattttataaaataattttattttttatttgtattgatttatttttatttaaatagtagcgatttgagagttattattatttattttaaaaatataagaaatttttttttaatatcgtttttttttttttttttataatttttatttattttttttatagttttattttatatgtaatttattggtatgttttaaagtttaatattgattattttattatatgtttgtaatataaatatgtatataggttgggtgtagtggtttatttatgtttgtaattttaatattttgggaggttgaggttggaagattgtttgagttaggaatttaagattagtttgggtagtatagtttaatttggtttttataaaataatttttttttaattagttaagtattgtgatgcgtatttgtagttttaggtattatagggtttgttgggaggtttgggtgggagagttatttgaatttaagagttaagattgtagtaagttatgtttatgtaattgtattttagttcgggtaatagagtagattcgttttttaaaaaaaaaaagtgttggcgcgtggtttattgtatttagtatttggagttgagtggtatatagtcgaatagattttgttacggtaattttgggttgtntttttattttttttttttttttttttgagagggagttttgttnttgttgtttaggtaggagtgaagtggaataatttgggttnaaaaaaatttttgttttttcggtttaaggtaatttttttttttattttttcgagtagttgggataaaaggaatgaattataacgtttggttaatttttgtatttttagtagagatggggtttttttatattggttagtttggtttcgaattttcgattttaggcgatttatttatttcggttttttaaagtgttgggattataggtgtgagttattgtgtttggtcgtttttttatttttttgatggtgttattgaagtataaaagttttaaattttgatgaagattaatttatttgtttttttttttattatttatgtttttggtgttatatttaagaaattattgattaatttaaggttataaagatttattgtttatgtttttttttaaaagttttatgattttagtttttatattaaggtttattttaagttttttgttttgttttttgttttttgttttgagatagggttttattttgttatttaggttggagtgtagaggtataattatggtttattgtagttttaattttttggttttaagtaatttttttattttagttttttaagtagttggtattatagatatgcgtaattatgtttagttaatttttttgtagagatagggttttattatattgtttagattggttttaaatttttaagttttagtgattcgtttattttagttttttaaagttttgggattataggtatgagttattgtatttagttttaaattttgtatatggtattagaaaggggtttaattttatttttttatatgtggaaatttaattgttttagtattatttgttaaaaatatttttttttttatttaattgttttagtgtttttgttaaaaataattgaatataattgtatgggtttatttttggatttttaattttattttattgttgagtatatttttaagggttgttttttttttttgtggtaattggtgatttgtattttttggaagagagatgaaaagatttttaagttaattgagttattttacgtgggttaggtttttgtggttttttgtattggtttatttataatgatatttttttgtaggatttgagtttttttttttgttgtgacggtagtcgaggaggtggttgattgtttagatagttttattttttttttattttttaaggttattgtaaatattaaattagattgtttatatataagaatttagtattaaagtattatataaatgtaagttatttatttttatttattttttttttttatgaataagattttaaaaatagaagatatttttaatttttatttattgggtttaaggttgtagtgtttgtattattgtaaattttaaattaatgaagtttggttttttttatattatttttgtaaaaggttgtgtgtttatttttcggagtgtgaatacgagtgtgggttatttttttttttttttgtatttttttttcgatgaggttttgttttgtgttaggtattatgttaaattttgagaaaattatagagaataaggtagacgttatttttgttttttagtaatatataatttagtgatgaagttgggggatttaataagttattttaataaagcgttatagtgagggaggtgtagggtgatgtttttagtagttttggtgttagttgttttaggtttaggggaagatttttattattttttaattttgtcggaagtggaggcggaggttgtttattgttgatatagtnttttaatttagggtttatagatattgtggaaatgttttggagttagacgggagaatgaattagtagaagtaatgttcgttttttatttttttgaagagggtttttaggaattttttggaggcgaggttagtttttggntgnagnggtttttggatataggttaggttttaggttttttttttttttatttatttttttttttttnggttttttttttagaggttgatagagttttatttttattttttttttatttaagtttttttttatagaaagattgtttttttttaggagatagtagtttatttgtatatagatatttatagtttttaaagtttggaaggttaagttgttaggatttttgagagtagggtggtttttgggaggagagtttaggttattattttgttttttttggtttttggttttncgatggggttgttttgattataaacgtttattaacgtagtcggtttagaagtgtatttatgttttttggtatttattggttttttaagttaaattgggtagggaggagttgtgagggaaaattgtaggttaggagggaggttggtaaagcgggttagggttaggtttgattttagtttttttttttcggttttattgtcggttagtgtttaataaggttttgttttttttttttagtgttagggatagttattttttttttttttttatcgtttttttttttttgtaatacgttatttgataagttagtgcgattttattggaggtgtattttataggaacgcggggttatagttttttgtatatattttatgttgtatagtaaggtgtacgtgttttttagagttttagatattattttttatttatttagaagtttaagtgatttttaatagtttttagtagtttaatgggttggggttttgggagtagttgtttttggttttttttttgattttatcgtttagttttattttacggtttttttattgttttattttttattgcgtcgtcgggtttttgttagggttaaggggttttttttttttggtagtagacgttatggtgtcgaggtggtttttataatcgttttgtgcgttaataggataagatntgtttttttttttttatatttgttattttgagggatacgtggatgagataggaaaatataggggagtgtggagatttgaggtgatttggagtaagttttttaatttgagcggtaatttttttatttgtaaaatngagggggttgtttttatttttgaggttttgtgtcgtttttaaagtttgttagtttcgggttttaggattttgttgggatcgtgtgtgatgttttttgttgagcgattggtagtttgtgttttcggggggaaagagggtaggcgttttaaagtttttgcgttttgtggttttttttttttcgtagttttaagttttaggtgtgtcggtcgttttgagtttttttagtatttttcggaggcgtttgtaagatatttaaggttttcgttttttttttttttttttcgttatatttttattttcggtaggcgacgttttcgtttttcgattatggtttggtgaagaagtcggttaggttcgattagttttaatttcgtcgtacgagcggcgnttgncggatagtttttggggtttcggttttgttatttcggaggcgggaggtttcggggggtcgggttgggaagatcgagtcggaggtcgttaggttntttaggtttcggtcganggttgcgcggtcgtacggtgggtaggttcgggtgntttcggtaaattgtcgggtttttnatttttaaaagagaggaggttttttttttagttttttttgcgggagttcgatttagttttatttcgttattttcgggttgtatttcggttttnttntntcggtntncgcgtttttgttcggggcgggttagngaantttcggttcgcgtcgttnggggattttggagcggaggaggaagcgcggcggggcgggggcgggggtgtgtcgggttttantaattcgtagggcggtcgcggcgtaggagaaggggtagagtcgagtatcgcgtatcgcgttatgggggtcgtttcgggtcgtcgggggtcggggttgttgttgtcgttgtcgttgttgttgttgttngtcgtcgtagttcgttttggcgttgngnatttcgggttgtagtttngaaatttttttngttgacgaggtcggggcgtagtttttcgcgtagagttataattttagcgtcgaataggtgttgttttnagagcgtggtcgttagttgggcgtacgatattaatattatcgcggagaatgntnaaggttaggtggcgttcgggttcgggcgggggcggggcgggtcgcggcggttaattatagtacgcggtcggtttgtggggncgggtagnntggcgttttcgnattcgaattttatttcgatttcggattttcgtttcgatagttagtcgcggggttcgagcgtcgggttgcgcgtacggtttgcgtttttagtatgtacgagttggatggatgagggtggttgtttttaggtcgcgttcgttttcgtcgaaggtgttgggtttggttttggggttttcgcgttttcgggtagttgtttttttattttcggacgttgtcgttgttatcgttatcgtattgtattgtttatttattttttattcgttcggttttttttttggttttaatttttgttttattatttttatgaggtagattttttnttagaaggaggaagcgcggttttcgtnaaattaaggtttttcgtagggatnttttttagggttcgggttttggaagtttttggtttttttttttttttttagtatcgtggttttttttttatggtttgtatttanagtagggttttatattttttttgtttttttggtgtttaatagg

SEQ ID NO: 554 - DNA, 5768 bp, Artificial Sequence
  chemically treated genomic DNA (Homo sapiens)
  unsure 44, 128, 152, 179, 499, 511..512, 520, 601, 603, 655, 723: n is a or g or c or t
  unsure 735, 753, 755, 781, 908, 970, 988, 992, 1018, 1020, 1026: n is a or g or c or t
  unsure 1028, 1031, 1124, 1148, 1183, 1200, 1293, 1297, 1685, 1819: n is a or g or c or t
  unsure 2491, 2716, 2777, 2780, 2783, 2921, 4665, 4705, 4748: n is a or g or c or t
tttattgggtattaggagggtagggagggtgtaggattttgttntagatgtaggttataaaggagaagttacggtgttgggggaggggaggaaggttaagggtttttagagttcgggttttggggagnatttttgcgggagattttagtttngcggaagtcgcgttttttttttttggnagggaatttgttttatgggaatggtggagtagaaattgggattagaaaagaggtcgggcgagtggagggtggatggatagtgtagtgcggtgacggtgatagcgatagcgttcggaggtgagaaggtagttgttcgagagcgcgggggttttagagttaagtttagtattttcggcgaaggcgggcgcggtttgggagtagttatttttatttatttaattcgtgtatgttgggagcgtaggtcgtgcgcgtagttcggcgttcgggtttcgcggttgattgtcggggcgagggttcggggtcggggtggggttcgggtncgggggcgttannttgttcgnttttataagtcggtcgcgtgttgtgattggtcgtcgcggttcgtttcgttttcgttcgggttcgggcgttatttggttttngntatttttcgcggtgatgttggtgtcgtgcgtttagttggcggttacgttttnggaatagtatttgttcggcgttggagttgtagttttgcgcgaagagttgcgtttcggtttcgttagtnagaaaagttttngggttgtagttcggggtntntaacgttagggcgggttgcggcggtnagtagtaatagtagcggtagcggtagtagtagtttcggttttcggcggttcgaggcggtttttatgacgcggtgcgcggtgttcggttttgtttttttttttgcgtcgcggtcgttttgcgggttantaaaattcgatatattttcgttttcgtttcgtcgcgttttttttttcgttttaaagtttttnagcggcgcgggtcgaggntttnttggttcgtttcgggtaggggcgcgngngtcggngnganggggtcgaggtgtagttcgggggtggcgggatggggttgggtcgggttttcgtagaggaagttggagaaagggtttttttttttttgaagatnggggattcggtagtttgtcggaantattcgagtttgtttatcgtgcggtcgcgtagttntcggtcggggtttgggnagtttagcggttttcggttcgatttttttagttcgatttttcggagtttttcgttttcggagtgataaggtcggggttttaggagttgttcgntagncgtcgttcgtgcggcggggttggggttgatcgggtttggtcggtttttttattaggttatggtcgaggggcggggacgtcgtttgtcgggggtaggggtgtggcgggggggagaggagggaggcggggattttaggtgttttgtaggcgttttcgggaggtgttggaggggtttagggcggtcggtatatttggggtttggggttgcgagggagggggagttatagagcgtaggagttttggagcgtttgtttttttttttttcgaggatataggttgttagtcgtttagtagaaaatattatatacgattttaatagagttttagaattcgaggttagtaggttttgagagcgatataaagttttagagatgagaataatttttttnattttatagatgaagaaattgtcgtttaggttgagaggtttgttttaagttattttaggtttttatatttttttgtgtttttttgttttatttacgtgttttttaaagtgataagtgtgggggagggaggatangttttgttttattggcgtatagggcggttgtggaggttatttcggtattatggcgtttgttgttagaggggggaagttttttgattttggtagaggttcggcggcgtagtgggaggtggggtaatggaggaatcgtggggtgaggttgggcggtgggattagggaaggagttagggatagttgtttttaagattttaatttattaggttgttgggggttgttgggaattatttgggtttttgggtgagtgggggatggtgtttggggttttgagggatacgtgtattttgttgtgtagtatggagtgtgtgtaggaggttgtgatttcgcgtttttgtgagatgtatttttagtgagatcgtattgatttgttagatgacgtgttgtaggggagagggggcggtggggagaggaagaaggtggttgtttttagtattagagggagaaggtagggttttgttaaatattggtcggtagtggggtcgggagaggagagttggggttaggtttggttttggttcgttttgttagttttttttttgatttgtagtttttttttataatttttttttgtttagtttggtttggagagttagtggatattagaggatatgggtgtatttttgggtcggttacgttggtggacgtttgtgattagagtagttttatcgnaaggttaggggttagggagggtaaggtggtggtttgggttttttttttaggagttattttgtttttaggggttttaatagtttggttttttaggttttgagggttgtgggtgtttgtgtgtaaatgagttgttgttttttgggaggaagtagtttttttgtggaaagaggtttgggtggggaagagatgagagtggggttttgttagtttttgaaggaggggttnaagggaggagagatgagtagagaggagaagagtttgaggtttaatttgtatttagaggttnttntanttagaggttggtttcgtttttaaagagtttttgagaattttttttaggagggtggagggcgggtattgtttttgttggtttattttttcgtttgattttaaggtatttttataatgtttatagattttgggttagggnattgtgttagtaataaatagttttcgtttttattttcgatagggttggaagataatggaagtttttttttggatttggagtagttgatattagggttgttggaggtattattttgtattttttttattgtaacgttttattagaatggtttgttaaattttttagttttattattaaattgtatgttattggagggtagggatggcgtttgttttgttttttgtggtttttttagagtttagtatggtgtttagtatagggtaaaattttatcgaaggaagggtgtagaggaaagaggaaatgatttatattcgtatttatatttcggggggtgagtatatagttttttgtaggaataatataagaagagttagattttattaatttggaatttgtaataatatagatattgtaattttgagtttagtgagtaaaaattaaaaatattttttatttttagggttttatttatgaaggagaaggataaatagaaataaatagtttatatttgtatagtgttttagtgttaaatttttgtgtataaataatttaatttggtatttataataattttgaaaggtaggaaagagataaggttgtttgggtagttagttattttttcggttgtcgttataataaaggagaaggtttaaattttgtaggaggatattattatgaataggttagtgtagagagttatagagatttgatttacgtgaggtaatttagttggtttgggaatttttttattttttttttaggaagtataggttattagttattataggagagaaaaatagtttttaaaaatatgtttaataatggaatagaattgagagtttagaaatgaatttatataattatgtttaattgtttttgataagaatattaggataattaaatgggaaagaaaatatttttaataaatggtgttggggtaattggatttttatatgtaaaagaatgaagttggatttttttttaatattatatataaaatttggggttgggtgtagtggtttatgtttataattttagaattttgggaagttgaggtgggcggattattggagtttaggagtttgagattagtttgggtaatatggtgaaattttatttttataaaaaaattagttgggtatggttgcgtatgtttataatattagttatttgggaggttgaagtgggaggattgtttgaggttaagaggttgaggttgtagtgagttatgattgtgtttttgtattttagtttgggtgatagagtaagattttgttttaaaataaaaaataaaaaataaaataaaagatttaaaatagattttgatgtaagaattaaaattataaaatttttagaagaaaatataggtaataaatttttgtgattttggattagttaatggttttttagatatgatattaaaagtataagtgatgaaagaaaaaatagataaattggtttttattaaaatttaaaatttttgtgttttaatgatattattaagaaaatgaaaagacggttaggtatagtggtttatatttgtaattttagtattttgggaagtcgaggtgggtagatcgtttgaggtcgggagttcgagattaggttggttaatatggagaaattttatttttattaaaaatataaaaattagttaggcgttgtggtttattttttttattttagttattcgggggggtgggggaggggattgttttgaatcggggaggtaaaaatttttttnaatttaaattgttttattttatttttgtttgggtaataanagtaaaatttttttttaaaaaaaaaaagaaagaaaatgaaaanataatttaaggttatcgtagtagagtttattcgattgtatgttatttagttttaagtgttggatatagtggattacgcgttagtattttttttttttaagagacgagtttgttttgttattcgggttggagtatagttgtatgaatatggtttattgtagttttgatttttaggtttaagtgatttttttatttaagttttttagtaagttttgtagtatttgggattataggtgcgtattataatgtttggttaattaaaaaaaaattgttttgtagagattaggttgagttatgttgtttaggttggttttgaatttttggtttaagtaattttttagttttagttttttaaagtgttgggattataggtatgagtgagttattgtatttagtttgtatatatatttgtgttgtaaatatatgatagggtgattaatattaggttttgaagtatattaataaattatatgtaggataaaattatgggaggaataagtgggaattatgagaaaagaaaaaagaacgatgttaaagaagggttttttgtgtttttaaaatagatggtggtggtttttaaatcgttgttatttgggtagaaatgggttaatataaatgaaggatggaattgttttataaagtgttaatatttataagatatttgagattatattttttgtatttatttaaatgtattattgaagtattttataatattttagatgttaatttaaaaatgtatgagggggatatatatattcgaaatttttttatagaatattggagtaaaggattgaaaattaataattaggtagtttttggataatagttttttttagtagtggttaattgtatatgtttttaaagttagattatttaggttgaaattatgtttttttttttttattgtgttgggtacggggatgatttttaaaatttttattttgagatagggttttatttttttgtttagggtgtgagtttagtgatgtaattacggtttattgtaattttggatttt

SEQ ID NO: 555 - DNA, 13376 bp, Artificial Sequence
  chemically treated genomic DNA (Homo sapiens)
  unsure 11361..11362: n is a or g or c or t
atagtttttaaattattgaaaatattgtataatttaagaatgatataattattttttagttgttggaatattgttgaagtattgaaattaatatttattgaggttaattttgaaatttttgtaaaatatatgacgtagaagtttagttgaggttattttgttattaatatttaattagaggtagtaaataatgtttttttataaattattgatattttaatagataaattgtttagataatatgtaaaatgttagttaaagttatatttttgaaaatatttatatttaaatgtatttgtttagtattaatttggtatgattttttgttgtgaatattttatattttaaattatttttattaaaaaatataatatatttaatgattttggaatgtgatattgagtttttatgattaaaatttgaattttttattattttatgttaaggatttgatttatattataaataaaaatgatttttatgaaggattttgttttgttttttgagtattttttgtttttattttttggatatgaggttttatttttttattgttggcgggggagggaaatataattttttttttaattttataaaattgtagttagaatagagtttagtgataaaagatagattaataagagtaaaatgaaggagtttagtaatgtgtgtagtgtatattatatgagagtaattttagtggaaagtaatttaaagtagtggttgagaattttggtttgtatagtatttttaataaaggataatatatttgtagagaaatgataggaaaaaggaaaatagttttgggtttttaaatatgggaaatcgtggaaggtaaatgtatgtgaagaaattaatggagtaagattagtttgtagatttttttggtgttgtttttgggttgttatgataattagaattgtttttagtaaagggtaatttatattttttgtttaagtaaaaaagtgggaggataggaagagttttttttgtgtttgttgttttttaattgtttttagttaaaaaataattttttattaaagaggtatattttggggttatatattttgttttttttttattatagaaagttatgtagaataagtgtagagtttattgaattattattaggtaaatatttttatatttattatttaggttaagaaatagaattgtgttttttatttttataattttttgagtattttttattttttggtattttaagatattttagtttttttgtattttttttgtgttagttttggaattagttatttttttaaagagttttggattatttgattggaaaaaatggttttataaattgatattcgggtaatggttgtgtttattattattattattattttgtttaattagataattttttaaaaaagttttaaagtattgaaagaatataatgatttttttagagtttttgagatatgtaatttgaataattatgatgataaattgttgaaaatttataaatagaaattaagcgatggataatattagatggggtattaatgtatgatgaattataagtattattttttttttttttttttttgagatagagttttttttttgttatttaggttggagtgtaatggtgcgattttggtttattgtaattttcgttttttaggtttaagtgatttttttggtttagttttttgagtagttgggattataggtatacgttagtacgtttggttaatttttgtatttttagtagagatagggttttattatgttggttaggttggtttcgaatttttaattttaggtgatttatttgttttcgttttttaaagtgttgggattataggtatgatttattatgtttagttaaatattatattttttttttaaattttagtatggacgtttttttttttgtggagtattgtttttatttgtattaatagttatagttattaggcgtatttttaaatttttttttttttttttttttttttagttttttaggatttttgtgaatattggttggtagtggagaatatagttttaaaatgtgttaaaatatatttaatgtttttaatattataattggaagtttatttaggggttatttttatagaaaagaaggtattggagtaattaagtatagaaattattataaagttgttattttaagtgattaatatatgaattatttttattataaattattaaattttaatgattttggaatgtgatattgagtttttgtgattaaaatttgaattttttattatcgtatgttaataatttggtttatttaataaataaaatgatttttatgaagagttttgttttgttttttgagtattttttgtttttattttttggatatgaggttttatttttttaagaatattgatagtgatttttttttgaaggtttattttgttttttgtattagtttattaattttggtttataatttttaagttaaaggattttttaaaatatttgttggtttttggttattcgtttatatttaagaataaggttgagtagaaatgagtgaatggagggtttattaattgataagttttattaaagagtaatggggtggttagtgagttgttatttatttggttgttgttaaaatgttttttttttttttttttttttttgtttttgtttttgtttttttttttttgagatagagtttggttttgttatttagtttggagtgtagtggtagtattagggtttattgtagttttgatttttgtaggtttaagtgaattttttgttttggttttttagtttttgggattataggtgtgtgtaattaagttcggttaatttttttgaattttggtataggtaaggttttattatgttgtttaggttggtttcgaattttcgggtttaagtaatttttttattttggttttagaaagtgttgggattatagttatgagttatcgtgtttggtttttagatgttattgaggttttttttttggatatttagtttttttagagttgaattttttagttttttgtttggggcgtatatatgtttgatttttatagttttaggaaaaaagtgagttatagttgagggttttatcgttttgtaggtatgtatatgtggtatatatatgtagtaaaatatatattatataaaatttattattttagttatttgtaagtatataatttagttgtattaattatatttttattgttgtgtaattaatttgtagaattttttttattttattaaattggaattttgtattgattaaatagtaattttttggttgtttgagtttttggtaattataagtttattttttttattattttgataattttaagttttttatataaatagaattatatatagtatttgtttttttgtgattggtttattttatttagtttaatatttttaaagtttatttacgttgtggtatgtgttagaaattttttttttatgaaggttgaataatattttattttaggtatatattatgttttgtttatttatttattagttgatagatatttgggttgtttttatattttagttatagtgttgtggtgaatacggtatgtaaatatttgagattttgttttcgattattttggttatgtatatttagaagtgaaattgttggtttacgtggagttttatttttaattttttgaggatgtatatatatttttatgtaattattttttattgagttttattgtttattatatttagtgtttttgagtgtggaaatttttttgtttattttttgtttttatttttttttaataagttatgttttgtttggaggatgggtatagagttgagagtagtgatttggatatgtggggttggaaaggaaatttgagagtttaaaattttgtttgtgaattttgaatttaattttttaattttttttgttatagttaagtttttttatttatattcggtgtttttttggaggttgtaggtaaatgtgttaaaaaatttaatttattgaaagttagtttatttaaatgtttaatttgtaataatttttttattatttttttttttttttttttttgacggagttttatttttttatttaggttgtggtgaagtggggcgattttggtttattataattttcgttttcggggtttaagcgatttttttgttttagttttttaagtagttaggattataggtgtgtattattacgtttggttaatttttgtatttttagtagagatagggtattattatattggttaggttggtttcgattttttgattttaggtgatttatttatttcgattttttaaattgttggaattataggcgtgagttatcgtgttcggtttttattatttatttttttacgtttagttattattttgtttttataaaagtattttaaggtaaatttaatttgatttcgttttagtttttttgttgttgtagttagagtttgaggggtttagaggaaaaggaaaatttagaggggtataagaagaatatagaatatttatttttatttttgaggaagtataattattatggatggaaattagaagttattaattagttgtttatttttgggtaaattttttggttcgttggttcgaaaagtgtaaaacgagggttataatttttatttatagattgtatgtgtttatatatatatttacgaacgtttagtaaagttgaatttggagtaaatgtgttaatagtttttaaagggttagtgtatgacgttattatagtaataataatagtgcgtatgcgtttttttttaaagagtcggcgtgttttcggttcggtttagttcgttttttttcgtggagtgttgcgttttcgtttttttaggttgttttttttagtaggagttaattcgttaattatagtttttttttttttgacgttattggcgcgtgtttcggttttaaaagttcgggggcgggtttttgagttcgcgtatgcgtttttgtgcgtttgttttatgttggtttcgtgagtttggttttaggtgtttcgtgtttggggttgattcgagttgtcgtcgtcgtcgtcgtaatgggtaaaacggttaatttttcgggttcgggagttcgattcgattcggtgcggagttttaatcgttggaagaaaaaatatagttataggtagaataaaaagaagtagttgaggaagtaattgaagaaattcgaatggtaggtcgagcgcgagagtattagtcgttttatgtagaattatgaaaaggtgaggtcggcgttggggagggggttcgggtcggttagtagcggggtagcgttttattgcggcgaggagttgtagagtggaggcggcggatttgttatcgggattcggtcgggaatgagaggttacgtcgggtgttatagtttaaatttttgtatcgttttggttatttttttgtttgttatattgtttttaaaaaaataatagaaatgcggtcgtatttaagggtagggagattaatgttgtaatagttatagttatatttatattaataatattgatgataatagtggtaataatgatatttatatttttaagtatttattatgtgtttatagtaattgtttgatttgatttgaggtatggatattaataattttatttaatagatgagataattgaggttttaagaggaatgaaatttgttcgaattttttacgtttagtaggtggtgtggaattggaagttagatttatgtttttttaattttaaagtttttgtttttaattatgaagttagattgtattttttaatattatttatgtttttttttgtggttattttattttttttataggttttatgtttttatttaagaattggtttagaaaagttggatcgttggtttgtttttgttatttattatttttatattgtagttggtgtttttagatgagtatatttgtaatgattattttgattttttgatttttttttttaatttttagattttataggtttgttaattttttttttttttttttttaaattttatgtttgttggtttttatttatattttttagttttttagtttttttttagtgtagtataattagggatttaatagatggaatatttttgtaattaaggttgttattgtaataaattattataaatttggcggtttaaaataatagagattttgaggttaggagttcgagattagtttgattaatatggtgaaatttcgtttttattaaaaatataaaaaaattagttgggtttagtggtgggtgtttgtaattttagttattcgggaggttgaggtaagagaatcgtttgaattcgggaggtagaggttgtagtgagtttagatcgtattattgtattttagattgggtgatatgagtgagattttgttttaaataaataaataaaaaagtttagtaataatagagatttattttgttatagttttggaggttatacgtttgaaattagttttattgggttaaaattaaggtgttagtagggatttgttttttttagaggttttaggggagaatttgttttttgttttttgtagtttttggtggttgttggtattttttggtttgtggttgtataattttagtttttgtttttttttgtgttagtttatttttgtttttttgttataagggcgtttacgattgcgtttagggtttatatagataatttaggataattattttattttaagatttttaatttaattatatttgaaaagttatttttgttatgtaaggtaatatttattttttttagaagttaatatatggatatgagttgggattatttttagtattatattttagttttattattttagtagatcgtagagttagaaatttaggagtagttttagttattttttttttatttatttttatatttagtcggttatattgttgatttgttttgtttatattttttaaatgtttttttatttttattgtattgtttttagtttttattattttttgtttggattattatagtaaatattgtttttaatagggattagtaaattttttttgtaaatgatagtgaatgtttttagttttgtagttttaagggtggaattatttaattgtttttttgtaatataaaagttgttatagaaatatttaaatgaatgggtgttgttttttagtaaaattttaattagtgaaataggtggttgatgggttttgttttttaggttttaaattttttaatttgttttttgtatttttgttagaatgattttttttaagatgaagatttaattattttattgtcgattagaatttttttttggtttatagttatttttagaaaaattgttaaatatagcgtgttaatatgttttagtttgttgtagagtaagttatttgtggttaggttgatttggtttaaattttattttttaggtattggttagttaggtttttttatttttttaagttttagtttttttttttaaaaaatcgaagttattagttatttagagtgttgtaaggtttaaatgagataatgtgtatatattaagtggtatatgataggtatatatgaaggaatagtttgtagttttgtgaattgtatatgttttttgtgttttttattttggtatttgatgtttttattgtgtgtagtgagtatatttatttgtttattttaaggaaaggtattttttttttaagatttagtgtaaatttttttttattattttttttgatcgagttagggttattgtgtatttgtagtattttgtagatatttttatgataatatttattaattgtttgcgatgattggtttttttaatttttttaaaaaaatttttttattagattatgaatatttaaggttagtaattagtgatatattcgtttttgtattttttagagtttggtagtatagtgtttgtttttgaataggtgtttagttagtgtttagatgttgtttgttgtaagattagattttttttaggtggttttgttttggttggtagtattggattatttttttttgttttttgtaattgtgaatatttattaaatttttatttatgttggtttttcgtatatttattataaataattttgtgaaattgtttttattatataggtgagataattttaaggtatagtaaggttaaataatttgtgtaaggttaaatagttaagaagtgaaaaaggagttttaagttaggtagtttgatattagtgtattaaattagtaggttttattgtattgtatttatttaaattttatttgttttattgttgaaggagtagttttttttttcgttaagtattgttttgttttatttttttaattttagaaatatttttttaagatttggttgagaaataaatgtagtgtgaaattagttgttaaggttagtaatattaggatataattatttgaatagtaggattattattttttaggtaaataaggtgtaggtttttattatgtggttttttaggtggtagtattgtatataaaatttattatatagttatggtatataggtggtgtttagtagttttattggtgaattattgaataatttgatttcgaaattttttaaaataatttgataggtatttgtttaggcgggtgtgagtatatatggaaaaaaaatacgtgtttaagtttttagggaatttgggtatgtaggggttgatatagtttgatacgttatattagtatgtataaaatgttataatagtaagtttgtaatatgtattttagtgttgtggagttagaggatggtgtaattaggggaagttgagttattttatattgagttttttttggttagatgtattataaaaaatatgttttttttgggtatgttttttttttttttggtggttgtagttttacgtttggtttggggagttgatgtgggttggattttattttttgtattttagttttagtagattttattgtggtgtatataaattgtttagtggtttgtagttgttaagagtggagttaagttttttttttttttttaagatggagttttattttattatttaggttagagtatagtggtattattatggtttattgtagttttgattttttgggtttaagtgatttatttaatttagttttttgagtagttaggattataggtgtatgttattaggtttggttaatttttttggtaatttttgtagagatggagttttattgtattttttaggttggttttgaatttttgtgtttaagcgaattgtttatttgtaattttaaagtgttgggattataggtgtgagttattgtgtttggtggagttagtttttgaatgatgagtttattagatagaaaagattggtaaggatgttttaggtggagggaatatggggaaatatagagaggtgaaaatgtatggtattttttgagggaggaaatgttttttggagtgttggatgtatttttgagttggttttagatgggttcgagaagaaggttggattgtgatgatattggaggttgtagtatgtagtataatggttttttaaagtgtttatattttaatatttggaatttgtgaatatgttagatggtaaggggtaattaaggttgttaattagttgattttaaagtagggcgattattttggattaggtgggtttaatgtaattataggtgtttttagatgtggaagagggaggcggaagagttagtgttagaatgacgtgatgtgagaaagatttggagtttgttgttgattttaaagatagaagagggttattatttaggaatgtgggtagtttttagaagttggaaaaggcggggaaatggattttgtcgtagagttattagaaaataacgtagttttgttgttatttagattttagttaagcgaaatttattgtggatttttgatttttagagttttaaggtaatatatttgtgttggtttaagttattatttgtggtaatttattatagtaatagtaggaaatttatatagaggttatgtttaaagattttatttggaagttatgggaagtatgtggcgggattttgtatagagagaatatatttgagttgtaaaggttggagggtaagagattaggtaggagattggagattattggtagagtttaggttttgggttttttgagaggtagatgataaaatgggattgggtgaattggagttttaggggttataggtataggagggggaatgttcgtgaaggttgaaggagagggaataggagtagggagggaaaggagagaaggatggaaggagtagtaggtaggaaggtaggaagagttttagattgtagtatagttttaagaaagatttagttaggttgatggggagttattgatttaaaattgtttattagaggaattttcgggtttgtagtagtattgttgagtttcgttattgattaggagtagttcgggggaagtatggtttttttatggtgggtttagaggaggtatagttggtattgttagttaattatgttttttatagtaggagggtggtgtatttttaaggggtggtgtgtgttggaggggttgttggaaaattggggattgaggtttattgagaaatgttgagttagttgtgttagtttagtagttgtttttattattgttgaatgattttttgtatttgggatttatttagattgtaattagttgtattgtatagaaattgtatttaaattttgattttttttttttaaattaaaatttggtttggtgtagttgaggcggtttgttgttttttttttgacggtaataggtggagtattttagggcgttttaatgttttttttattaggtattatttattttagcgagaaataggtattattagagagttgtgagaagtataagaggatggttaaatgttatttttttttttttcgttttttaatttttttaatagtcgtgggaagtttttaataaggattatttttgaaatattttttttttgaatttagaagaatagtgagatagatttgtagattgagtatgagtattatggagatgtaagtgattttttttttttaagaaagggataaagggaaggagaaagagttatttttttgaggtagagtttcgttttgttgtttaggttggagtgtagtggttttatttttgtttattataatttttgttttttgggtttaaacgatttttttgttttagttttttaagtagttgggattataggcgtatcgattgtatttggttaatttttataattttagtagagatagggtttcgttatgttggttaggttggttttgaatttttgattttaggtgattcgtttgttttggttttttaaagtgttgggattataggcgtgagtnncgtgtttggttgggttattttttttgtaggaatcgtagttattttttgttgtggttgttatgtaatttttggaatataatagaatatttagagtagggttagtaaattttttttttgtaaagggttggatagtttgtgttaggttttatggtttatatagttttcgtaataattatatagataataaataaatgaattattgtagttgtgttcgaataaaattttatttattaaaataggtagtaaattggatttggttcgtaggttgtagtttgttgggttttattttagaatattaatagaattaaaagtttttttttttcgtttttttttaaagaatatggcgtttgtaattttagtattttgggaagtcgaggcgggtggattacgaggttaggagattaagattattttggttaatacgatgaaatttcgtttttattaaaaatatagaaaaaattagttgggcgtggtggtgggcgtttgtagttttagttatttgggaggttgaggtaggagaatggcgtgaattcgggaggtggagtttgtagtgagttaagttcgcgttattgtattttagtttgggcgatatagcgagattttatttcggaaaaaaaaaaaaaaaaaaaaaaagggattagggtatatagttttttgttgtaatgtttgattgaagagtgttggagtagttttatttttttaaattttttttttaggaggttaattgattttaggaagatagatgtgttgtgaatgttttgtttgaggagttcgttttgtttgtattgtgttttttgttggggattgaagagtgtgttggtagtttgtttttttttgtaggtattttattttttttgaaaatagttttttagttgataatattacgagtgttagagtgagttatatttaattttaatgttttgtttggaagattattttttaattgaggttttttgttgggatagtatgttatttgaataaatcgtttttttaatgttggtatattgattttgttttttttttagtgatatttgaaatgatttgtagggattaagataatgttttaatatttgtatttttagtattggagggtatagagtaaatattgtttgggtaatgttaagaattataggaaagatgtgtagattgtaaaatgaagtataattgttatttttttattgtttagagtgtaatttaaataaatgaattatataaatgtagttttttttttttgcgaattatgtataatttggtagtatatttttagaattgagtagtagtttttgtttttagtatttgtaataaaataatttttttgagtagttgaaatgaaatttagaaaattgggtttgtgttaataaagaatattagtaatgaatatttgaataatgtaaagttagtaaaatgttatttattgtggttttaaagtatgatagatattttttttgtgttgaaataatattttttttttagtaattttaaaatgaatagttattaggttggattttataggttattgatttatggttaaaattttgaaaggattgtgttaataagaaatatttttttaattaattttatttttttttttaaattgtgtgtatagaattatttttattgtgatttgtggtttgtggtaattttgtttttgttttttaaattgagattttttgaaggatgataggaagtaaattttttttttaaaattgatgtggttggtgatgttttattgtgtttaatattttggaggttagatagtagtatgtgtggtgtgtgtgtattgggtgatttttttttttttattaattgaaatgtttataaatgtatattcgatttagggatagtttttttagggtatatttcgttatagaaggaatgatggtttttaattagaagcgatgattgaatttaattttgaattattaaggatgagttgggtaatataatgtagagaagaaatggttgtgtcgtgaaataaatgagttattttgatttttttttttttttttttaga

SEQ ID NO: 556 - DNA, 13376 bp, Artificial Sequence
  chemically treated genomic DNA (Homo sapiens)
  unsure 2015..2016: n is a or g or c or t
tttggaaaaaaagaaaaaggaattagggtaatttatttgttttacgatatagttattttttttttatattgtattgtttagtttatttttggtaatttagggttgaatttaattatcgtttttaattaaaagttattattttttttgtaacgaaatatgttttgaagaggttgtttttgaatcgaatatatatttgtaagtattttaattggtaaggaaaaaaaagttatttaatatatatatattatatatattattatttgatttttaaaatgttgaatatagtaaagtattattaattatattaattttaggaagaaaatttattttttattattttttaagggattttaatttaagaaataaggataaaattattataaattatagattataatgaaaatagttttatatatataatttggaaaaaagagtgaaattagttggagaaatattttttgttagtataatttttttaaagttttaattataaattagtggtttatgaaatttaatttgataattatttattttggggttattgaaggaggagtattattttaatataggggaaatgtttgttatgttttgaagttataataagtaatattttgttaattttatattatttaaatatttattattgatgttttttattagtataaatttaattttttgaattttattttagttgtttaggagaattattttattatagatgttgaaggtaggaattattgtttagttttggaaatatgttgttaaattatatatgattcgtaaaaggaaaaagttgtatttgtatggtttatttatttaaattatattttaggtagtaaaaggatgatagttgtattttattttataatttatatattttttttatgatttttaatattgtttaggtagtgtttattttgtgttttttaatgttgaaaatataaatattaaaatattgttttaatttttataaattattttagatattattggaaaggaggtagaattagtgtattagtattagaagaacggtttatttaaataatatattgttttagtaaggaattttaattagaagataattttttaaataaggtattaaaattaggtgtagtttattttagtattcgtggtattattagttaaaaagttgtttttaaagggaatggaatgtttatagaaggaggtaggttgttaatatattttttaatttttagtaagagatatagtataggtaaagcgagttttttaaataaaatatttatagtatatttatttttttaaagttagttaattttttggagggaaagtttagaagaatgaaattgttttaatattttttaattaagtattataatagaaaattatatattttaattttttttttttttttttttttttttttcgagatggagtttcgttgtgtcgtttaggttggagtgtagtggcgcgaatttggtttattgtaagttttatttttcgggtttacgttatttttttgttttagttttttaagtagttggggttataggcgtttattattacgtttagttaattttttttgtatttttagtagagacggggttttatcgtgttagttaggatggttttgattttttgatttcgtgatttattcgtttcggttttttaaagtgttgggattataggcgttatattttttaaaagaagacgaagaaaaggaatttttgattttgttgatgttttaaaatagggtttagtaaattatagtttacgggttaaatttaatttgttgtttattttagtaagtaaagttttattcgagtataattataataatttatttatttattgtttatgtagttgttgcggagattgtatggattataaagtttaatatagattatttagttttttatagaaaaagagtttgttgattttgttttagatattttgttatattttaaggattatatagtagttatagtaggagatggttacggtttttataaagaaaataatttagttaggtacgnnatttacgtttgtaattttaatattttgggaggttaaggtaggcggattatttggggttaggagtttaagattagtttggttaatatggcgaaattttgtttttattaaaattataaaaattagttagatgtagtcggtgcgtttgtaattttagttatttgggaggttgaggtaggagaatcgtttgaatttaggaggtagaggttgtggtgagtagagatagagttattgtattttagtttgggtaatagagcgagattttattttaaaaaaataattttttttttttttttttattttttttttaggggggaaaaattatttatatttttataatatttatatttagtttataaatttgttttattatttttttgaatttagggaagagatattttagggatggtttttattaaaggttttttacggttgttggaaaagttgaaaagcggaggagaaaagggtgatatttgattatttttttatattttttataattttttggtaatgtttatttttcgttaaagtgaataatgtttgatgaaaaaagtattgaaacgttttagaatgttttatttgttgtcgttaagagaagaatagtaaatcgttttaattatattagattaaattttgatttaaaaaaaaaaaattaggatttgaatgtagtttttatgtagtatagttgattatagtttaaatgaattttagatgtaaagagttatttagtaatagtaaaaatagttgttgaattaatatagttagtttaatattttttagtgagttttaatttttagttttttagtagtttttttaatatatattattttttagaaatatattatttttttgttgtgagaagtatagttgattgataatgttagttgtgttttttttagatttattatggaaaagttatgtttttttcgggttgtttttagttaatggcggggtttagtagtgttattgtaggttcggggatttttttgatggataattttggattagtgattttttattagtttggttgaattttttttggaattgtgttgtagtttgagattttttttatttttttatttgttgttttttttattttttttttttttttttttttatttttgtttttttttttttagtttttacggatatttttttttttgtgtttgtaatttttaaagttttagtttatttaattttattttgttatttgttttttaaaggatttaagatttagattttattaatagtttttagttttttatttgattttttattttttaatttttatagtttagatatattttttttatatagagtttcgttatatattttttatggtttttagataaagtttttgagtatggtttttgtataaattttttattgttattgtaataaattattataaatagtggtttaaattaatataaatatattattttagagttttggaggttaaaagtttataataggtttcgtttggttaaaatttaggtggtagtagggttgcgttattttttgatgattttacggtagagtttattttttcgttttttttagtttttagaggttgtttatatttttaggtggtgatttttttttgtttttaaagttagtaatagattttaagttttttttatattacgttattttgatattgattttttcgttttttttttttatatttaaggatatttgtgattatattgggtttatttaatttaggataatcgttttattttaaggttagttgattagtaattttaattattttttattatttaatatatttataggttttaggtattaggatgtggatattttaagaagttattatattgtatgttgtagtttttaatgttattatagtttaatttttttttcgaatttatttgaagttaatttaggaatgtatttaatattttaaggagtatttttttttttaaagaatgttatgtatttttatttttttgtatttttttatgttttttttatttagaatatttttgttaattttttttatttgatgaatttattatttaagaattagttttattaggtatagtggtttatatttgtaattttagtattttggaattataggtgggtagttcgtttgagtataggagtttaagattagtttgggaaatatagtaagattttatttttataaaaattattaaaaaaattagttaggtttggtggtatgtatttgtagttttagttatttaggaggttgagttgggtgggttatttgagtttaggaggttaaggttatagtgagttatgatggtgttattgtattttagtttgggtgatagagtgagattttattttaaaaaaaaaaaaaaagtttagttttatttttggtaattgtaaattattggatagtttgtatgtattataatgaaatttgttaagattgagatgtaggggatgaaatttagtttatattagttttttaagttagacgtgaggttgtaattattaggaggaagggaagtatatttagaagaagtatgttttttgtaatgtatttgattagaaggagtttagtataggataatttaattttttttaattatattattttttaattttatagtattgaggtatatgttataaatttattattataatattttatgtatattaatataacgtgttaaattgtattaatttttatatgtttaggttttttagggatttgggtacgtattttttttttatatatatttatattcgtttagataagtgtttgttaaattgttttaaaaggtttcggaattaaattgtttagtagtttattagtgaggttattgagtattatttgtgtattatggttatgtagtaagttttatgtataatgttattatttgaggagttatatagtgagggtttgtattttgtttatttagagaatgataattttgttatttaaataattatattttagtattgttaattttgataattgattttatattgtatttattttttaattaaattttaagaaaatatttttaaaattaaagaagtaaaatagaataatgtttagcgggggaaaaagttgtttttttaataatgaaataaatgggatttaaataaatgtaatgtagtaaagtttattggtttggtgtattggtattagattatttggtttagaattttttttttattttttagttgtttaattttatataaattatttaattttgttgtgttttaaagttgttttatttgtataatgggaataattttatagggttatttgtggtgagtatacggaaagttagtatgaataaaagtttgataaatgtttataattataagaaataaaaaagaataatttaatgttgttaattagagtaaagttatttgggaaaggtttagttttatagtaaataatatttaaatattgattgagtatttatttaaggataagtattgtgttattagattttggggagtgtaaagacgagtgtattattggttgttgattttgaatgtttatggtttagtaggagagtttttttaaaaaagttaaagaagttaattatcgtagatagttgataaatgttgttataaaggtatttataaaatgttatagatgtatagtagttttaattcggttaggggaggtgatgaagagaagtttgtattaaattttgaaggaagagtatttttttttagagtgggtagatgggtatgtttattgtatatagtggaaatattaagtattaggatgagaagtataagaagtatgtataatttataaaattgtaagttgtttttttatatatgtttattatgtattatttggtgtatatatattattttatttgggttttataatattttgggtggttaataatttcggttttttgaaagaagaaattgagatttagagggatgaagaaatttggttagttaatatttgaagagtgagatttaaattaggttagtttgattataaataatttattttgtagtagattagaatatgttgatacgttgtatttgataatttttttaaaagtaattgtgagttaaggaagggttttaatcggtagtaaaatgattagatttttattttggaaagaattattttagtagaagtatagaggataaattaaaaggtttaaggtttaggggataaagtttattagttatttgttttattaattaaagttttattgaaaaataatatttatttatttaagtatttttatggtagtttttgtattataagggaataattgagtagttttatttttaggattataaagttgaaaatatttattattatttatagagaaagtttgttgatttttgttgaaagtaatatttattatagtaatttaggtaagagatgatggggattgaagataatgtagtagggatgaagaagtatttgaaaaatgtaagtagaatagattagtagtgtgatcgattggatataagagtaggtaagagagaagtagttaagattgtttttaggtttttagttttacggtttgttgagatggtggagttaggatgtggtgttgaaaatgattttaatttatgtttatgtattaatttttggaagggatgaatgttattttatatggtaaaagtgattttttagatgtgattaaattaaagattttgggatggggtgattattttggattatttgtgtaggttttaaacgtaatcgtaagcgtttttataatagaggaatagagatagattgatataggagaaggtagagattggagttatgtagttataggttaaggaatgttagtagttattagaagttataagaggtaggaaatagatttttttttagaatttttggagggagtaagtttttgttgatattttgattttggtttagtgaaattgattttagacgtatggtttttagaattgtgataaggtaaatttttgttgttgttgggtttttttgtttgtttgtttaagatagagttttatttatgttatttagtttggagtgtaatggtgcgatttgggtttattgtaatttttgtttttcgggtttaagcgatttttttgttttagtttttcgagtagttgggattataggtatttattattaggtttagttaatttttttgtatttttagtagaggcggggttttattatgttggttaggttggtttcgaatttttgattttaagatttttgttgttttaagtcgttaagtttgtggtaatttgttataatggtaattttagttataagaatgttttatttgttaaatttttgattgtattgtattagaagggggttgagaagttgaaagatgtgggtgaagattaataaatatgggatttagggaaagggaaaagaggaattgatagatttgtggagtttggaggttgggggaagaagttaggaggttaaagtgattattataggtatatttatttgggaatattagttataatgtggggatgataggtgatagaaatagattagcggtttagtttttttaggttaatttttggatggggatatgaagtttgtggagaaaatgaggtggttataggaaggagtatagatgatgttgagggatgtagtttggttttatggttaaaagtaaaggttttgggattagaaagatatggatttagtttttaattttatattatttattaagcgtgaaagattcggataagttttattttttttagaattttaattattttatttgttaaataggattattaatatttatattttagattaagttaaataattattgtaagtatatggtgagtgtttaaaaatgtaggtgttattattattattattgttattagtattattaatatgaatatgattgtagttattatagtattagtttttttatttttaggtacggtcgtatttttattatttttttaggaatagtgtggtaagtagaagagtggttagaacggtgtagaggtttgagttgtggtattcggcgtgattttttattttcggtcgggtttcggtgatagattcgtcgtttttattttgtaatttttcgtcgtagtgagacgttgtttcgttgttggtcggttcgagttttttttttagcgtcggttttatttttttatagttttgtatgaggcggttgatattttcgcgttcgatttgttattcgggtttttttagttgtttttttaattgtttttttttgttttgtttatggttgtgtttttttttttagcgattgaagtttcgtatcgggtcgggtcgggttttcgaattcggagagttggtcgttttgtttattgcggcggcggcggcgatagttcggattaattttagatacgagatatttaaggttagatttacggaattagtatgggataaacgtatagaggcgtatgcgcgaatttagaagttcgttttcgagtttttgaaatcggggtacgcgttaatgacgttaggaaaaggagggttgtgattggcgaattggtttttgttgggaggggtagtttggggaaacgggggcgtagtattttacggaagggggcgagttgagtcgagtcgggagtacgtcggttttttaaaaaaaaacgtatgcgtattgttgttgttattatggtgacgttatatattgattttttaagggttattaatatatttgttttaggtttaattttgttaagcgttcgtgagtatgtgtgtaaatatatataatttgtgaatgaaaattgtgattttcgttttgtatttttcgggttaacgagttaaaagatttgtttagaagtaaatagttagttagtgatttttgatttttatttatggtggttgtatttttttaggaataaaaatgaatattttatattttttttatgtttttttgggtttttttttttttttgggttttttagattttagttgtaatagtaaggaaattggaacggaattaaattgaatttgttttaaaatgtttttatggagataaaatgataattaaacgtaaggaggtaggtaatagaggtcgggtacggtggtttacgtttgtaattttagtaatttgggaggtcgaggtgggtggattatttgaggttaggaggtcgagattagtttggttaatatggtgatgttttgtttttgttaaaaatataaaaattagttaggcgtggtggtgtatatttataattttagttatttgggaggttgaggtaggagaatcgtttgaatttcgggggcggaggttatagtgagttaagatcgttttattttattatagtttgggtgaaagagtgaaatttcgttaaaaaaaaaaaaaaaaggaggtaatagaaaagttattgtaagttggatatttaagtgaattggtttttaatgaattgaattttttgatatatttatttatagtttttaggaaaatatcggatgtgggtgggagagtttagttgtagtaaaggagattggaaaattgagtttaaagtttataggtagaattttgggtttttaaattttttttttaattttatatatttagattattatttttaattttatgtttattttttaaataagatatggtttattggaagggagtgaggataggaggtgaataagagaatttttatatttaggaatattagatgtggtagatagtaaagtttaataaggagtgattatatgaaagtgtatatatatttttaaaaaattaaaaatagaattttacgtgagttagtaattttatttttgggtatgtatagttaaaataatcgaaagtagggttttagatatttgtatatcgtgtttattatagtattatagttaaaatgtggaagtaatttaggtgtttattaattgatgaatgagtaaataaaatataatatgtatttaaaatggaatattatttagtttttataaagaaggaatttttgatatatgttataacgtggataaattttaagaatattaagttaagtgaaataagttagttataaaaggataaatattatatatggttttatttatatgagaaatttagagttgttaaaataatagagaaagtagatttgtggttgttagggatttaggtaattagggggttattgtttaattagtgtagagttttagtttggtaagatgaaaagagttttgtagattggttgtataataatgagaatgtaattaatgtaattgaattgtatatttataaatggttaaaatggtaaattttatgtgatgtgtattttattatatatgtatattatatatgtatatttatagaacgataaggtttttagttataatttattttttttttaaaattgtaggagttaggtatatatgcgttttaggtaagaaattggaaggtttaattttaggaaaattgaatgtttaagagaaagattttaataatatttaggggttaggtacggtggtttatagttataattttagtattttttgaggttaaggtgggaggattgtttgaattcggaagttcgagattagtttgggtaatatagtgagattttgtttgtattaaaatttaaaaaaattagtcgagtttggttgtatatatttgtagttttagaaattagggggttaaggtaggaagtttatttgagtttatagaagttaaggttgtagtaagttttgatattgttattgtattttaggttgggtgatagagttagattttgttttaaaaaaaaaaaaataaaaataaaaataaaaagagagagaaagaaaaaagatattttggtagtagttaaataaatgataatttattaattattttattgttttttagtgaaatttattagttaataagttttttatttatttatttttatttagttttatttttaaatatgggcgaataattaaagattaataaatattttaggaaattttttaatttaaaagttgtaagttaaaattagtaaattaatgtagagagtaaaataggtttttaaaaaaaaattattattaatatttttaggaaaataaggttttatatttaagaaataaaaatagggaatatttagagaataaaataaaattttttatagaagttattttgtttgttaaataaattaaattgttaatatacgatagtggaaaatttaaattttagttataagaatttaatattatattttaaagttattaggatttaataatttgtgatgaaaatagtttatatattgattatttaaagtgatagttttatgatggtttttatgtttagttgttttaatatttttttttttgtagaaatgatttttagataggtttttaattgtgatattgaggatattaaatatgttttaatatattttaagattatattttttattgttaattaatatttataaagattttaaagaattaaaaaaaaaaaaaaaaaaaaaaaaatttggaaatgcgtttggtaattatggttattgatataaatagaggtaatattttataggggagggagcgtttatattaaaatttaaggagaaaatgtaatatttggttgggtatggtgggttatatttgtaattttagtattttgggaggcggaggtaagtggattatttgaggttaggagttcgagattagtttggttaatatggtgaaattttgtttttattaaaaatataaaaattagttaggcgtgttggcgtgtgtttgtaattttaattatttaggaggttgagttaggagaattatttgaatttgggaggcggaggttgtagtgagttaagatcgtattattgtattttagtttgggtgataagagagagattttgttttaaaaaaaaaaaaaaaaaaagtaatatttgtagtttattatatattgatattttatttaatattatttatcgtttagtttttatttgtaagtttttaatagtttattattataattatttaaattgtatgttttaaaaattttgaaaagattattatatttttttagtgttttaaaatttttttaaaagattatttggttgagtaagataataatggtagtgatgagtataattattgttcggatgttagtttgtaaaattattttttttaattaaatgatttagagttttttgaagaaatagttaattttagggttgatataaagaaagtataagaaagttggaatattttgaagtgttagaaaataagaagtgtttaaagaattatgggaatgaaaagtatagttttattttttgatttaggtgataggtatgaggatatttgtttaataatagtttaatagattttatatttgttttatatagttttttatagtggaaaaaaaatagaatatgtaattttaaaatatgtttttttgataaaaaattattttttagttaaagataattaagaagtagtaaatataggaagagttttttttatttttttatttttttgtttaaatagaggatataaattgttttttattggaaataattttagttgttatagtagtttagagatagtattagaggaatttgtaaattaattttattttattagtttttttatatatatttattttttacggttttttatatttggaagtttaaaattgttttttttttttttgttatttttttataagtgtattgttttttgttgaagatgttatataagttagaatttttagttattgttttgagttattttttattgaagttatttttatgtgatgtatattgtatatattattaaatttttttattttatttttgttaatttgttttttgttattgggttttgttttaattataattttatgaggttagaggaaaaattatatttttttttttcgttaataataggaaaataaggttttatatttaagaaataagaatagggaatatttagagaataaaataaaattttttatagaagttatttttgtttgtgatataaattaaatttttaatataaaatagtggaaaatttaaattttagttataagaatttaatattatattttaaagttattaggtgtattatgttttttaataaaaatgatttaaaatataaaatgtttataataaaaagttatgttaaattggtattgagtaaatatatttaaatatagatgtttttaaaaatataattttgattagtattttatatgttatttagataatttatttgttaaaatattaataatttatgaaagaatattgtttattgtttttaattgagtattagtagtaggatagttttaattggatttttacgttatgtattttataagggttttaaaattaattttagtaaatgttagttttagtgttttaataatgttttaatagttaaaaggtaattgtattatttttggattatataatatttttaatagtttaaaaattgt

SEQ ID NO: 557 - DNA, 9499 bp, Artificial Sequence
  chemically treated genomic DNA (Homo sapiens)
tgtttaatttatttatttttatgttattttataaattttttaatttattattaattttttttgttgtttgtgttttttggtgttatagttaaggaattattgttaaatgtaatgttataaagttttttttttttgtttttttttattagttttatagttttatagtttttaattttaatttttaattttaattttattttaattttagaaaatttattttaagttaatttggatatattgtataagataaggattttattttatttttttatatgtggatatttttttttttttggaaatttttttttttagtaattttattatttttatagttttagtttagatgttttttgttgttgttgttgttttttaggggtgattaaatttatatatttagtttttattatttttttgagttttagtttttttatttttaaatattattgaaaatttagtttgattaagtatattaatttattatgtgaagaaatattatgttttatttttattacggtgtggtttaatgagttaaagtaatatattaagatagatataataatttaagaaattggggtttagagaagtaaatattattagggtgtattttgcgttgttttagagtgaggtatatagggttttggggatagaataatttagtttttgataatgtttttttttatagtataggtatattttatgagttttttttattatttaggtgttttagtttggatgtggtttgtttggtttaagttttatgttgaaatttgatttttagtgttggaggtggcgtttggtgggtaatgtttggattatgggggtatattttttatgaaaggtttgttgtttttatggtagaagtgatttagtttttatttttagtttttaagagaattgtttgttgaaaataaatttgtattttttatatgttttttttttagaagaggatttaaggaaatttataataaaagtagaggaacgttgaaattaaatttaatttatattagtaatagttattatttgttaagtttttataatgataagtaagatgttaagttttttatgttattaggattattttatttattttataagaattttagaatataggttttattattatttttattttattcgtgagaaaagtagagatttagaaggtttaagttataggttaaggttatttagttagttgaatggtggagtggggaatatttggatttaggtagttagattgtttttttttgtttttttttttttgagacggagtttcgttttgttatttaggttggagtgtagtgtcgtgatttcggtttattgtaagtttcgttttttaggtttacgttatttttttgttttagttttttaagtagttgggattataggcgtttattattacgttcggttaattttttttttttttgtatttttagtagagacggggttttattatgttagttaggatggtttcgatttttagatttcgtgatttgtttattaggtagttagattttattagaatatgtatttaaaattagtaagaaggaatgagaataataataataaaattaaaaaatgtttgttaaagaaaattaaaataatgtgtaatatttagttttgagattattagtagtgaaggtaaagaagaatgtataatgggtttttatagtttttattgttcggttatagaaaatatttttatattagtataagtatttttttttttaagttttgagttttgagagtttattaagaaggtttttgagtttatttaattaatggtattatttaaggttgtttaataataaatgtagaggtagtttatataaggaatttttgtttttatttttgagataaagtttagggttttacgttaggagtatagttttttaaatataagtttttagggtagaagcgaggggaggatggagggatataatgtagatttatagtttggtgggtacggtttttgttttttttatgtttattgttatttttgaggtttaagtttttattgtattgtttggtttattgtataatttaatttggttgtttgtttttggtttttttttattaaattattttttatattgtttttagtttaatatttttaagatattgtatttgtaaatttatttttttgtttaaaaatgttttagtgatttgtaatttgtttatagtgtgaagtataaatttattagtttgttgtttaaagttttttataattagatttcgatcgatttttacgttttattgagaggtgatagtttgttggtagttttcgtagttttggttcgtttttggcgttttttcggttttggtatttattttggtcgcgtttgaggagttttttagttcgtagttgtattgtaggagtttttttttgggttggttaaggtcggagttagtttttttagtttgtagggaggtgtggagggagaggcgtaggcgggaatcggggttgcgttcggcgtttgcgggttagcgcgagttttcggtgggcgtgggttcggcgggtttcgtaatcggagtagtcggttcgttagtttcgggtagtgaggggtttagtatttgggttagtagttgtcgtgttttatttttcgtcgggttttagttgttttttcgcggggtagggttcgggatttgtagtttattatgattgagtagttcgttatgattgagtcgtttgtcggcgttttagttatgggtttttacgcggtcggagttttttcgacgagcgtcgttttttaattcgcggtgtttagttttattaatttttaaagggttgaggagtgtcggtgtatagcgcgggattggtaggtagttttatttgttgttcgttgtcgtatttatttggtgaagttagttgagtttttaagtttagtggggatttggagaatttttatgtttagttaagggattgtaaatatattaatgggtattttgtatttagtttaaggtttgtaaatatattaattagtattttgtgtttagtttagggtttgtgaatgaattaatcggtattgtgtatttagttaatttggtggggatttggagaatttttgtttagttaagggattgtgaatgtattaatcggtattttgtatttagtttaaagtttgtaaatgtattaattagtattttgtgtttagtttacggtttgtaaatatattaatcgatattgtgtatttcgttaatttagtggtgatttggagaatttttgtgtttagtttagggattataaacgtattaattagtattttgttaaaacggtttaattagttttttgtaaaatagattaattagttttttttaaaatggattaattagtaggatgtgggtggggttagagaagagaataaatataggttgttttaagatagtagtagtaatttattaggatttttttattatagtatggaagttttgttttttttgttttttaggtttgtattgtttttatgagttgtaatatttattgtaaatgtttgtagttttatttttgaagttagtgagatatacgaatttatcggggtgaattagtaattttagtatatgtcgttttaaaagttgtaatatttaggcgaaggtttgtagttttatttttgagttagtaagattataaatttattagaaggaaaaaattttaaatttatcggaatatttgagggaataaattttagatatatcgtttttaaaaattaatatcgcgagggtttgtagttttagttttgcgttagtgagattaagaatttattaattttggatatattattaattttgtttttttaagggtgttttttaaattggatgatgtatattttaggagtgtgtgtgtaggatggggtttgaagtagtagggtaaaaaatttagtatatattttattttagaggtgttaatttattagataatagttattttaaaatttttttatgtaaaaatatgttatagggtggaatgtaatatttttatgggtttgtgggttatttgtatatatttttggagaaatggttatttaagtattttgtttattaattttaaatttaaaattaagattttaaagtttttttaaggattttgttgggttatattttaagattttgaagggtattatttattcgttttttttaaattgtcgaagtcggaagtaggtgataaaaaagttgattttggaattattttttgtaaattttttatttttaagtttttcgatagtttgtaatattggtttttttttttaaaagttttttttttaagttttagtaattttttttgattttgttgggaaggcgtattaattatttgttattttaggaaagtttatagtataagatgattttattggttattttttagaattagattttttgaaaagtttttaaggattagttagtttaattttttattgaataaaggagaagtaaagtttagggaggtgaggtgattcgttgtttttttaattagtaggtgagtttttggtagggttggggttttattttttgggttttttgtaaggtcgtgttcggtacgggttaggaataattttataaattcgttatttagacggtttttgattgatattattttttcgtgtggaggagtcgttggggtgtacggggtaggtgtcgttcgttttaaaggtaaaataatttagttgtagatttttagaggtcgattagagtcggggttagaaaataggttttttttttcggggatagcgtttaggggatcggtattagaatatcggttgatgttttatttggttagggaattatttagcgtttagtatatttggcgttaatcggcggggattaattttatatttcgtagttggcggaaagtagcgggaggaggtatttagttttggggttgagattttagttttcgcgtgcgtaaattacgtttttgtagattttcgttgttgcgtgttcgcgcgcgtttcggagtgcgtatgcgtagcggcgggggttgtttcggttgttttttattgaggggattcgttagtttttaatttagtggcgtttgttttgattttcggggtttggtttttagcgtagtaattttgtcggcgaagaaggtgagcgtagtgttgtgtggtagtagagttttttaggacgaggagtagcgggacgaggaagggtagattggtgaaatcgtaaattgggcgtttgtttcggcgtcggatttttatttgtaaaggtgggtggttcgttcggagcgggaaaatatttcggaagtggagggtcgggttagcgtgattgataagcgggaatttttgtgtggggacgggtaggtttaggaaggttgtgtttgcggtggaattgggcggtgcgtagaagtgggtattaatagtagtcgcgtgtttgggttttagatttggtttagttgtgttgagttttttatggattattttacgtagataagatattgtaatagtgagtgagcgtttgtaatttatttgttttttacggaaattgagttttagcgatgttaattttagtaaggatatagttgggattttaaatttggtaattagagtttagagtcgataaagttagttgtatgagtttagttttttttagggcgggaatcgaggcggagtagggtatagtacggaggttaggaatgagtgtatttgattagattgttgacggaagtgttataaaaatggatttaaatgttgataagtagttgtttgggttttatatagggtgcgagtttaggatgtacgttggaggggatatagggttagagtaaggtgggaatgcgggtattatgggttaggttattttttagttggtggagtatcgtagtattgtagtgtgtggttttggtttaatagtagtgcggaaaagttttttttttggggttgtggtgttttttaggtgtgtgaagttaaaatattttagggttatacggtagatagtatttgttatatagttgttttggttagtttcggttgttatgataaaatattataaattgggtggtttagatatagaaatgtgtttttttatagttttagaggtttgggatgtttaagattaatgtggggaggatataattgagtttataataatagtttgtatttagtaatgagtgataattggggattgaagaaaatgaatacgttaagaattaatatgtttttgaagtgtttttataattttaatttcgttttatgagcgtgagttttgttgttttggtgtgtgttttggtattgggaggtgatggttgttttttatatagttaatttgaagagggttgaataagttattgtaaatgtttttaatagggtttagtgaattcgttatatttagatttatttaaatttttatgatttagtttgtgttgtttttggaataatgagatttataattattattgatggggaagtgaaataatatttacgttttttttgtattgtttagtgttgttattttagagtttggtaattaagtttgttttttttattttatttattttggtgggaggaaaagtgaggagatagaaagttttaggtggtttgggggtttggtagatgtggtttaaattttgagtttaagtatttgttgagtgattttgggtaagttatataagtttattgagttttagtttttttttttataaaatagagtttataaaaatattatatagggtttttgtggggttatttgaaaacggtttgaaattattaaagaattggttatttaattaataggtatttaagttatgggattttcgttatttagtttcggaagagaaatttttatttatagtttcgatgtttggttggttatttattcgtttattagatttttgttgaatgtttatgaggtgtcgaagtatttagttttgagttttggagttagagaagagtaagatagataaggtttttttatttatggaacgtatattttagtgaggaagaataaataggtttagatggtgttaagagttatgaataaattaaatatagagtaatgtgattttttaaaagtgatttagagtaagttagggggtgaggagtgggggtggtgtttgattattgtttagcggttagatagtcggagaggtttttttgaggaggtgagttaaagtttggatattgaggaggattttttttttaggttaaggggagtagtaagtgtaaggttcgagttgagtagatgaggttgggagtttgattagttttaggttgattagtgttttgttttgagaggagttgttggttagttttttgttttgggatttagaacgaggagatatgaagattttttatttggtagtgggagttgaagttgaaaggtttaggggttgatgaggttacgtgtaagcgaaagtttgggataagtagaaatcgagtgcgttgagggagtgagattgtggttgtattcggtatttggttgagtaggagagtgaatttcgtgggtgtgtgtttgttggtgacgtttttggagttgttttgaagttcgagttgttttgtagtttgtagtttgtttttgtttttggtttttttagatagttttaatttttatttttagtttgtgaatttttttttagtgaatttttttttatttatgttggatattttttgtaatcggatgagttttattaaagtagagttatttggatttggattcgaatttttggttttttattttttagttgtgattttgagtaattatttaatttttgtaagtattagtatttagtagttgtatttttatagtgttgtatagattaaatgagataataaaagtaaaagattattgtagagtgtttaatatataggaggtatttaaaaatttgttaggtattttttttttttttttttttatgtgttaaagtttttttagtatatattttttttttaggattgaattgtaaattatgttttttgattattttttttgtaataatttttttatttttgtagttatgtttttttttttttatttttttttgtttttagaatgtttaataaaatagttaaatatatttttgtgaagatagagggtaaaataatgttagttttgtgagttttttttttttgtgtaaatttataaattgttattaatttgtagttattttaattgtttttaaatcgaagagtatcgtggtaattattttttttttcgtaaatagagtgatattattattagttttattgaggttaaagttataaagatgggttttcgatttattaatattagtaaaatgggtttgggatttattaatatttgtgtttagaagagatagatttggtaaagagtttggagaagtgagttttaaagagagaggtgtgggaattaggatggaagagttaggtttttagatagcgtttatttttttttttttttttgaattattgttttagagataattaggtttaggagaggagaaaaaaaaagatgacgttaacgtggagtagagttttttttagattttagtttagtaaggaaagagaaatgtttggttttagtattgggaagttgttttagttagagtttcgtggttgtgaagagagtttttttgtttggaattaaatagaaagtttataggtttagaggttagaaaagttagtaggtggtggttttgttcggtgttggaaatggaggttaggatgaattaagaagtaaattaaagatatttgtaagataaggacgtgtaggtcgggtgcggtggtttacgtttgtaattttagtatttcgggaggttaaggcgggcggattacgaggttaggagatcgagattattttggttaatacggtgaaatttcgtttttattaaaaaaaaaaattagttgggcgtggtggcgggtatttgtagttttagttattcgggaggttgaggtaggagaatggtgtgaattcgggaggcggagcgtgtagtgagtcgagattgcgttattgtattttagtttgggcgatagagtgagattttgtttcgaaaaaaaaaaaaaaaaagatagggacgtgtatgttaatttgcgttatttaaataataagttgtgtttatggttttttgtttgtgcgttatgattttttaggattttataacgggataaagtgaagtagtttcggtttgtgaatgtgtattgtagagacgtgggagaagaaagttgtaaaagttattataagtaatatttttgattttaggggtgttggtttgtgagaagagagttttaagttttttgtagaggtattagaaaggtatcggagttacggtgaaatgtaggggagattgggtttaggggtttttttggtttgtattttgttatagtcgttaaatgtcgttagatggagtgcgtgattttggtatggttttacgtggatttgttgcgaaggatggagagaatatggtttttgttttttagaaaaaaggagaaatttggtaataagtgtggagattgtttttaaataatgttttagattttaagttatttttttttggattatgagagagttttttaatgttgtatttattttttttagg

SEQ ID NO: 558 - DNA, 9499 bp, Artificial Sequence
  chemically treated genomic DNA (Homo sapiens)
tttaggaaaaataaatataatattagggagtttttttatggtttaggaagaagtggtttgaaatttggagtattatttaagagtagtttttatatttattattaaatttttttttttttttgggaagtagagattatgttttttttatttttcgtagtaggtttacgtgaggttatattagaattacgtattttatttagcggtatttaacggttgtagtagaatgtagattaggaaagtttttaaatttaattttttttgtattttatcgtggtttcgatatttttttaatgtttttataaaaggtttagagttttttttttatagattagtatttttaagattaagggtgttgtttataatgatttttgtagttttttttttttacgtttttgtaatgtatatttataagtcgaagttattttattttatttcgttgtgaagttttggaaaattatgacgtataggtagaggattataagtatagtttgttgtttggatagcgtaagttaatatatacgtttttatttttttttttttttttttcgagatagagttttattttgtcgtttaggttggagtgtagtggcgtaatttcggtttattgtacgtttcgtttttcgggtttatattatttttttgttttagtttttcgagtagttgggattataggtgttcgttattacgtttagttaatttttttttttggtagagacggggttttatcgtgttagttaggatggtttcgattttttgatttcgtgattcgttcgttttggtttttcgaagtgttgggattataggcgtgagttatcgtattcggtttatacgtttttattttataagtatttttagtttgttttttagtttattttggtttttatttttagtatcgaatagagttattatttattaatttttttggtttttagatttatgagttttttgtttggttttagataggagagttttttttatagttacggggttttggttggaatagttttttagtattgagattaggtatttttttttttttgttaggttaaggtttaagaaaaattttgttttacgttgacgttatttttttttttttttttttttgaatttaattatttttgagatagtgatttaaggaagaaaggagaagtaaacgttatttggaggtttgatttttttattttggtttttatatttttttttttggaatttatttttttaagttttttgttaggtttgttttttttaagtataaatgttagtaagttttaaatttattttattaatattagtagatcgagagtttatttttataattttggttttaataagattagtgatagtgttattttatttacgaggggaaaggtagttgttacgatgtttttcggtttaggggtaattaaaatgattatagattggtggtagtttatggatttgtataagaagagagaatttatagaattagtattattttattttttgtttttatagaggtatatttggttgttttgttagatattttggggataagaaaaaatgaaaaaagaaaaatatgattatagaggtagaggaattattataagaagggtaattaaaaaatatgatttataatttaattttgagagaggggtatgtattgaaaaagttttaatatatgaaggaaaggggaagaaaggtatttaataaatttttgagtattttttatgtgttaaatattttatagtggttttttgtttttattattttatttaatttgtataatattataaggatatagttattggatattgatgtttatagaaattaaataattgtttaaagttatagttaaaaagtggaaaattagggattcgaatttaggtttaaatgattttgttttagtgaagtttattcggttgtaagagatatttagtataagtgaagggaggtttattgaagggaggtttataaattgagagtaagaattgaaattatttgggaaagttaaaaatagaggtagattataagttgtaaggtagttcggattttaagatagttttaggaacgttattagtaaatatatatttacggggtttatttttttgtttagttaggtgtcggatatagttataattttatttttttagcgtattcggtttttgtttattttaaattttcgtttatacgtggttttattagtttttggattttttagttttagtttttattgttaagtaaaaagtttttatgttttttcgttttgaattttaagataaaaagttgattagtagttttttttaagatagagtattggttagtttgagattggttaggtttttagttttatttatttagttcgggttttgtatttgttgttttttttggtttggagaaggagttttttttaatatttaggttttggtttatttttttagagaagttttttcggttgtttggtcgttggatagtggttaaatattatttttattttttattttttagtttgttttaagttatttttaaaaaattatattattttgtatttaatttatttatagtttttagtattatttgaatttatttatttttttttattggaatatacgttttataaatagaggaattttgtttgttttgtttttttttggttttaggatttagaattaggtgtttcgatattttataggtatttaataaaaatttgatgaacgaatgagtagttagttagatatcggggttgtaagtgaaggtttttttttcgaggttgggtaacggaggttttatgatttgaatatttattagttaaatggttagttttttaatggttttaaatcgtttttagataattttataaaaattttgtgtggtatttttataagttttattttatagagaaagaaattgagatttagtaaatttatatgatttgtttaaggttatttagtaagtgtttgaatttaggatttgaattatatttgttagatttttaagttatttgaaattttttatttttttatttttttttttattaggataagtgggataaaaaagatagatttggttattaaattttagaatgataatattaaataatatagaagaaacgtaagtattattttatttttttattagtggtaattatggattttattattttagaagtagtataggttaaattatagaggtttagataaatttgagtataacggatttattaagttttattaaaaatatttgtagtgatttgtttagttttttttaggttggttgtgtggaggataattattattttttagtgttaaggtatatattaggatagtaaagtttacgtttataaaacgaggttagagttgtgaaagtattttaggaatatattagtttttaacgtgtttattttttttagtttttaattattatttattattgagtatagattattgttgtgggtttagttgtgttttttttatattgattttggatattttaagtttttgggattgtgagaaaatatatttttgtgtttaagttatttagtttatggtattttgttatggtagtcggggttgattaagataattatgtggtaggtattatttatcgtatggttttaaaatgttttaattttatatatttggaaagtattatagttttaagaaaaaagttttttcgtattgttgttaagttagggttatatattgtagtattgcggtgttttattagttggaggatggtttggtttataatattcgtatttttattttgttttggttttgtgttttttttaacgtgtattttgagttcgtattttgtgtggaatttaaatagttgtttattagtatttaagtttatttttatgatattttcgttaataatttggttaagtgtatttatttttggttttcgtattgtattttgtttcgtttcgattttcgttttgggggaagttagatttatgtagttaattttatcggttttgggttttgattgttaagtttaggattttagttgtatttttgttaaagttagtatcgttggggtttagttttcgtaagagataggtgggttataagcgtttatttattgttgtagtgttttatttacgtaagataatttatgaaaagtttaatatagttgggttaaatttaagatttagatacgcggttgttgttaatgtttatttttgcgtatcgtttagttttatcgtaggtataatttttttaggtttattcgtttttatataggggttttcgtttgttaattacgttggttcggttttttattttcggaatgttttttcgtttcggacgggttatttatttttgtaaataggggttcggcgtcggaatagacgtttagtttgcgattttattagtttgttttttttcgtttcgttgtttttcgttttaaggagttttgttgttatatagtattgcgtttatttttttcgtcggtagaattgttacgttgaaagttaggtttcgggaattagggtaaacgttattgagttagaaattggcgggtttttttagtgaaaggtagtcggaataattttcgtcgttgcgtatgcgtatttcgggacgcgcgcgaatacgtagtagcgagaatttataggggcgtggtttgcgtacgcgggaattgggattttaattttagggttaggtgttttttttcgttgtttttcgttagttgcggggtgtgagattaattttcgtcgattagcgttaggtgtattaagcgttggatggttttttgattagatgaaatattagtcgatgttttaatgtcggttttttgggcgttgttttcgagagggaaaatttgttttttgatttcggttttagtcggtttttggaggtttgtagttgggttattttatttttgaaacggacgatatttgtttcgtgtattttagcggtttttttatacggagagatggtgttagttaaaggtcgtttagatgacgagtttatgaaattgtttttggttcgtgtcgggtacgattttgtagagagtttagaagatgaaattttagttttgttaggagtttatttgttaattaggaggataacgaattattttatttttttagattttgttttttttttatttagtgagggattggattagttggtttttgaggattttttagaaagtttggttttgggagatgattaatgggattattttatgttatgagtttttttggaatgataggtaattggtgcgtttttttagtagggttagggagagttgttgggatttgaaggaaaggtttttggggagaggagttagtgttataaattatcgaaaagtttggaggtgggaaatttataaaaggtgattttagggttagtttttttgttatttgttttcgatttcggtagtttggagagggcgagtaagtaatattttttagggttttgggatgtggtttagtaaaatttttagagggattttgaagttttagttttaagtttagaattaatgggtagagtatttaaatagttatttttttaaagatgtatataaatggtttataggtttataaaaatgttgtattttattttataatatgtttttgtataaaaaagttttaaaataattgttgtttggtaaattgatatttttggaatagaatgtatgttaggttttttattttattgttttaaattttattttatatatatatttttagggtgtgtattatttagtttaagaagtatttttggagaaataaagttgatagtgtgtttagaattgatgggtttttggttttattaacgtaagattgaagttgtagattttcgcggtgttagtttttaaaggcggtgtgtttggagtttgtttttttagatgtttcgatgggtttggagttttttttttttggtgggtttgtggttttgttggtttaggagtgaagttgtagattttcgtttgagtgttatagtttttaagacggtatgtattggagttgttagtttatttcggtgggttcgtgtattttattagttttaggagtgaagttgtagatatttgtagtgagtgttatagtttataaaggtagtgtagatttaaaaaataaaaagaataaagtttttatattgtggtaagaaaattttagtgagttattgttgttgttttagggtagtttgtgtttatttttttttttggttttatttatattttgttgattggtttattttagagagagttgattggtttgttttatagagagttgattgagtcgttttgatagggtgttgattggtgcgtttataatttttgagttagatataaaagttttttaggttattattagattagcgagatatatagtgtcgattggtgtatttataaatcgtgagttagatatagagtgttgattggtgtatttataaattttgagttagatatagagtgtcgattggtgtatttataattttttagttagataaaggttttttaagtttttattagattaattagatatatagtgtcgattggtttatttataaattttgagttagatatagggtgttgattggtgtgtttgtaaattttgagttagatatagagtgtttattggtgtatttataattttttagttagatataaaggttttttaagtttttattagatttaggaatttagttggttttattaagtggatgcggtagcgggtagtaggtggagttgtttgttaatttcgcgttgtgtatcggtattttttagttttttgggggttgatgggattgggtatcgcggattagggggcggcgttcgtcggggaggtttcggtcgcgtaggagtttatggttggggcgtcggtaggcggtttagttatggcgggttgtttagttatggtgggttgtaggtttcgagttttgtttcgcggggaggtagttaaggttcggcgagaaatggagtacggtagttgttggtttaggtattaaattttttattgttcggggttggcgggtcggttgtttcgattgcggggttcgtcgagtttacgtttatcgggaattcgcgttggttcgtaagcgtcgagcgtagtttcggttttcgtttgcgtttttttttttatatttttttgtaagttgagggagttggtttcggttttggttagtttagaaaggggtttttatagtgtagttgcgggttgaggggttttttaagcgcggttagagtgggtgttaaggtcgaggaggcgttaagagcgagttagggttgcgagggttgttagtaggttgttattttttaataggacgtgaaggtcggtcggggtttggttgtagaaggttttaaataataagttaataaatttatattttatattgtagataagttgtaagttattgaaatatttttaaatagaggagtggatttgtaaatgtagtgttttggaaatattaagttggaagtagtgtgaaggatggtttggtggggagagattagaagtaagtagttaagttgggttgtgtagtaaattaggtagtgtagtagaggtttggattttaagagtgataatagatatggagaggataaaggtcgtatttattaggttgtaaatttgtattgtgtttttttatttttttttcgtttttgttttggaggtttatatttagagagttgtatttttaacgtgaggttttgggttttgttttaaaggtaaaggtaaaagttttttatgtggattatttttgtatttgttattaaatagttttagatgatgttattaattgaatgaatttagaggtttttttgataaatttttaaaatttagggtttaggaagaaaagtgtttgtattaatgtagaaatattttttataatcggatagtgagagttgtagaaatttattatgtatttttttttgtttttattgttagtgattttagggttaaatattgtatattgttttagttttttttggtaagtattttttaattttgttgttgttgtttttatttttttttgttaattttaagtgtatgttttaataaagtttgattgtttggtgggtagattacgaggtttggagatcgagattattttggttaatatggtgaaatttcgtttttattaaaaatataaaaaaaaaaaaaattagtcgggcgtggtggtgggcgtttgtagttttagttatttgggaggttgaggtaggagaatggcgtgaatttgggaggcggagtttgtagtgagtcgagattacggtattgtattttagtttgggtgatagagcgagatttcgttttaaaaaaaaaaaaataaaaaaaaatagtttgattgtttggatttagatattttttattttattatttaattggttggatgattttggtttatgatttaagttttttgagtttttgttttttttacgaataaaataaagataataataggatttatgttttagaatttttatgagataaatgagataattttggtaatataaagggtttaatattttatttgttattgtggaagtttaataaatggtagttattattgatatgaattgggtttggttttagcgtttttttgtttttattataaatttttttagatttttttttagaaggagagtatgtaggaggtataagtttgtttttaataagtaatttttttgggaattaagagtgagaattgagttatttttgttataagggtagtaagttttttatgagggatgtatttttatggtttaaatattgtttattagacgttatttttaatattggaaattagattttaatatgagatttaggttaaataaattatatttaaattggaatatttaggtagtgggaaaggtttatgaaatgtgtttgtgttataagagaaaatattattagagattagattgttttgtttttaaaattttatatgttttattttggaatagcgtaagatgtattttaataatatttatttttttgaattttagttttttggattattatgtttattttgatatattattttagtttattaagttatatcgtagtgggggtgggatatggtgtttttttatataataggttgatgtatttagttaaattaaatttttagtggtgtttgaaaatggggggattagaatttaggaaggtggtaaaagttggatatatggatttgattatttttgggaaataataataataataaaaaatatttaaattaaagttgtggaggtagtaagattattgaaaggaaaagtttttaaaaggaaggaggtatttatatataaaagaatgaagtaggatttttgttttatataatatatttaaattaatttaagatggattttttaaagttaaaatgaagttaaaattaaaaattaaagttaaaagttataaaattataaaattggtagaagaaaatagaggggaaaagttttatgatattgtatttggtaatgattttttggttatgatattaaaaagtataggtaataaaaaaaattggtgatgagttgagggatttgtaaaataatataaaaatagatgaattggata

SEQ ID NO: 559 - DNA, 5756 bp, Artificial Sequence
  chemically treated genomic DNA (Homo sapiens)
tcgggttaaaattataattttagggtttcgtttaaggtttatatatattgtgtttgttggggttattagatattataaatatgtgtgagaatatgtgtgttgtttttggaagtttttttttttttatatttataattttatttatagtttttttagaatgtttattttagtttaatgatgttaaggtttttattgagtttagattcgttttaatattttttaaaatttaaatgcgtgtgtttgaaaaaaatagttttagttgtatttatatatagtgtttatagtgtggatattgattgtttatattggttgtaattagtggaaaatattaggttggggttggggattatggattaatatggaagtgaaagtattgtaaaaaatttgtagatataatattttttttgtttaaattataaaattttgttaaggttttggtgtagttaaaagagaaaagtgaaaaggattatagggaagaatttttttgttttaatttgagtttggagtttgagaattatttgtcgaaggatggcgataatgtttaggtgtgattttagtatagattgagattttgttggggttttgggttgttgagttttgatcgtagtttatggaggaggtaaagatgggagtatggttatgaaggagatatagagtaacgttttagtagatggtttttagttttgtagttaagaatggtagggaaggagagtataagattgggttggggtagagaaggttatttttttagggataggagttattagtgattttgagttagttggagggtttttgtttttttttagttttttaaatcgttttgggtgttgtatgtaaagttatcgtttgggttaggatatatgggtagagttgttgtattcgttttttttttttttggatagtggttacgtttttggaggatatatttatggtttttttagtattgttgtaaagattttgggtattaatttgttattagtgggttgataaagtttttttgtagttaaaaattaaatttttattattagtgttttagttattttgtagttggttttttatgtattgggatattgtgtttttggagatagttatattttatttgtttattttgttgaggtttataaatgttattatttagaagttttttatatttattggggttatagtaggatatagtttgttgttggtttagtaggtgatttttttagtttatgttcgggtttcgggttttgagttttatggggaggtttttattattatttattataagttttagagtttttggataaagtatatttgttttaattatgagtttttgtatatgtagttttttagggatcgtagttttttatgttttgcgtggagtaggtgttttttttacgtggtatttttttattattttttttagaattatatttattattgatttagatggaggtttttattttaggatattataatacgagggtgggttaagggagttttatttagtttatcgtttttaagttattagtttttttaagtagtacggtggttttttaaagttatggttattaatgtttttggatgtgttatggatatttaaggtattaaggtttttttaagggtcgttatttttttaatttttaattttatggttattattgttttattataattgggttagacgtattttggtgtttattttggtgattatagaagagttagtttttttttttttttatagataatattatttatatgttttttaataatgagatttttttatattattataggatatttattattttaatattaaatatatattgaataatggattgtggatggatagtaaattacgattttttgaggataattttttaggtttattggtatttagtaggattacgaggtttttgttagattatatttttttattttatatgtagtttttggtaaaagtttttttttttatcggttttaaaggttagttaatattttttatttattttttttggtaggaagtagggattattgttttagaatttatcgagggtgtagttagaggtagtaacgaggagaagaagtttttaaattagagatattaattacgttaggtaaagattatatggaagtgttattattaaacgtggttatgggggagaaaggttttaaggaaaagtgggtgttagttaattttattattagtgttaatatagaagtattgggaagaaagttttgagtgataagatgttagtgttttttatgattggttttgtttggtattttatgtataaatggtttgtggggtagttgtttaatttaggtttggtagtttagagggttgttggaataggatagttttagttagaatttgtattttagattggaaaattggggaattttttgtaagttttgttataggggttgtattttagatataatttgatttgtgtttaaggcgggtaatttaatttttagatattgaatgggttttatggtattaatgtttaaatattagtagtttttataattatagatcgtgttttaaggatgaggaggtagttttttggatgtataggttttaatttaaatgggtttatgacgtcgtagtatatatttagattgtagtttgaagagttggagtattgtatttatagaaagtatttagatatgattatgggtttagggatatatttgtttttcgatgtgtattagtgaaggatggaaatttttatgttttttagaaagtattatttaagtttttgttgaatgtttttttgaaggtttataaggtttgagaggttgtgtaatattagtagtaaagtgaatgtttagatttttatttttttttttgggtggttatttggaaaggttatttttattttgatggttaatgttttagattagtttttggtttagatgattttagataattgtttaagtttaaattgtttattggttaagtaaataggtgatagttatttttggggaattatatgtcgcgtgtatatttagtatttaggagaatttaaaaatgtttgttttatatagtaatagaagtttaggtagtatttatttttatttgggtgttttttaatattttagtttagttaaatggtttttattgttttttatggttagattttaggttttcgggatattgttttagaaatatattttaaatttttttttgtgtgtaggtggtatttttattttaatttttttgtagggtgtatattatgatacgtagttaggttgttttagaggttttaaatatttttttggtgtaggtagtttagtttagttatagttaatgtattatagggttaattgtgttaggagttattgagaatttatagttggttgttgtttgggtttggttagggttgattaaggtagatgagaggtttttttgtggagttttattttaattttatttttttattaaattttttaattgtttttgttattataattatttaatggatttaatagaaagtaatttcggaaattaggatattttattttaaaagatttttaaataggggaagtttatttgtgtacggttgttttttgttatagaagatttgggatagaggattgttgtttgttttttttggttattttgtttagttagaggatttgtaagtattataaaatttaaattttatattgagtttttattattgaagttatgtttttaatttgatttttgattgtggggttattttagagggaattagcgggcgaatttttgttaggaacgtttgttcggatttttggtgattgttggggacgatggtttttagttaatttaatagagaaatttaagtagtttttttttaaatatatatgttttggttgatatgtttagtagagattattataggtttttggaatatttttttgagagaaatttatttaggtttttggtttgttttttaattaggttgtttgatttttgttattgagttgttggaattttttatgtatttagatatttgttttttcggttatgtaggttttgtaaatatttttttttattttttgggttatttttttattcggttgattgttttttttgttgtgtagatgttttagcgttaaatgaagttatatttgtttatttttttttttattgtttgtgtttttggtgttatagttaagaaattattatttatattaatgttaaaagttttatttttttatatatttttagtagtttatggttttagttgttatatttaggtttttaatttattttgagttgatgtttttatatggtgtgagataaagatttaaatatatatatatataaaattatgaggtagtgtatattataaatatataattgttaattgttatttaagtttaagtagaggtggaaataataaatttttttttttttatttaaattattttgtgttattgagttgattttatttttagtttgataaaattattgttttttttattttgatttttataggagattatttattttataattttaaaaatttttttatgaggatggtaagttatttgaattttgaagtgaattattcgttattttattggaatttatataggatattagaatttagatttttagagaatagtaggatttatttttagaaaataagaagtatttgttttttgagtttgttgaattaaagtgtaatttttattttttttggaatgttaaaaagtgaattataatatttaagtaggtgaatttacgagtaatatagtagggttttttttgttattattagttttaatttagtatagatattaaaggtatagatgtatattagtatgaaattgggagaataggagtattcgagtaattttgagattaatgggttttttttataaaatgtatatttttttttattgagattgaggaaggttttttgttttcgagtttttttttagtagagttataaatttaggttggtttttttttttttatatagttgtttttgtttttttttttttaggtgattttagttatgaggattttcgttatttttgttgttatttttttggtggttttgtaggtttaggttgagttattttaggtaagagttgatgaggttgttgtagtttcggagtagattgtagcggatattttagaagtggttgttttttttgtatgggacgaaagtttggttttaaagtatttaggtgagagaggtaggtatgtagagttgttaagtttagagggaaggacgggagagaggttttagagttgggttttagtagtttatgttattgaggtggttttatttagaatttttgggtattgatttttttatttagaaattgaatagagagttaaataaatatgagaaattttatttttttaaagatttgattttaagaaacgtttgtgaaatttattaagttttagatatgaagagatagattagttatttttggatttaaataagtagatttagttgtaaagagaatattttattttatttatagaagagtttttaaaaattgtagttaagtttgaggatatgtttaggtgtgtgtgtgatggggtaggaatgtaaaaatgagagtaaaggagaatgagttttaaattttgagtgataagtattgttttgcgtgtttatttttatcgattgaggttgttcgtgttaacggttgtaatgtagttagtattatttgttagttagtatgtgattttttcgagatttttttttttatttattgttaattttatatttaattttttatgttttttttgttttagg

SEQ ID NO: 560 - DNA, 5756 bp, Artificial Sequence
  chemically treated genomic DNA (Homo sapiens)
tttgggatagggagagtatgagaaattgagtatggagttagtagtgggtaagaaaaagaatttcggggaagttatatgttagttgataggtgatgttggttgtattgtagtcgttagtacgaataattttagtcgataggaataaatacgtagagtagtgtttgttatttagaatttgagatttatttttttttgtttttatttttgtatttttgttttattatatatatatttgaatatatttttaggtttggttgtagtttttaaaagtttttttgtagatagagtaaaatgttttttttataattaagtttatttgtttagatttagaaataattagtttgtttttttatatttgaaatttagtgaattttatagacgttttttggaattaagtttttggagaaataaagttttttatgtttatttggttttttgtttaatttttagatgagaaaattaatgtttagagattttaagtgaagttattttagtgatatagattgttgagatttaattttggaatttttttttcgtttttttttttagatttagtagttttgtatgtttgttttttttatttggatgttttggagttaagttttcgttttatgtaagggaaataattatttttgggatgttcgttgtaatttgtttcggggttgtagtaattttattagtttttgtttggagtggtttagtttgggtttgtagggttattaggagaatggtagtaaggatggcgagggtttttatggttggggttatttggaggagggagagtaggagtagttgtgtggggagggaggagttagtttggatttatagttttattgggagaaggttcggagataagaaattttttttaattttagtgagaggaggtgtgtattttataagagaggtttattggttttaaggttgttcgaatgtttttgtttttttagttttatgttagtatatatttgtatttttaatgtttgtgttaggttggagttaataatgataagaaagattttgttatgttattcgtgggtttatttgtttaaatattatgatttattttttaatattttaaaaagaatagaaattgtattttgatttaataggtttagggaataaatgttttttattttttgaagatgggttttgttgttttttggaggtttagattttggtgttttatatgagttttaatggaatagcgagtaatttattttaggatttaggtgatttattatttttatgaagaggtttttgaggttatggggtgagtagttttttgtaggaattagggtggagaggataatgattttattaggttaaaggtgaaattagtttagtgatatagagtggtttaagtaaaaaaaagaaagtttattatttttatttttatttagatttgagtaataattaataattgtatatttatagtgtatattattttatgattttatatatgtatgtatttaaatttttattttatattatgtagaaatattaatttagaatgaattgaaaatttaaatgtaataattgaaattataaattattagaagtgtatagaaggataaagtttttgatattgatgtaggtaatgattttttggttatgatattaaaggtataggtaataaaagggaaaatagataagtgtggttttatttaacgttaaagtatttgtatagtaaaggaaataattaatcgagtgaaaagataatttagaaaatgagagaaaatatttgtaaaatttatatggtcgaaggggtaaatatttgaatatataaggaattttaataatttaatagtaaaaattaaataatttgattgaaaaatagattaaggatttaaataggttttttttaaaagaatgttttaaagatttgtgatagtttttattggatatgttaattaggatatgtgtgtttagaaggaaattgtttgagtttttttattaagttagttggaagttatcgtttttagtagttattagaggttcggatagacgtttttagtagggattcgttcgttggttttttttggggtggttttatagttagaggttagattggaggtatagttttaataatgaaaatttagtgtaaagtttaagttttgtagtatttatagattttttagttaggtagggtgattaaagagggtagatagtagttttttgttttaggttttttatagtaaggagtagtcgtgtataagtggattttttttatttaaaggttttttgggatgaggtgttttaattttcggggttattttttgttgggtttattaaataattgtggtggtaaggatagttgagaaatttggtgggaaggtgaggttaaagtaaaattttatagaggaattttttatttattttggttagttttggttaggtttaggtagtaattaattatggatttttaatggtttttaatatagttgattttgtgatgtattggttgtggttaagttgaattatttgtattaagggaatatttaaagtttttgggatagtttggttgcgtattatagtatatattttgtaaagagattgggataggaatgttatttatatatagaggaggatttggaatgtgtttttaaagtagtgtttcgaggatttggggtttaattataaaaagtaatgaaagttatttggttgagttgggatgttggagaatatttaggtgagaatgagtgttatttgggtttttgttgttatgtggaatagatatttttgggtttttttgagtattggatgtatacgcggtatgtggttttttagaggtgattattatttgtttgtttggttaatgaatagtttaagtttaaataattgtttaggattatttgggttaagaattggtttgaggtattagttattagggtgggagtggtttttttagatggttatttaagaaaggaggtgggagtttgggtatttattttattgttggtgttgtatagttttttaggttttgtgggtttttagagaagtatttagtaaaagtttgagtggtgttttttgggaggtataggagtttttattttttattggtatatatcggagaataggtgtatttttgagtttatgattatgtttggatgttttttgtgaatgtaatgttttaattttttaggttgtagtttgggtgtgtgttgcggcgttatgagtttatttggattgaagtttgtgtatttagagaattatttttttatttttaaaatacgatttgtggttgtgagggttgttggtgtttaagtattggtgttatgggatttatttaatatttaagggttgagttgttcgttttggatataggttaggttgtatttggggtgtagtttttgtaatagggtttatagggaattttttagttttttagtttggggtataaattttgattagggttgttttgttttagtagttttttaggttgttaggtttgggttaaatagttattttataagttatttgtatataagatattaagtaaggttaattatagagaatattgatattttgttatttagggttttttttttagtgtttttatattgatattgatgatggggttggttggtatttatttttttttggagttttttttttttatggttacgtttggtgatggtatttttatatggtttttgtttgacgtagttggtgtttttagtttgaaggtttttttttttcgttattgtttttgattgtattttcggtgggttttggagtaataatttttattttttgttaggagaagtaagtgggaaatattagttaatttttaaaatcggtaaaaaagggagtttttgttagaagttgtatgtgaaatggagaggtgtggtttaataaaagtttcgtggttttgttgggtgttagtgggtttggggggttatttttagaagatcgtagtttattatttatttatagtttattgtttagtatatgtttgatgttgagatggtggatgttttgtgatgatatggggaggttttattattggagaatatgtaaatgatgttatttgtaagggaaaaaagaagttaatttttttgtgattattaagataggtattaaagtgcgtttagtttaattgtgatgaggtagtggtggttatgggattgagagttaaaaaagtgacggtttttggaaggattttggtgttttgggtgtttatagtatatttagagatattaataattatgattttaggaggttatcgtgttgtttgaggaggttggtggtttggggacgatggattaaatgagatttttttaatttattttcgtgttgtgatgttttgaggtgggagtttttatttgaattaatgataggtgtggttttaaaggagatagtgaagaaatgttacgtaaagagaatatttgttttacgtagggtataaggagttacggtttttggaagattatatgtgtagaagtttatagttaggataggtgtgttttgtttagaggttttgagatttatgatgggtggtagtgagggtttttttatgaaatttagaattcgggattcgggtatggattagagagattatttgttggattagtaatagattgtattttgttgtggttttagtggatgtgaagggtttttgggtgatggtatttgtgggttttagtagaatggataagtggggtatagttgtttttaaagatataatgttttagtatatggagggttagttgtaaagtggttaggatattagtggtgaggatttggtttttaattgtaaggggattttgttagtttattgatgataaattgatgtttagaatttttataatagtgttggaggggttatgagtgtgttttttagaaacgtggttattgtttaagaagagggagagcgggtgtagtagttttgtttatatgttttggtttaggcggtggttttatatgtagtatttagagcgatttggggagttgagggagaatagagattttttagttggtttagagttattggtggtttttgtttttggaggggtggttttttttgttttaatttagttttgtgttttttttttttgttatttttggttgtaggattgggaattatttgttgggacgttgttttgtgttttttttatggttatgtttttatttttgttttttttatagattgcggttaggatttagtagtttagagttttagtagggttttagtttgtattgaggttatatttaggtattgtcgttatttttcggtaggtgatttttaaattttaaatttaaattagaatagagagatttttttttgtggttttttttattttttttttttggttgtattagaattttggtagaattttgtggtttaaataaaaaaggtgttatgtttatagattttttatagtatttttatttttatgttgatttatagtttttaattttagtttgatgttttttattgattgtagttagtgtagataattagtgtttatattgtggatattatatgtagatgtagttgaagttgttttttttagatatacgtatttgaattttagggaatattgaagcgagtttagatttaataaaaattttgatattattaggttggggtaaatattttggagaagttgtgggtggggttgtaggtgtgagaggagagaagtttttaggagtagtatatatatttttatatatgtttatggtgtttggtggttttagtagatatagtgtgtgtggattttgggcggggttttggggttatggttttgattcgg

SEQ ID NO: 561 - DNA, 6354 bp, Artificial Sequence
  chemically treated genomic DNA (Homo sapiens)
ttttttttgatagaggtttagttatttatgtttttttgggaaaatgggaatagtatttgtaggataagttaaatttggtatttaagtttttttaagtgataggaagttgaggttatggtttttttgttatttagtttttgtttataagtagagagaaatagtagtagcgattttattgttcgaataattggtgatttgatgaggttatgggaagagttggatatggggagtttatatattttagggaaggtagtattgttttgtaggtcgggagtttattggttagtaattattttttatatttattatagtagggtttgtataggaggggagggtatgttgagtttagttatatagttggtggtgtcggttgtaggggaggttgttgtggttataatttttattcggggatagtttttatagatttttgggttgtgtttaatatattgtgagtgttttggatttaatgtttttggaatggtttttgtggcgtggatttgtttgggttaaattaggggatattttagtttttttataggtgatttatgttttatgtatttagaataaatatgtttaggttattttttattattcgaagggtgaggtatttatagtgagacgattgttatttttggtttttagattgagtttgttgatagtttttgatgttttgtttttaggaggttagcggttagatgtattttttagggtttgggtgagatttttttatttttatagattttagaattttaagttttgtattttttaggtgttgatagagtggagttttatagttttagattatgagagttatagttatattagagggtaatttatattatagttgttttttattatagttttaggtaagtaaaattgtggttagtaattttttgtttttgggttattatttttttagttggtggtaaatggattttattgggttttttttattatagttattattttttgttgtgtaggagtagatatatatttatcgtatttttattgatttttttaatttaaggtttttggtagagaaaggtgttttttttttgtgatatttgttttattattttttgtgaattattagatattattgatgtagattagggtttttattttagggtggtgttgggtaatttagtatgggggttaggggatttttatttagttattggtttttttaagtaatatagtggttttttaaagttatgtttattaaagttgtggtatgagtatagattaagttaaattaggaaaggttttagtttttttaaaagtggtttattaagggaattaagtttttttgagagttttaattattttaatttttaatattatggttattagtttttttataattggattagattaattatggtatttattttggtgattatagaagagttgagtttttttttttttatggatattattatttatattttttgtaataatgagatttttttatattattataagatgtttattgttttagtattaaatatttattaaagattcgatcgaggatggatagtgatagggtttggttgtgtttttatttaaatgttattttgaatttttatgtgttggagggatttggtgggaggtaattgaattatggaggtaggttttttttatgttgtttttatggtagtgaataagttttataagatttgatggttttatatagggagtttttttgtagaagttttttttttgtttgttgttatttacgtaagattagatttgttttttttgttttttattatgattgtgaggtttttttagttatgtggaattgtgagtttatgaaattttttttttgtataaattatttagtttcgggtaggtttttatgagtagtatgaaaatggattaatatagatagtgagttgtgattttttggggattgatggtttaggtagttgttatagagtagttttaagatgtttttgtatattagattttattttttgatatatagtttttagtagaagttttagttttttttgttttgaaaggtagttaatattttttatttatttttttttgaaggaagtggggattgtttttttgtagtttaaagagggtatagtttgggttattaaatgaggagaaaaagttattaaattagaggacgttaattatattagataaagattatatggaattattattattatgttttgtgtcgattgtagaaaaatgttttgaagaaatgttggtgaaagtttattttataattaatattgaagtaaaagtattttgaggaaatttttgagttataagttgttagtgttttttatttttggttttgttgggtattttatgtatgtaaatgttgtacggttgtttttaggtttggggtttggtattttagagagttgttggaataggatagttattgtgagaaattgaattttaggttggaaaattgtggtatgttgaggtaatgtgttagaggggtaaaattttaaatgttatttgatttggatttaagttaggaaattcgatttttagatattgaatgggatttatggtattaaagtttaaatattagtaatttttataattagaggtaggtggttttttttatgattaggtatgaatataaattagttaatgatgttttagtataaaattagtttgtggtcggaaaggttggagttttatatgtagagaaagtatttaaatacgtttatgggtttagggatatttttgtgttttaaagtatgtgagttgtggatggaaatgttttatttttttattaaggaaagtattatttaagtttttattaaacgtttttatggagttttatagaggttagaggtttgtgtaatattagtttatattttttttttttttgagtgattagttggaaaggttatttttattcgaaaggttattattttagaagatagtgttttgatttaagggtttgttttgggaaatagtggttttattagaattagagatattaaggaattttattttgattgtggggttatttttaaattagatttattttatttttttttttgtcgtaaggtatggattttattattttcgggatatggagttggtttacgtttagtatttggattcgtgtttttttagtttatgtttttttgaggattttgtagatgattttttagaatggtattttgttgggatttttatttgtttttagtgtaatttattagttaaatcgtttattgtaaggaaattataaggtttggattagattatgaggttgttttataagttatgttaaaaaatatggatttggaagatttgtttgttataatattatatttaaatttaattagttttgttaataatagtttttttttatgttattaggaaaatgtttatggattggagtgtgttttgtgtgtaggaggttggtttaggttttatttttgtaggatattggatatttttataattattagattttttttacgtgtatatatatttttttttattttgtttttatatttatatttattgggttttttaggtatttattaatgttttagaatttaaaattattatttggggtttagttttttaaatagttttaatttttttttttgttggaatgagtttagtgtttattttttttaaaggtgaaattgttgggtttgtaatagattaggaatttattgtttttttataggggtagtcgattttattgttttggaatagcgattatttttagcgaggtttgagatgttttttttttttttaagattgagagcgtcgttgtttttagttttttatagtttagtgtttgttgtttttacgtagagttgtaggggaggttttgagtatttagtttgttggattagcgttgtgtacggtttttttatggcggtaggggttgtttggattgtatattgggtttagtaattttattataggtatttatttttttaggaataattgtattttttttttatttttagaaattttatttcgtttattttattataaggaggaggatggtggagagtggtatattttaaaatgtgtattagtttttttgggatttttttttaaataatttaggagggattatataagggaaagtttatgtattttttttatttagtgattatttttttaattttgggtgtagggagattcgtaagtttacgggattgatttgggaatagggtatttgagtttataatataaggtgatgtaagttaatattaatttcgttgtagttttggttattattttaagggatttttgatagatattaggtgttacgtaattatttgatgagtttttggtttggatgatttagatagttatttaggtttgaattatttaaggttaagtaaaaaggtgattgttttttttagggaattatatgttatatgtatattttttattcgggagtttgtaatttgttttatttagtaatataagtttaggcggtatttagttttatttaggtattttttaattttatttgtttgaatggtttggatttgtttttatggttagattttagggtttggggaggttagtttagattatattttaaatttttatttgtgtgtgggtggtattttgattttagttttttcgtaaggtgtatataataatatgtaggttaggtttttttggtggttttaaatattttttcggtttaggtagtttagttttagttattagtataggtattatggggttaattgttttaggagttatgaggaatttatagttgattgttgtttgggtttggttagggttgattaaagtagacgaggggtcggtattttcgtggatttttgtttgaattttagttttttgttaaattttttaattgtttttgttaatagttatttaaagtatttaatagaaagtaattttgaaaaattaggatatttgatattaaaagatttttaaataaggaagtttttttttttgtgtgtatggttgtttttgttatataagatttggaatataggattgttgtttgttttttttgttcgttttgtttagtttgaggatttgtaagttatataaaatttaaatttttatattgaggttttaatattgaagttgtgtttttagtttgattttttattgtggggttattttagagggatttagcgggtgaagtttttgttgtgaatttttatttgggtgtttggcggttgttgggggtaatggttattagttaagttaatagagaaatttaaaaagtttttttttaaatatacgtgttttatttgatatgtttaataaagacgattatagttttttaaaatattattttattgtgagagaagtttttgtaggttttaggtttgttttttaattaggttgtttgttttttgttattgagttgtttgatttttttatgtatttagatatttattttttttattacgtaggttttgtaaatatttttttttattttttgggttgtcgttttttttagttgattgttttttttgttatgaagatgttttagcgtttaatgtagtttcgtttgtttatttttttatttgtttattgtttgtgtttttggtgttatagttaagaaattattatttacgttaatgtttaaagttttatttttgtatgtgtttttcgtagttgtatggttttaggtttttttaagtttatgttgagtttttaatttatgttgagttgattttttatatgttgtgagagaaaggattacgtgtatgtatttagtaatttatgaattttatataattttttattttttttattgagtttattttatttgtattttgataaggttattgttttttttattttggtttttataggagattatttattttattattttagtcgtttttttatgagggtataatgatttagaagtttgtaatgagttattttttattttatcggaatttaggtttggtattagtgtttagatttgaagagaatagtagggtttattattaggaaataagaggtatttgtttttttaaattattgaatgaaagtattgtttttattttttttagaatattaaagatttaattaggaaatattaggtattttttgaaaataggaaaaaatgttagggtttttattattattattaattttaatttagtatagatattaaatatagagttttttgtgaagaaagttgggagagtagaggagtattttagggatgttaaggttaataggagtcggtattttttttaataaaatgtatatttttttttatttagaaggttaaaggttttttatttttgtgtttttttttagtaaagttataaatttaagttggtttttttttttttatatagttgtttttgtttttttttttttagg

SEQ ID NO: 562 - DNA, 6354 bp, Artificial Sequence
  chemically treated genomic DNA (Homo sapiens)
tttggaggagggagagtaggagtagttgtgtggggagggagaagttagtttggatttatagttttgttgggagaaggtatagagataagaaatttttggttttttgagtgagaggaggtgtgtattttgttagagaggatgtcgatttttattggttttgatatttttggaatgtttttttgtttttttagttttttttataggaagttttatgtttagtgtttgtgttaggttgaagttgatggtgatgatgaggattttggtatttttttttgtttttaggaaatatttaatattttttggttaaatttttaatattttaaaaagaatggaaatagtgtttttatttaataatttaagagagtaaatgttttttattttttgataatgggttttattattttttttaggtttaaatattggtgttagatttgaatttcggtggagtagagagtaatttattgtaggtttttaggttattatatttttatgaaggggcgattgaggtaatggggtgagtagttttttgtaggggttagagtgaagaggataatgattttattagggtataggtgaaatgagtttagtgagagagataaagagttgtgtaaggtttatgagttgttaggtgtatatacgtggtttttttttttataatatgtaaaaaattagtttaatatggattgaagatttaatatagatttgaaaagatttgaaattatataattacgagaagtatatataaagataaagttttggatattgacgtgagtaatgattttttggttatgatattaaaggtataggtaataaataaatgggaaaatagataagcggggttgtattgaacgttaaagtatttttatagtaaaggaaataattaattgagggaaacggtaatttagaaaatgagagaaaatgtttgtaaagtttacgtggtagaaggggtaaatatttgaatatataaggaagttaaataatttaatagtaaaaaataaataatttgattgaaaaatagatttaggatttgtagaggttttttttataataaaataatgttttaagaagttgtgatcgtttttattggatatgttaagtaggatacgtgtgtttggaaggaaattttttgagtttttttattgatttagttagtagttattatttttagtagtcgttagatatttagatagaagtttatagtaggggttttattcgttgggtttttttggggtggttttatagtgagaggttagattggggatatagttttaatattgaaattttaatgtgaaagtttaagttttgtgtaatttatagatttttaagttaggtagggcgagtagagagggtagatagtagttttgtgttttaggttttatgtagtaagagtagttatgtatatagaggagaggatttttttatttaagggttttttggtattaggtgttttaattttttagggttattttttattgggtattttaaataattgttaataagggtagttgagaaatttggtagaaagttggagtttaagtaggagtttacggaggtatcgatttttcgtttattttggttagttttggttaggtttaggtagtaattaattgtggattttttatgatttttaagataattgattttatgatatttatgttggtggttgaggttgaattatttggatcgagggaatatttaaagttattaggagagtttggtttgtatattgttgtatatattttgcgaggagattaggattaaaatgttatttatatatagatgaggatttggaatgtggtttgaattgatttttttaggttttggggtttaattataaaaataaatttaagttatttagataagtaaggttggagaatatttggatgagattgaatatcgtttgggtttgtgttgttggatagggtaggttgtaggttttcgagtaaaggatgtgtatatagtatgtggttttttagaggggatagttatttttttgtttggttttagatagtttaagtttaaatgattgtttaggttatttaggttaaggatttattaaatgattgcgtgatatttaatgtttgttagaagttttttaggatggtggttaaagttgtagcgagattggtgttagtttgtattattttgtgttgtgagtttaaatattttgtttttaaattaatttcgtaggtttacgagtttttttatatttagagttaggaagatggttattgggtgggggggatgtataagtttttttttgtgtggttttttttgggttatttgaaggggagttttagggagattagtgtatattttaaaatgtattattttttattatttttttttttgtagtgaggtaaacgggatgaggtttttggaaatgagaaaagaatgtagttgtttttgagggaatgaatatttatagtgaggttgttgaatttagtatgtagtttaggtagtttttgtcgttatgggagggtcgtgtatagcgttggtttagtaggttgggtgtttagggttttttttgtagttttgcgtgaaggtagtaggtattgggttatggaggattgggggtagcggcgtttttagttttaaggagggaagaggtattttaagtttcgttaggggtggtcgttgttttagagtagtgaagtcggttgtttttatgaggaagtagtgagtttttgatttgttgtaggtttagtaattttatttttggaggaagtgggtattggatttattttagtagaggaagaaattagggttatttggggaattgggttttaaatgatggttttaggttttagggtattagtaggtgtttgaagggtttagtggatatggatgtagaggtaaaatgagaaggggtatgtgtgtacgtggggaaggtttggtggttgtggggatgtttagtgttttgtagaagtgaaatttggattagttttttgtatatagaatatattttaatttataggtatttttttagtaatataggagagagttgttattggtagagttggttagatttgggtgtgatattataatagataggttttttaagtttatattttttggtataatttgtagggtagttttatgatttgatttaagttttgtggtttttttgtagtaggcggtttaattaatgggttatattgaagataaatggggattttagtaaaatattattttaaggggttatttgtagggtttttaggaaagtatgagttaagaaagtacgggtttaggtattggacgtgagttaattttatgtttcgggggtggtgagatttatattttgcggtaggaaggaaagtaaggtgagtttggtttggggatgattttatagttaagatgagattttttggtgtttttggttttggtgaggttattgttttttaggataaatttttggattaaaatattgttttttgaggtgatggtttttcgggtaggggtggtttttttagttggttatttaaaaaaaaaaagggtatgggttggtgttgtataggtttttggtttttgtgggattttatggaagcgtttagtgaaagtttgaatggtgttttttttggtggggggataggatatttttatttataatttatatattttggagtatagaagtatttttaagtttatgaacgtgtttgaatgttttttttgtatgtgaggttttaattttttcggttatagattgattttgtgttgaggtattattagttggtttgtatttatgtttggttatagggagggttatttgtttttgattgtgggggttgttggtgtttaagttttagtgttatgggttttatttaatatttaaggatcgggttttttggtttggatttaggttaggtggtatttggggttttgtttttttagtatattgttttaatatgttatagttttttagtttggggtttaattttttatagtggttgttttgttttagtagttttttgggatgttaggttttaggtttaaaaatagtcgtataatatttatatatataagatatttagtaaggttaaagatagagagtattgatagtttataatttagggatttttttaaggtatttttattttaatattgattatggggtgggtttttattaatatttttttagagtatttttttgtaatcgatataggatatggtgatggtagttttatgtggtttttgtttgatgtagttggcgttttttagtttgatggttttttttttttatttagtgatttagattgtattttttttgggttgtagagaaataatttttattttttttagggaggagtgagtgggagatattagttattttttaaagtaggaaaaattggagtttttgttggaggttgtatgttaagaggtgaggtttggtgtataaaagtattttagggttgttttgtggtagttgtttggattattagtttttagaggattatagtttattatttgtattagtttatttttatgttgtttataaagatttattcgagattgggtgatttatgtaggaaagagattttatggatttatagttttatatggttggggaggttttataattatggtagaagataaaaggagtaagtttagttttacgtgggtggtagtaggtaaagagagagtttttgtagggaaattttttatataaaattattagattttgtgaaatttatttattattatgagaatagtatgggaaagatttgtttttatgatttaattattttttattaggtttttttaatatataggaatttaagatgatatttgggtgggaatatagttaaattttattattgtttattttcgatcgagtttttagtaaatgtttgatgttgagatagtggatattttgtgatggtatgagggggttttattattgtagaaaatgtgggtgatggtatttataagggaaaaagagtttaatttttttgtgattattagggtgggtgttatggttggtttggtttaattgtagaagagttggtggttatggtgttgagaattaagatagttaaggtttttaaaggagtttggtttttttgatgaattatttttagggggattggagttttttttaatttgatttagtttgtgtttatgttataattttaataagtatgattttaggaggttattgtgttgtttgaggaggttagtggttaagtgagggttttttaatttttatgttgagttgtttagtattattttgaagtgggagttttgatttgtattagtgatatttggtggtttataagaggtaatagagtaaatgttatagaaagagagtatttttttttattaagagttttgggttggaagagttaatggaagtgcggtggatgtgtgtttgtttttgtatagtagaaggtggtggttgtgatgggagaggtttagtgaagtttatttgttattagttgaaagggtgatggtttaagaataagggattgttggttatagttttgtttgtttgaagttatggtgggagatagttgtggtgtgggttgttttttaatgtggttgtagtttttatgatttggggttgtaggattttattttgttagtatttgaggaatatagaatttgagattttggagtttgtaaaaataagaggattttatttaagttttgggaggtgtatttgatcgttaattttttggggataggatattaggggttgttagtaggtttagtttggaggttaaagatggtagtcgttttattgtggatgttttatttttcgagtggtggaaagtagtttgggtatgtttgttttgaatgtatgaggtatgaattatttataggaggattggagtgttttttaatttgatttaaataggtttacgttatagaggttattttagaggtattggatttagggtatttataatatgttgggtatagtttaggaatttgtaaaaattgttttcgagtgggggttatggttatagtaattttttttgtaatcggtattattagttgtatggttgggtttagtatattttttttttttatgtaggttttgttgtgataaatgtgggaggtggttgttggttagtgggttttcggtttgtagggtagtgttgttttttttgaggtatgtggattttttatgtttaattttttttatggttttattaggttattaattgttcgggtaatagggtcgttgttgttatttttttttgtttgtaggtaggagttgaataatagggaaattatggttttagttttttgttatttgaaaggatttaagtgttaggtttggtttgttttataagtgttgtttttatttttttagggagatatgaatggttgagtttttgttaggaggag

SEQ ID NO: 563 - DNA, 6195 bp, Artificial Sequence
  chemically treated genomic DNA (Homo sapiens)
gagtgaatgtttatattatggatggaaattttgtttttgttttagcgttgagtataggagaggtaagattggatttagaataaaggataagaaaaatagttttttagattttattttaaatgatagtacgtttgaagttaaggggataatagataatgggtattttgttatagttaaagaaaaaagggaataggaaaggtattttattttaaatgattatttataaacgtattaagaaattaaaattattttttataatgttagtgtcgttttttttttttttttttttttttttttggggggggtgggggtatggagtttcgttttgttgtttaggttggagtgtattggtataattttagttttttgtaatttttgttgtttacgtttaagagattttcgtgttttagtttttagagtagttgggattataggtattcgttgttatatttagataatttttgtatttttagtagagatggagttttattatgttggtaaggttggtttcgattttttaattttaaatgatttgttcgttttggttttttaaagtgttgggattatatgtatgagttattgcgtttagtttagtggagttttttagaaatatttttgttagagataatgagaaatttgattggtaatagagttgtgtttaaggttgagtaatgggttgtcggtgagggtttggttttgggaagatgggttatcgggtattttttggtttggttagtgtttagttttgttttttatattatagggtttggatagtggtttttaaattatttatttatttttttagattttttgtttatttaattaattttggggttagagaaggatgaagagagattgaagatattaatttttttaaataataaggattttgggtgattaaatatatgagagaatttatggagaaaggttagaattggaataaaaatgttttaaattgtttttttagttattgttagagatttagagagataatgttagagagacggaggttaggaaataattgtggaacgttatttataaatttagtaatgtttagtgagaaatagagaagtagtataaatatagatggtttaaaatttggtgttaaatggttattagggtaaaataagggttatgaaatttggaattattgatgtaggaaattagttttttttaggttttttgttaatttacgaatttaaataaatattatagatattatagatttaatttagatttttttatttttataaggtagaataagtgggagataaattttattagtttttttgtaaagaaagaaaaaattgaaatatatattaaatattttaatttttttattgtattttaaaggtttggttttttttttatttttttaaggtaatagtatgatttgatattttttaattttgtaggagttattaagaataaagataggagtttggattggtataaaggtttagaagtttatataattttatttataatagtatttaaaaataaaatttttagaagtaattttaattaaaaaagtgaaagatttgtatattgaaaattataaatattgatgaataaaattgaagaagatataaatgaatggaaagatattttgagtttatggattggaagaattaatattattaaaatgtttatattatttaaagtgatttgtagatttttattaaaattttaatgtaattttttataggaattaaaaaaatattaaaattggtatgaaattagaaatgatttcgaatagttaaagtaattttgagtaaaaataataaagatagcggtattatgtttttttattttaaaatgtattataaagttattggaagtaaaatagtatggtttggtgtaaaagtagatataataattaaaggaaaggagtagaaagtttaaaattatatttagggttttatgattatttgatttttaataaagatgttaagaatatataatggggaaaggatagtttttttattaaaaggtgtaaggaaaattagatatttataagtagaagaatgaaattggatatttattttatattatatataaaatttaatttaaaatggattaaagatttatataaaagattcgaaattgtaaatttattagaagaaaatatggagggaaatttttatgatatttttttgggtaattatttttataataggattttaaaagtaaagataataaaattaaaaatagattaaggaggttatattaattaaaaaatttttgtatagaaaggaaataaaaagatgatttagggattaggagaaagtgtttgtaaattatatatttgataaggggttaatattttaaagatataaggaatttaaatatttaataagacgaaaataaatattttaatttaaaaaagggtaataaatttggtttatagatatatgaaaaatatattcgatattattaattattagggaaatgtaaattaaaattataaagaggtaattatttgttagaatggtttttaataagtagataaataatacgtgttggtgaggatataaaaaaaaggggatttttgtaggttattggtggaaatgtaaattagtgtagttattttggaaaatagtatggcggttttttaaagtattgaatatagaattattatatgatttagtaattttatttttgggtatattttttaagaaattgaaattattgtattaaagaagaatttgtatttttatgtttattttagtattatttaaaataagtaagatatggaattagtttaaatgtttattagtggatgaatgaataaagaaaatatggtatatatgtaagatggtatattatatagttttaaaaaagaaggaaattggtagggcgcggtggtttatttttgtaattttagtattttgggtggtttaggcgggcggattacgaggttaggaaatcgagattattttcgttaatatagtaaaatatcgtttttattaaaaatataaaaaaattagtcgagtatggtggcgggcgattgtatttttagttatttaggaggttgaggtaggagaaaggcgtgaatttgggaggcggaggttgtagtgagtcgggatcgtattattgtattttagtttgggcgatagtaagatttcgttttaaaaaaaaaaaaaaaaaaaaaaaagaaggaaattttttatttatgataatatggatggaattaaaggataatgtgttaaacgaaataaattagatataggaagataaatattatatgatattatttatatatggaatgttaaaatgttagttttatggaattagagtataaaggtggttattagaagttgtaggtgggtgagataggaaaagagaagatgttgagttaagagtataaagttttagttatgttggagagttttagtgatttatggtattgtacggtgattatagttaatagtgatgtattgtattttttaaattgttaaaggaattaatttgtaattttttttaaaaaattaagttggtgaggtgatggttattttaattagtttatgtgttttttttatgtggatattaatttaaacgttatattatattttataaatatatagaaaattattttttaatgaataaataaataaatttgaaaaaaattaaatgaggaatttaaatatagagattttttaagggtttattgagttttaaaggatttggattaaatatggtgatattatggaaatatgtagtaatattttaaaaatgtgtaagatatagtttttttttttttttttaagagaaaggggttttattatgtttttaggttggtatcgaatttttggtttttagtgatttttttattttagttttttaaatagttagaaatataggtatgtattattatgttggtttaagatgtattttttgatatagtaattttatttttataagtttatttatataggtaagagaatatatatataagataattattgtaattttatttattattgtaaaagtttaaaaataattaaattgtaataattttataatattttattagtataaaaaataagtgatggtatatataaattttgggatagtataaggttattaaaattataatagtattttatgtattttgatatataaagtgttaatgttataggtgaaaaaagcgaagtgtagaatattatgtgtaattgttaatagtgatggtttgttgggttagaattgaaggtttgggggtagaaatgagagtttatgatttttattttttgaatgttgttttttgtgtatgatttataattttttaaaattaaaaaaaaaattttagaaaggggttgtacgtatttaaattattttgatattttttaaagtggagagaagtattcgttatatattttatgtgatgtatttagattatattaattttttgaattaaattcgaatttttattttaatttgataaatttggtttattattttattgaatttattttttttatagtttgataaggttattgatttttttatattggtattagcgggagattatttatttcgagattttaaaagttttttatatgaggttagtaatatttttgaattttgtaatgaattaattttttattttattgagttttaggtttgtttttagagagttatttagagagtattagggattatttttagaaaataagaggtatttgatttttaaattttttgaatgaaagcgttgttgttttttttttttgaatatataaaagtaaatatttaagtagatgggaaatagaataggatagtaatatttttattattattaatattttggattaagaagaggtattaagtatatagatttacgttttgatgaaagttgggagaaagaggagtattaaagggattttgagaataaaggtagtttttttttttttaattatatgtttatttttttttattgtagtttttgttttaggtttttttttagtagagttataaatttaggttgattttttattttttatatatttatttttgtttttttttttgtaggtgattttagttatgaggattatcgttatttttgttgttatttttttggtggttttgtaggtttaggttgagttattttaggaaagagttgatgaggttataatttagaagtagtttggggaagataattaggattttgttattttttttgtaggaaatggattttttgtttttagaattttaggtaggagatattaattttgtatatttgtaaaatttagaaaaaaaggattggagaaaggatttggagttaagtgtggaaaggtttattttatttgagtgattttatttaatttttttggattttgatttttttatttataaattaattagtgagaattaaataaatttaaaagatttttttttttttaagatttttagttttaagatatttttgtgaaatttgttatttttaagatagaaagagttatattgattagttttttgtagatttaaatgggtagatttagttatatagagagtgttttattttgtttattggaaaagtttttagaatttagagaggaatttataggtgtgttttgatgtaggttaataggtttgattaaatttttttataatatatttttagattaaaatattatattgtgttttatatatatatataattattgtttgttaattaaaataagtaaatatgtaaaatgttaaaaaaaaaaaaaaaaaaaaaaaaaggagagatagagaatgaagaatttgaatttggaaagtttttaaagattttttgagtattaaagtatttggtttatgatattagtatgtataatgcggtattttagaaattgatttaggtgttttagggagttttgttaggatttggaaattatatatggaggttaagattaggcgtgtggatgaagtagaatgaagagtaggtaattttgaggttgagaggtatattgttggattagggagtaggtaataaatatattttggatagatttatatggggaaaaaaattatgattttgtatgattaatatatagttagtaagattttttgttatttacgataaagatatgaattttttttattttaatatgattgatatagtgttttttatttagattattttagttagtttggttgtgtttgtttttttttttatttttttcgttgtgtttgatttttttttttttttatagg

SEQ ID NO: 564 - DNA, 6195 bp, Artificial Sequence
  chemically treated genomic DNA (Homo sapiens)
tttgtggaaagaagagagggttaggtatagcgagggaggtgggaaaaaggataagtatagttagattaattgagatagtttaaataagagatattgtattagttatgttaggatggagaaaatttatgtttttgtcgtaagtgataagaaattttattagttatgtgttagttatgtaagattatagtttttttttttatgtgagtttatttaggatgtatttattatttgttttttggtttaataatatattttttaattttagggttatttattttttattttgttttatttatacgtttaattttgatttttatgtgtgatttttaggttttaataaggttttttaaagtatttgaattagtttttgaaatgtcgtattgtgtatgttaatgttatggattaaatattttggtgtttaaggagtttttgaagattttttaaatttaaattttttattttttgttttttttttttttttttttttttttttttttaatattttatatatttatttgttttaattgataaataataattgtgtatatgtatgagatataatatgatgttttgatttaaggatgtattgtagaaagatttaattaagtttattagtttatattaaaatatatttataggtttttttttaggttttaaaagtttttttaatggataaagtaaaatattttttatataattaagtttgtttatttagatttataaagaattagttagtgtagttttttttattttaaaagtagtaaattttatagaaatattttggaattgaaagttttagaaaaaagaaaattttttagatttatttggtttttattgattaatttatagatgagaaaattaaggtttaggaagattaagtaaagttatttaagtgaggtagatttttttatatttgattttagattttttttttaattttttttttttagattttgtagatgtgtaagattgatgttttttatttgaggttttaagagtagagagtttattttttgtaaaggagatagtaaggttttggttgttttttttagattgtttttgggttgtagttttattagtttttttttggagtgatttagtttgggtttgtagggttattaggagaatggtagtaaggatggcgatggtttttatggttggggttatttgtaggagggagagtaggagtggatatgtggggagtgaggagttagtttggatttatagttttgttgggagaagatttgagatagaagttgtagtgagaggaggtgggtatgtgattgggaggggaaggattgtttttgtttttaagatttttttgatgttttttttttttttagtttttattaaagcgtgagtttgtatgtttaatgtttttttttgatttaaggtgttaatgatgataagggtattattattttgttttgttttttatttgtttgagtatttatttttatatatttaaaaaagaaaaataatagcgtttttatttaagaagtttggggattaaatgttttttgttttttgaagatggtttttggtattttttggatgattttttgggggtagatttgggatttagtggagtagagagttaatttattgtaggatttagggatattattaattttatgtaggaggtttttgagatttcgaggtgagtagtttttcgttggtgttagtatggagaggttaatgattttattaggttataggggaaatgagtttagtaaaatagtaggttaagtttattagattaaaataaaaattcggatttagtttaaggagttggtgtgatttgaatgtattatataaaatgtgtagcgggtatttttttttattttggggaatattaaagtaatttaggtgcgtatagtttttttttgagattttttttttagttttagaaaattgtaaattatgtataaggaataatatttaaaaggtagaagttatgagtttttatttttatttttaggtttttagttttgatttagtaaattattattattaatagttatatatagtattttgtatttcgttttttttatttgtaatattggtattttgtatattaaaatatatggaatgttattataattttaatagttttatattattttagggtttgtatatgttattatttattttttgtattgataaaatattataaaattattataatttggttatttttaaatttttgtagtaataagtaaagttatagtgattattttgtatatatgtttttttatttatatggataaatttatagaaatagaattgttgtgttaaagaatgtattttaagttagtatggtggtatatgtttatatttttagttatttgagaggttgaggtgggaggattattggagattaggagttcgatattagtttaaaaatatagtgagattttttttttttaaaaaaaaaaaaagagattatattttatatatttttaagatattattatatatttttataatattattatatttgatttaaattttttggggtttagtgggtttttggagagtttttatatttgaattttttatttaattttttttaaatttatttatttatttattgaaaaataattttttgtatatttgtagggtatgatgtgacgtttggattgatatttatatgggagaaatatataagttaattaagatagttattattttattaatttaattttttaaggagaattataaattgatttttttagtagtttgaaagatataatatattattattaattgtggttatcgtgtagtgttatagattattaagattttttagtataattgaaattttgtatttttggtttaatattttttttttttttattttatttatttgtagtttttgatgattatttttgtattttagttttataaaattgatattttaatattttatgtgtaagtgatattatatagtatttgtttttttgtgtttggtttatttcgtttagtatattgttttttggttttatttatgttgttatgaatgaagaattttttttttttttttttttttttttttttttgagacggagttttgttgtcgtttaggttggagtgtagtggtgcgatttcggtttattgtaattttcgttttttaggtttacgttttttttttgttttagttttttgagtagttgggagtatagtcgttcgttattatgttcggttaatttttttgtatttttagtagagacggtgttttattgtgttagcgaggatgatttcgattttttgatttcgtgattcgttcgtttgggttatttaaagtgttgggattataggagtgagttatcgcgttttgttaattttttttttttttaaggttatatggtatattattttgtatgtatattatattttttttatttatttatttattgatgaatatttaggttaattttatattttgtttattttgaataatgttgaaatggatatgggagtgtagatttttttttgatatagtgattttaattttttgggagatatatttagaagtgggattgttgggttatatggtaattttatgtttagtgttttgaggaatcgttatattattttttaaaatggttgtattaatttatatttttattaatggtttataagggtttttttttttttatatttttattaatacgtattatttgtttatttgttaaaagttattttaatagatgattatttttttatgattttaatttgtatttttttgataattagtgatgtcgagtgtgttttttatatatttgtgggttaggtttattgtttttttttaaattgagatgtttgttttcgttttattgagtgtttgaattttttatatttttgggatattagttttttattagatatatggtttgtaaatatttttttttagtttttggattatttttttgttttttttttgtgtagaagttttttagttgatgtaatttttttggtttatttttgattttgttgtttttgtttttggagttttgttgtagaaataattgtttagaaaaatgttataaagatttttttttatgtttttttttagtagatttataatttcgggttttttatgtaagtttttaatttattttgagttgagttttgtgtatagtgtgggataagtgtttaattttatttttttgtttgtggatatttagttttttttatattttttagtgaaaagattgttttttttttattgtgtgtttttggtatttttgttgaagattaagtaattataaagttttgggtatagttttgggttttttattttttttttttggttattgtgtttgtttttatattagattatgttgttttgtttttaataattttatgatatattttaaaatgagagagtatgatgtcgttatttttgttatttttgtttaagattgttttggttattcggggttatttttgattttatgttaattttagtatttttttaatttttgtgaaaaattgtattggaattttgatggggatttatagattattttgggtagtgtagatattttaataatattaatttttttaatttatgaatttaagatatttttttatttatttgtgttttttttagttttatttattaatatttatagtttttagtgtatagattttttatttttttggttaaaattatttttaagaattttatttttgagtgttattataaatgagattgtgtgggtttttaaatttttgtgttagtttaaatttttgtttttatttttagtgatttttataaaattagaaagtgttaagttatgttattgttttgagagagtgggagagaagttagatttttagaatatagtggagaggttggggtgtttgatatgtgttttagttttttttttttttgtagagaaattgatagagtttattttttatttattttgttttatgaaaatgagaggatttgaattaaatttgtaatatttataatatttatttgaattcgtgaattaatagggagtttgggagggattaattttttgtattagtgattttaggttttatggtttttgttttgttttggtggttatttagtattaggttttaaattatttgtatttgtattgtttttttattttttattggatattgttaagtttgtagatagcgttttataattgttttttagttttcgtttttttggtattgtttttttgaatttttagtaatgattgaagaaataatttgggatatttttgttttagttttaatttttttttatgaatttttttatgtgtttgattatttagagtttttattatttggagaaattgatatttttagtttttttttatttttttttgattttaaaattaattgggtgagtagaaaatttggaaagataaatgggtggtttaaaaattattgtttaggttttgtggtgtgagaggtagagttgagtattggttaagttagaagatgttcggtggtttatttttttaggattaggtttttatcggtagtttattgtttagttttagatataattttgttgttagttaagttttttattatttttggtagaagtatttttagagaattttattgggttgggcgtaatggtttatgtatgtaattttagtattttgggaggttaaggcgggtagattatttgaagttaggaggtcgagattagttttgttaatatggtgaaattttatttttattaaaaatataaaaattatttggatgtggtagcgggtgtttatagttttagttattttggaggttgagatacgagaattttttgaacgtggatagtagaggttgtagggagttgagattgtgttagtgtattttagtttgggtaataaagcgagattttatatttttattttttttaaaaaaaaagaaagaaagaaaaagaaaacggtattgatattatggaaaataattttagttttttaatgcgtttgtaaataattatttagaataaaatgttttttttgtttttttttttttttaattgtagtaaagtgtttattatttattgtttttttgattttaaacgtgttgttatttaaaataaagtttgaaaaattattttttttgttttttattttgagtttaattttgttttttttatatttagcgttgggataaaaataggatttttatttataatatggatatttattt

SEQ ID NO: 565 - DNA, 6127 bp, Artificial Sequence
  chemically treated genomic DNA (Homo sapiens)
agtagaagtttatatacgtagaaatgtataagtttaatttttcgttaagattgtgataatgttttttgtttatttattgttgtgtggaaagatgttttaaatatagtggattgaaatagtattattaggtttttatttatattttggtaatttggttttggtttagaggagaggttttgttgggatttgaggagtttagggttgagatattcgcgtataggtggtaggtagtgttggtttagttgggagtttttatagggttgagggatgggattttgtgatgcgttggggttagattatgtcggtttatgagaaaggtggtttgtgtgatattttttaaacggtttagagttgggaggattttaattatagaaatttataaatattgtaaattagagttttggttttttttagaaagttggttgttttgtgttttttagtttattttcgtaggtgtttttagtttattttttttgtgggaggttggggtttttttaaaatacggtgtttgggttttttaagtgattagtttttttagttcgtttgagttattatttaaaaaaaaatattataaattgagttgtttatgaataatagatatattttttagtgttttagaggttgagaagtttaaattaaggtggtagtagatttggtgtttgttgagaattagttttttcgtttatagatggtatttttttattgtgtttttatttgatggaaggaatgaaggagttttttgggattttttttataaggatattaattttatttatgaggtgtttttcggatttatttatttttttagaggtattatttgttaatgttattatttggtggtttaatattttaatatatgaattttagagggataaaaatattttaattgtagcgttatttaagacggtgaaagtgaaaaatattagtgttttagtatttgggtttagtaaacggtatggtattaagttaggtgtattttattggtgaagatgttattcgatttagatttaataggaaagaagtaaatttttttttttgtgggagaagagtttaagaattgggattatattttaaaatagtttaagagagttatttttttatagttatttgtaaaaattgttgtaggtaataatattagatatatagatagtatgtgagaggcggttgggaaaggcggataaagggtaggggatttggagtttttgtttgttttagttggatttgtaggttcgggagttgttgtgtggtataggtagtattaggattttttttgtagggaggtggataaaaggttgaggggagggatagggcggtgtatttttaggggttgggagatggatagtttttagagtttatttttacgtagttttcgttttattttacgttaatatatatattttgttttaaaattgtttttttatattgggttaaaattatgttttagggttttgtttaaggtttatatttattgtgtttgttggggttattagatagttttagggagtgtgggaatatttttgttgttgttgaagggttttttttttttatatttatatttgtatttttatttgtattttttttaggatatttattttagtttgagggtgttaaggtttttgttgagtgtttgaaagttgaattgtatgtgtatgaaggaatagttttagttgtgtttatatttagagttgatattggtggtaagtttaggatattgtgttgggggtagggtgggtgggggtggaaatgaaagtgttgtaaagatttttatatgtagtattattttttgtttaaatcgttgatttttgttaaggttttggtgtagtttagaaagaaaggtgaaagggattacgagatatagatttattttgttttaattggggtttgggagttatttgggggagatagaggtaaggtttaggtgagattttagtatagattgagaatttgatttgttttggttgtcgagtttttattatagattgggaaggaggtagggataggagtattgttatttaggagaaagagtagaggtttttagatttaggtttttagtttcgtagttagtataagggggaacgatattatgatattaggttagagacggggtaggttagttttttagggttagtagttatcgttgatacggaattagtagtagtgtattttgtgttttttgaattaatgttgtaatatgtatattttggggtgtagaagaaagtaatgtgtttgttgaatagtattttatagcgtttttatttgaagttttttttgggttaatttttgtttaagggtaggagggttatttgttgtttttaaggtgttattgtagtgttgcgcgtttagttttttgtaagggtaggtttttttttattggaagatagtgtgggttttgttaggttagcgtttgatgtgtgaggatattttagggtggaggtatgttggagttattgaggataatagagatagtttttggtttaagttaattttatttcggtggtatttgtaagatgttcggtttttattagggtttttatgtgggagtggggtggggttaatttaagaaaggtagttaataaaaatgaggttttcgtgattgcgggttacggtagggaggttattttttttgtaggagtttgatggttaaataagggggagatatatttgtttcgattttgtgtatgattattgaaagttggattttagagtaaatgggttttttaaaatagagtttgtgttttagtatttgtatgtatgtgattttaggggtaggaaggtaagtaaagagagggaaaggaattacgtgaagtttttttgtttttgatattttttgatgttttattgttttagaagttttgtttatttttaggcgtttcgtttgttggcgtggtgattgtggtgattttataagttgcgatatggattttgataagtttttttgtattttatttgtttaaatatttattaatgtttatggggattggtttgtattattttttattttaattaaaataggttgggaatattttttagtttttaaagatagagtatataattttaaaatgtttttttaagttaagataaattagattatttatttatagaagtattttgttttgttagttagattagggtatttgagtaatagttttagggtaggatttttaggtgatagagtaattattgtttgttttatgaattattggggaaagaggtatagatagttataagttataatggataattatagtttgggttggagagggaaagtttaattcgaaatttagatgttagttaaatggttattttttgttgggtaaatgaaggtaaaatttaaataaatatagaataaatgtatttttaaatgtttatagattttttaataaaattgaaataaaaattaagaaaataattttatgtataatagtattaaaaaataaaatatttaggaagaaataaggaggtgaaggatttatatattgaaaatgaaaaaaaaaaaatagtgaaagaaattaaagaatgtaaaaataaatggaaagatattttgggttgaaaattggaagaattaagattgttaaaatgtttattttaaataaaataatatatagatttagtataatttttattaaaatttttatggtattttttatagaaataaaaaaaaatttttaaaatttgtatgaaatgggtgaaagaatttaaattgataaaataattttgagaaaaaaaaataaagttgaagatattataatttttggttttaaattatattataaagttacggtaattaaaataatatggtattggtataaaattcgatatatattagtgaaataaaattggagagtttagaaatatatcgaaatttatatgtttaagtaatttttgataatggtatgaagaagatattatagggataggagaatttttttaataaatggtggtgggaatattatttttatatgcgaaaaaataaaattggattttttttttttggtatgtattaaatttaatttaaaatggatgatatatttgaatataagattagatataagagagtatgaagataatgttagtgttttatatgttttgcgttacgaagtgtttaaattagagtattagggaggtaaaataaagtataaattaatgtttaatttttaagtggagattttttggagtagagttgtagggttggggtaaggatggaggtttattattttttttattttttgaatggtttttgtgggtaatttaatattttttaaaattaaaaataaaataaaattttagagggggattgtgggtatgttaattgtttcgatattttttaaagtggagagaaatatttagtatatattttatttgatatatttagattatatgggttttttgaaataaattttttggttttagttttattaattttttatttagtattttattgagttttttttttttataggttgataaggttattattttttttatattgtgttttataagagtttatttattttataattttaaagttttttttatgagggtagaaatgttttttgaattttgtaatgaattaattttttattttagcgggatttagttttggtttttaggtttatatttttagagagtggttagttttatttttagaaaataagaggtatttgatttttgaaattatttattgaaagtattgttttttttttttttgaatattaataagtaaatattttagtagatggaaaataggataaggtaatattgtttttattattattattagttgggattagaatagatatttaataaatagttttatattataatgaaggttggagaataaaggagtattaaagggatatggagggtaagggtagtttttttgttttttaattatatgtatttttcgttttatcgtaatatttgtttatgagttttttttaagtagatttataaatttaggttggttttttattttttatatatttgtttttgtttttttttttttagcgattttagttatgagaatttttattatttttattgttgtttttttcgtggttttttaggttaaggttgagttattttaagttgaggatgatttattgtaggtaaaagtttatgaggttgatgtttaggagtagcgtggggtaaatgattaggattttgtcgttttttttgtagaggatgtaagtttaagttttagagttttgggtaagagatattagtattgtagagttaggagtgtagagaggaaaattaagtatttttagaattagatttaatagttggtttttttttttaggtgattatttttttaggttttaattattttatgtttgtattgaaaaggaagaattagtgatatttaaggtatgatttttttttaaagattttttaattttatgataagtttatgaaattttttaattttttgttatgtagaaatgtattgaggagtttttattttaaggaagagagtttaattttaaaggaatgttttgttttgttttgttttgttttgttttgtttgatggagtttcgttttgttatttaggttggagtgtagtggtattattttagattattgtaatttttgttttttgggtttaagtaatttttttttttagttttttaagttattaggattataggtattagatattaagtttggttaaattttgtattttttttttttttagtagagacggggttttattattttggttaggttagttttgaatttttgattttgtgataaatttattttggttttttaaagtgttgggattataggcgtaagttattatatttagttgttaaaggaatgttttttaatttgatttttataggaatcgttggaaattggagatagttatatgggtgtatttagatgtgtgtgtgatagggaaggagtagataagtatagtatattagaatgggtttttaattttgtgtgtgattaatattgttttgcgtatttatttttattgatggtgtgattatgttattggttgtaatgtagttagtattatatgttagtaagtatgtaattttttgaagattttttttattgttcgttgttgattttggtgtttaatttttgatgttttttttttttgtttttagg

SEQ ID NO: 566 - DNA, 6127 bp, Artificial Sequence
  chemically treated genomic DNA (Homo sapiens)
tttggggatagaaagagagagtattagaaattgagtattagggttagtagcgggtagtaaagagaatttttaggaagttgtatgtttgttgatatgtaatgttggttgtattatagttaatagtatgattatattattaataggaataaatacgtagagtagtgttggttatatataggattagagatttattttgatatgttgtatttatttgttttttttttgttatatatatatttgaatgtatttatatgattgtttttagtttttaacggtttttataaaagttagattaaaaaatatttttttagtagttggatgtggtggtttacgtttgtaattttagtattttgggaggttaaggtgggtttattataaggttaggagtttaagattagtttggttaagatggtgaaatttcgtttttattgaaaaaaaaaaaaatataaaatttagttaggtttggtgtttggtgtttgtaattttagtgatttgggaggttgagggagagaattgtttgaatttaggaggtagaggttgtagtgatttgagatagtgttattgtattttagtttgggtgatagagcgagattttattaaataaaataaaataaaataaagtaaaataaaatatttttttaaaattaggtttttttttttgaagtagagattttttaatatatttttatatggtaaaaaattagaaaattttatagatttattatagaattaaaaaatttttagagaaaagttatgttttgaatattattgattttttttttttagtataaatataaagtaattgaggtttggggaggtgattatttaagagaaagagttagttgttggatttaattttagaagtgtttggtttttttttttatatttttagttttgtaatgttggtgttttttatttaaagttttaagatttgagtttgtattttttgtaaaggagacggtaaagttttggttatttgttttacgttgtttttgggtattagttttataagtttttgtttgtagtggattatttttagtttggagtggtttagttttggtttggagggttacgaggagaatagtagtgaggatggtgagggtttttatggttagggtcgttggaggagaaagagtaggagtagatgtgtggggagtgaggagttagtttggatttataggtttgtttggagaaggtttatggatagatgttgcggtgagacggggagtgtatgtgattggggagtaaaagagttatttttgttttttatgtttttttgatgtttttttgttttttaatttttattgtagtgtgaggttgtttattgagtgtttgttttggttttagttgatagtgatgataagaatagtgttattttgttttgttttttatttgttggaatatttatttgttaatatttaaaaaagaaaagaatagtgtttttaatgaataattttaggaattaaatgttttttattttttgaaggtggggttggttattttttggaggtgtaaatttggaggttagagttggatttcgttaaagtaaagagttaatttattgtaggatttagggggtatttttgtttttatgaaggaggttttgagattatggggtgaataggtttttgtggggtatagtgtggagaagataatgattttattagtttataagggaaaagaatttagtgggatattaggtaaagagttagtaaaattaaagttaaaagatttattttaagaaatttatgtgatttgaatgtattaagtaaaatatgtattaggtatttttttttattttgagaaatatcgaaataattgatatgtttataatttttttttgaaattttattttatttttaattttagaaaatgttgaattgtttataaggattatttaaagggtaaaaggagtaatgagtttttatttttgttttagttttgtagttttgttttaggaaatttttatttaaaaattaaatattggtttgtgttttgttttatttttttaatgttttaatttgaatatttcgtagcgtaaaatatatagaatattaatattatttttatatttttttgtgtttggttttatatttaagtatgttatttattttgagttaagtttggtatatgttaaaagagaagggtttagttttattttttcgtatatggaaatagtatttttattattatttattgaagagatttttttgtttttatagtgttttttttatgttattgttaaaagttatttgaatatatgggtttcgatgtgtttttggattttttaattttattttattggtatgtgtcgggttttatgttaatattatattgttttgattatcgtagttttgtaatataatttaaaattaggaattgtgatgtttttaattttgttttttttttttagaattgttttgttaatttgggtttttttatttattttatataaattttaggaatttttttttatttttgtaaagaatgttatggggattttgataggaattgtgttgaatttgtatattgttttgtttgggatagatattttaataattttaatttttttaatttttagtttaggatatttttttatttatttttatattttttaattttttttattatttttttttttttatttttagtgtgtagattttttatttttttgtttttttttaggtgttttattttttgatgttattgtatatggaattgtttttttgatttttgttttagttttgttagggaatttatgggtatttaaaaatgtatttgttttgtatttatttgaattttgtttttatttatttagtaggagatgattatttaattaatatttaaatttcgaattaaattttttttttttaatttaaattgtaattgtttattgtgatttatagttgtttatgtttttttttttagtagtttatgggataggtaataattattttattatttggaaattttattttggagttgttatttagatattttgatttagttaataggataagatatttttgtaaataagtgatttaatttgttttgatttaaaggagtattttggaattgtatgttttatttttggaaattaagaagtgtttttagtttattttaattgaaatagaagataatgtagattaatttttatgggtattggtaaatgtttagatagatggggtgtaggaaggtttattaggatttatatcgtagtttgtaaagttattataattattacgttaatagacggaacgtttggaagtaaatagaatttttagaatagtagaatattaaagggtgttagggataagggaattttacgtagtttttttttttttttttatttatttttttgtttttagagttatatatatgtaaatattgaagtataagttttattttgaagagtttatttattttaggatttagtttttaatgattatgtataaaatcgaggtaggtatattttttttttgtttagttattaggtttttgtaagagaagtaatttttttatcgtgattcgtagttacgaggattttatttttgttaattgttttttttgagttaattttattttatttttatatggaagttttaataagaatcgagtattttgtagatgttatcgagatgaagttgatttaggttaagggttgtttttgttgtttttagtggttttagtatatttttattttgagatgtttttatatattagacgttgatttagtagagtttatattattttttagtaaagaagaatttgtttttatagagaattgggcgcgtagtattgtagtagtattttaaggatagtaggtggtttttttgtttttaaataggagttgatttaagagggattttaaatgggagcgttgtaaagtgttgtttagtaaatatattgtttttttttgtattttaaagtgtatatattataatattagtttagggggtatagaatatattgttgttggtttcgtgttagcggtagttgttggttttggaaggttggtttgtttcgtttttaatttagtgttatgatgtcgtttttttttgtgttggttgcggggttgaggatttgagtttgggggtttttgtttttttttttgggtggtaatgtttttgtttttgttttttttttagtttgtggtggggattcgatagttagggtaggttaggtttttagtttgtgttgaggttttatttgggttttgtttttgttttttttaggtggtttttaaattttaattagaatagagtgagtttgtatttcgtggttttttttatttttttttttgggttgtattagaattttggtagaaattagcggtttaagtaaaaaatggtgttatatgtaaaagtttttgtaatatttttatttttatttttatttattttgtttttagtatagtgttttggatttgttattagtgttaattttgagtgtagatataattgaaattgtttttttatatatatgtagtttagtttttagatatttaataagagttttgatatttttaagttggggtaaatattttggggaaggtataggtgggggtgtaggtgtgggtgtgagaggagaaagttttttagtagtagtaaggatatttttatattttttgaggttgtttggtgattttagtagatatagtgagtgtggattttgggtagggttttgggatatggttttgatttagtgtggaagggtagttttggaatagagtgtgtgtgttagcgtggggtagagcgggggttgcgtgggggtgagttttgagaattgtttattttttagtttttgagagtgtatcgttttgtttttttttttagttttttgtttatttttttgtagggagggttttggtgttgtttgtgttatatagtaattttcgggtttgtagatttagttgggataggtaggagttttaagttttttgttttttgttcgttttttttagtcgttttttatatgttgtttatgtgtttggtgttgttgtttgtagtaatttttataaatgattatgaaagaataatttttttgggttgttttaaaatgtggttttaatttttggattttttttttatagaaagggaggtttattttttttttgttggatttaggtcgggtgatatttttattaatagaatgtatttgatttagtattatgtcgtttgttgggtttaggtgttaagatattggtattttttatttttatcgttttggatggcgttgtagttggaatatttttgtttttttgaaatttatatattgaaatattaaattattaggtgatagtattaataggtggtgtttttggggaggtgagtaggttcggagggtattttatgaataggattagtgtttttatagaagagattttaaggagtttttttattttttttattaggtgaggatatagtgaggaggtgttatttatgaacgaaaaagttggtttttagtagatattaaatttgttgttattttgatttggattttttaatttttagaatattgaaaaatatatttgttgtttataagtaatttagtttatggtatttttttttaaatagtggtttaaacggattaagagggttggttatttggggagtttagatatcgtgttttgaggaagttttagttttttatagggaagatgaattgagggtatttgcgagggtgagttaaagaatatagaatagttagttttttgggaaaaattaaaattttgatttatagtgtttgtaaatttttgtggttagaatttttttagttttggatcgtttaaaaaatgttatataaattattttttttatgagtcggtatgatttggttttagcgtattataaggttttattttttagttttgtgagagtttttagttgagttagtattgtttgttatttgtgcgcgagtgttttagttttgagttttttagattttagtagaattttttttttgagttagggttaaattgttaaggtatgagtgaagatttgatggtgttgttttagtttattatgtttgggatatttttttatatagtagtagatgaatagagggtattgttatagttttggcgagaagttggatttgtgtatttttgcgtgtgtaaatttttgtt

SEQ ID NO: 567 - DNA, 11976 bp, Artificial Sequence
  chemically treated genomic DNA (Homo sapiens)
aatttagttttttttatttaggattagaaatttagttttttttatttgttagtggagggtggttaattttagttttttaattttttttaagtttttgttttatttttttttttttttttatattgtgtaagattttaatggttttttagtttttttttgggtttttttaagtttaagttgacgttttttttatgtattttcgatatttttatattagattagttttataatggtaataggtttatataattttttttttaaagtttttttattgtttaagaagaaaattaaagttgtttaataagatatttagaagtttaaatgtgtattttttacgtatatataagtttaaatgtacgtatatattatagcgtaaatatatatataaatacgtaagttaaaatgtatatatatatatatatacgtaagtttaaatgtacgtatatatatataagttaaaatgtatatatatataaatttaaatgtatatatataaaagtttaaatggatatatatataaatatataagttaaaatgtaaatatataaaagtttaaatatatatatatataagtttaaatgtacgtatatgtatatatatacgtttaaatgtatatatataaatttaaatgtatatatataaatatataattttaaatataggtagatatatatataagtttaaatgtatatacggaaaagtttaaatgtgtattatatgtatataaagatatgagtttaaatgtaaattatatataagttttaatgtattatatatatacgtatgtattttttatataggttttggtttttgtttttttgagatgttcgtggtttttttattatatttttatttatttggtttttatttgttttatagttttatttcgggtgttattttttttattagattgttatttattataggtgggttagtagttttatttttgggttgttaaaggtttgtgtattttttgttattatagtttttattagtttttttagttagcgtttatttataaaggttatattttggttaattgtgagtgatgaagttaggattttggttagttttattgtaatatttatgtgaaagtagatgttgtattttgtttgtatgtggttttttttgggtatatggtataggatttggtttttttattatttcgttcgggtttttatgtttttcgagttggttattacgttttattttttaagagcgtttaggagtgagttttgttttttagtattattttgttgatggacgtgagcggaatagggtgatgttttggatattgggattaaaatgatttttttttagtatttttataggatgtttgaaattttgaaaatgtaattttaaaaagtaaagtgtttttttttaaaagaagatatgtatgtagttaagagatatatgaaaaaatgttcgttatttttggttattagaggaatgtaaattaaaattataatgagatattattttttattagttagaatggcgattattaaaaagttaggaaatagtaggtgttggagaggatgtgaggaaataggaatatttttatattgttggcgggattgtaaattagtttaattattgtggaagtcggtgtggcgattttttagggatttagaattagaaatgttatttgatttagttattttattattgggtatatatttaaaggattataaattatgttgttataaagatatatgtatacgtatgttattgtagtatttttataattgtaaagatttggaattaatttaaatgtttattaatgatagattggattaagaaaaatgtgatatatatatattatggattattatgtagttatgaaaaaggatgagtttatgttttttgtagtaatatggatgaagttggaaattattattttgagtaaattattataaggataaaaaattaaatatcgtatgtttttatttataggtgtgaattgaataatgagaatatatggatatagggtgggtaatattatatatcggggtttgttgtggggtagggggaggggagatagatagtattaggagaaatatttaatgtaaatgatgagttaatgggtgtagtaaattaatatagtatatgtataaatatgtaataaaattgtacgttgtgtatatgtattttagaattttaagtataataaaaaaataaataaaataaaaaataaaaatgaaatttagaaaaaaagttttttaggtttagagtagaaaatattagttttgaaaattaggattttagggtttagattttttttatttttaggatttatagatattatcggattttatatggtgttcggtagtattttgagattttttattttattattttgtaaatttttaaaatttgagataggttttatttaatttaaaaagtttattttgttaaggttgaggatgtatttgtgatatagttttaggaaattttaataatatgtgttttaggtggttaaggtatagtttgtttttatatattttagggagatatgagatattaattaatgtataagaagtataatagttttgtttagaaaggtagagatagtttaaagtaaggtttttattattgggggtttttaggttataggtatgtgagagatagatagttgtattttttttattgtatttttgagacggagtgcggttttgttatttaggttgaagtgtagtggtgcgatttcggtttattataattaatgtgttttggttttaagtaatttttcggttttcgttttttgagtaggtgggattataggtgtgtgttattatatttagttaatttttgtatttttagtaaggacggggttttattatgttggttaggttggtttcgaatttttaattttaggcgatttgttcgtttcggttttttagagtgttaggattatagacgtgagttattgcgttttgatcggttgtatttttttgaatttattataagtttttttaaaaaagttaatcgaaatacgtatgtatttttgggagtaaaaagatgatttgaatagaaaaagaggtagattcgtaataagtagtttttagtttgaaggtgtttgagatattttttttttataattttattgaatttatatttggtgtaataatttggaagtttttttaggaggcggttagtatagaggttagggaatgaggttttttaggttattatattagttttttatttattagtagggtgattttgggtaatttgttttaattttttgaattttagtgttttttttttttaatatgaggattatattgtttggttaaagaattatagtgtggttttaataagatagaaggaaagggatagaaatagattcgatagaatattgtagttagtttattgaggtagtttatagacggtgtttgggaggaatttggaagaggttgagttatgttttatttagtattattaagtaaatttgtgtttcgattgagttttttattttttttataggattttttttttttttttttttttttataattttattgtttttaggttaggtttggtttagttttttttaagtttttttttaaatattttttgtgaattgttttaatgagttagttataggattttattgtatttttttgtttttttttttttgtttttttgaatttatttttttttatttttttttttttttttatttttatttttttttgtttgtttttatttttttgtttttttgtgtttttttattgtttttttgtatgtttttgtttttttttttgtttttgtttttgtttgtttatttttttggatttttttttgtttttttttggtaggggtgtagtgggagtatacggtagatatatgtttgggtgtagaatggtattttgttagcggtagagtggttgagggttattttattttgggtgttttatgttatgtggttgtagtatggggtttttattggattatcgtgatagtgtagggtggatgttatttttggaaattgagttttaagttgggttttttagtaatgttattattttttattaattttgatatttttcgaataaattttttttttttttggttagcgagagttagtgtttgttgtttgtaaataagttattgagatattaggaaagttgtttatagaattataatgaaaattagtaataaataaaatgttttttaaatttttagaattaaggaaaatttgagggatatttggagagttattaatagtattttaatttggtagttgtagttttgtagggtgggtttaggttgggttagatttttaatttttaagggttatattgggggtttattttttgaggagtgcgttttggaaacgttttaggaatatatttagtgggaaaagagaaaagttggtttatcgaggagagtgttttgtataaggggagagatgagaaggtagttttggttagaggaagaaattttattataattagttttttttttgtaagggaagagggtgaagtttgagtttgttttgtaggaagataattaaattaaagaggttaatattagtttagagtcgagcggttttttgtttagagttttttagtggtttttttttatgtgatttagaaggagggattttagtgtgaattgtttgttttagaaattttattagaattgtttaatttagaaaattaaataggaggagttggtattagggttttaggttgaaagttaaatttagcggtagttagatggagataatgtgttatgtgattgttgattgtttagggtaaatgatattaggggttagcgattagaagtttatttttgattgtggtatttttttttagtttcgtcgacgaggttgtgtaatttattagttttataaatatagtgacgttttagtttttggaagtttttgttagtttagtttttaaagaagttagtttttttttagtttttgaaattttgggtgttgtttgttagtcgttatgagaattttttattttttgttgtttattttttgtttatttttgtttgagatggttttaggtaagttttggtatttgttagagttttttatttttagggttggggataatggggttgatgtgagtttcggatggttgttttcgtgttttaagggacgaggaataagtagtaggaaagtatttcgtggttgagtggtttgtagttggtagaaggtagtaggtaagttttgttaagtttttagggtttgtgagtcgttaaggagtgagtttggtagggttatggcgtttgttataggtagttgtttatatttttgttttggatatgtagatagtattttatgtggatgagattgttgttttttttgtaagacgattttttatattgagaggttagttttttatgtagagagaggggtcggttttatttttagtttacgttattgggtgtagttttttggggtgttttggtataggtgaggtgttgtcgttttatttattaggttagtttagtcggtgttttggatttatttcgtgtgtaggtaggcggtttttttttttttttgagaaatgtatttatattttttaggttagtagtttttttagttaataggagggggttttttgtgagttaggtgtatgttagtttttttgggttaaagtagttatgattttgatatgatggtgggacgtgcgggaggaatcgggaatatgttttattttagttttatttttgtttatacgagttatatggtgttaagttttggtttatttatttgtagaatgaggggttgggaaggatgattttgaaagtaagtattttagtttagaaagtttttgtaagattttattgtaagtttttttaggttattattgtatttagtagataggtttaatttattttaattatgttttagtttttttatttgaaagttgagtataaaagtattttaaatgtagaattttttatgttgttagttgttataatggattttgttttttttttttttttttggtttttggtttttggtttttggttttgttttgttttttttttgagatagggttttattttgttatttaggttaaagtgtagtggtgtgatttcgttttattgtagtttttgttttttgagtttaggttatttttttattttagttttttaagaaattgtgattataggtatgtattattatatttggttaatttttttatttttattttttcgtagagataaggttttattgtgttgattaggttggttttaaatttttgggtataagtaatttttttagtttagatttttaaagttttgggattataggtatgagttattttatttagtttatcgtgtttttttgttttgttttgttttgtttttttgagatggagttttgttttgttatttaggttggagtgtaatggtataattttagtttattgtaatttttattttttgggtttaagtaatttttttgttttagttttttgagttagttgggattataggtgcgtgttattaagtttggttaatttttgtattttttagtatagacggggttttattatgttggttatgtttgtttttaatttttgattttatggtttatttgttttcgttttttaaagtgttgggattatagttatgagttattacgttcggtttatgtttttttaaaggaatagaaaatattattttatgttatgtagtaaaagtagatgttatttaattatatttatattttagtttggggtgtgtgtatatgtttttattgagtagtagtgagaaatttttttttgatggtggtttagtttaaatttaaaagggtttgaaaggtattttgttaatataaagaatttttgtttttagtttattatatttaaattgaattatgagaagttattttcgagtttttttagttataatttttttttatttttaagaataattatttatttgatttttatggtggtaattttttatatttatatttttgttatattaattaatatttaggttgaatagtatagtttggtttgtgtatatatttttattggttagtaggtgtttttatgtttttatttttatatgttgaaaagttgtattattggattataggttatgtatatatttaattgtattggataatgttaaattgttttttaagattatttatattaatttgtatttttataagtagtgaataagagttttttttgttttgtatttttgttaatatttgataatattaattatttttaaattttaattatttggtgagtgtagtaatagtttattggagttttaatttgtattttttcgataaataataagttgggtttttttatatatagttataggtaattgggttattttttgtaaaatatttgtttgttttttgtttatgtttttttttggattatttgtttttttttattggtttgtagttttttatgtattttttatgtaagttttttgttaattatatatattataaatatttttttttgttttgtgttttgattttttatttttttaatggaaatttttttagaaaagaggtttttattatgattttaatgtagtcgaatgtgttatgttttttttcgtaaggttattgtattttttattttgtttaagaagattttttttatattaaagatatgaagatagtttttagtattgttttttaaaagtttattttttttttttttatatttagatttataatttatttggtaatggggtgtgtgtgtgtgtgtgtgtgtgtgtgtgtgtgtgtgtgtgtgtggtttcggtatgaagtaacggttaagttattttttttttttaatatgaatatttgattgtttagaattaattttttttttttttgagattgagtttcgttttgttatttaggttgtagtgtagtggtataattttggttaatcgtaattttttttttttaggtttaagggatttttttgttttagtttttcgagtggttgggattataggcgtttgttattatatttggttaatttttgtatttttagtagagagtaagttttattatgttggttaggttggttttaaatatttgattttaagttatttgtttgtttttgttttataaagtgttgggattatagttatgagttattatgtttagtttagaattaattgttgataagattatttttttttatcgttttgttgagatattattattttatattaattttttatgtatgtatgagtttttttttatattttattttattttatttggatatttttttgtttttgtgttataagtatattgttttaattatagtggttttatatttagttttgaaatatagtaaagtaagattttttattttttttttaaatgtgtttcggttattttcggttttttgaatttttaaataaaatttagaattattttgttaaattagaatttttggggatttttatggtatttggttgaattagaagattaatttttttaaaaaagtaatttttaaatgttttaatagagtatttttatttatttaggttttttttattttaaaatgttttatgtttttataataattttttttatgttagtaggatgtgatgtttttgtttttgtttttgttttttttttaaattttgatttagtaattttttattgttggttttttaatatttataaagtgtatatgtgcgtgtgtgtgtgtgtgtgtgtatgttagatattttagttgttttttttgggttgtttggtttataattattggaaaataaaaatttttagaagtatttagattatattaatatttttaagaagtacgtaagagaaatagatataggtatagtaatatcgaatataaggtgaaggtaaatgttatgaaaatgttaaaggtaagtgtttttaaaaggtttttagattgaaagtagtaaagattgttttaataggaaggaattttattattttagattaaaggttgtaaaagtatggtttttggattagaagttttagtgttatttaggagtttgttttaaaatgtaaattattagttttaatttagatttatttagatgttgaggaatggaatatgattttgttatttaggtaatgagtatagtattttatagttagttttttatatttttttgtttttttttttttttagtagtttttagtgttttagtgtttagtttttatttataattgagaatatgtggtatttggttttttttttttgtgttaatttgtttaggatattggtttttagttgtatttgtgttgttgtaaaggatatatttttatttttttttatggttgcgtagtttttttcgttttaaatttgagaagttgttgtttagagaggttgagtggtttgtaaaagattatatagtagattagatgtggaatatagaatgtaattaaagtatttttttattaattttgttgtaattttttttgtgttttataatgtattagattttggaaggtaatgttagaaattagttttggttatgtatcgtgatattatagttaattagtagtgtggtgaagtggaatgagaattgaagtgagattaggaggtatttattttggtttggggttggtttttgattagttatatgttttgcggatattattggattttgtttttttatttggggagaggattatagaaaggttgaattaattgagtttcgaagtttattttggttttaaaaagttatatttatattaaatttgggttttttttgtttatttagtatatatatatttaattatttgattattgagaagaataattaagaataaaggtgtataaattttttcgattttaaagtgtttttaaatttatatgtttagttgatttttttaataatagataattatttggagaggttttatttttcgtagcgtgggttggagtaggtattttttaagtatttttttagtattgggagtttttagtgtagggagattaaagtagaaagtggagattttggtagagtttagttggttatgattttatttgaggttaatattatggcgagattattaaaatatagtataattttagatagttttattaggaattagttagagaaaaagaatataagttggtaattaagagattgtgttttgtatgaataaatgagtggttttggtttaagatgtttttttgagtattgggatgggagaattagagtgttttttaatttttttttatttttatagtaatataaaaaaatttttttttttttattttttttaatgtttggttttcgggttttttttaaatttttttatttttttgtggatgtgtttaagttggttaatagattttttaacgtttgaagtttggtattaatatagagtattttttattgaaatgaagttgaataaaacgttttgtagtggtaaaaagattttatatttgttgtttaatgaatgtagtatttattagttatatagtgttcgtgagtatttgtaatgcggttagggtgattttaattaatttaaaagagaatagttatagggagtatgtggttgttatattggatggtgttgttttgagaataaaatgagagaaatgaagtttttatttattttggttggcggaatatattgaagggattttgtattgatattaggttttaaattttgggaagtgtattggttaatttaaatatatttataggagaatgaagaggtttgggaagggattagaaattaggtattgaggataatgagaagagttttttaaaagtggaattattgtaaaaagtggaaaaatagtttttggatggaagttattgatgagataatttttatcggtgtgaaagttatttttttaatagagatttgtaatatgagaatgtattgttttttagggtagcgatggttttttgtattagttcgtttaggttattagatttatcgtttaaattgtttataaatagattaggtagtttaaataatagaaatttattttttcgtagttttggaggtaggaagtttgcgattaaggtggaagtagggttggtttttttttaggtgtttgtttttggttggtagatgatcgtcgtttttttgggtttttatatggttttttttttgtgtgtgtttgttttaatttttttttataaggatgtaagttttatggattagagtatattttaatgatcgtgtttaatttgaattatttttttaaagtttttttttttaaatataattattttttgaggtattgttagggtttcgatataggaattttttttttaggggatttagtttagtttaaaacgtttattagtggagatttgtaatatggcggtttgttggtttttcgttaggaatattataggcgattgttttttgttgtatggaatagaaggttattttagagtattgtttttatttattagatttgggatattgggagaagggtaaaataaagtttaagtagaaaaaaaaattatgaaagttttagagagtaattataattttagttcgatgtgaaacgattttagattttagttgaaatagtgatgtgggaagtgagggggtcgggatttaaggtagagggaatagcgtaattgaaggtatggaaggagggaagtgtaggttgtgtttgaagagtggtagttgtttttatatttttaaaatataggatgtgattttggggtgtgttgagataaggtagaaaatttgtttggaaaaataatttgaattttttgtatatttaaaattttttagtagaagaaaattttatttagaattttattgtttattttttggtttgtatttggttatagttggtatagttttagattgagtaagttgtttagatattttattttatgagtagttttaaagattaattatgggttaattttttggaagagaagatttttcggtgttttgtagttatttgttttgttttcgcgagatgtttttaaatcgttgtagttataagttatgagtttgaagtgtttgtgttttttttttatagg

SEQ ID NO: 568 - DNA, 11976 bp, Artificial Sequence
  chemically treated genomic DNA (Homo sapiens)
tttgtaaggagggaatataaatattttagatttatggtttgtagttgtaacgatttgagaatatttcgcgaaagtagaataaataattgtaaaatatcggagagtttttttttttaagaaattggtttatgattgatttttggggttatttatgaaatgaggtgtttgaatagtttatttagtttggggttatgttagttgtggttaaatataagttaaggaatgagtagtggggttttgagtggggtttttttttgttgagagattttaaatgtgtagggaatttaagttatttttttaaataagttttttgttttgttttaatatattttaaaattatattttgtgttttagaaatgtggaagtagttgttattttttaaatatagtttatatttttttttttttatgtttttagttacgttgttttttttgttttgaatttcggtttttttattttttatattattattttagttgaaatttaggatcgttttatatcgggttgaaattatggttattttttaaaatttttatagtttttttttttatttggattttattttgttttttttttagtattttagatttgataaatagagatagtattttggaatagttttttattttatgtaatagggaatagtcgtttgtgatatttttggcgagggattagtaggtcgttatgttgtaagtttttattggtaggcgttttggattgaattgaattttttaggaaaagaatttttgtgtcgaagttttaatagtgttttagaaggtgattgtatttggagagagaaattttaaagaggtgatttaagttaaatacggttattggggtgtgttttgatttataagatttgtatttttataagaagagattgggatagatatatatagaggaaagattatgtgaggatttagggaggcggcggttatttattagttaaggatagatatttgagaagaagttaattttgtttttattttgatcgtagattttttgtttttaggattgcgaggaaataaatttttgttgtttaaattgtttggtttgtttatgggtagtttaaacgataaatttggtagtttgagcggattaatataagaggttatcgttattttaggagatagtatatttttatgttgtagatttttgttggaaagatggtttttatatcgatggaaattgttttattagtaatttttatttaaaggttatttttttattttttgtagtaattttatttttgaaaaattttttttattgtttttaatgtttggtttttggtttttttttaaatttttttatttttttgtggatgtgtttaagttggttagtatattttttaaagtttgaagtttggtattaatatagagtttttttaatgtgtttcgttaattaaggtaaatagaggttttattttttttattttgtttttaaagtagtattatttaatatggtagttatatgttttttgtggttgtttttttttaggttaattgaaattattttagtcgtattgtaagtgtttacgagtattatgtggttagtgggtgttgtatttattgaatagtagatatagaatttttttattattgtagaacgttttatttaattttattttaatagaaggtattttgtattgatattaggttttaaacgttgggaagtttattggttaatttaaatatatttataggagaatgaagaggtttgggaagggttcggaaattaggtattgaggagaatgagaaaagaagagtttttttgtgttgttgtggagatggaagggaattgagaggtattttggtttttttattttagtatttagggaagtattttgggttaaggttatttatttgtttatataaaatatagttttttgattgttagtttatattttttttttttgattgatttttaatgaggttgtttgagattgtattatgttttaataatttcgttataatgttgattttaagtaagattatgattagttagattttgttaaagtttttattttttgttttagtttttttgtattggaggtttttagtgttggaaagatgtttagaggatgtttattttaatttacgttgcgaaagatggaatttttttaagtgattatttgttattagagagattaattgagtatataaatttgaaagtattttgaaatcgagaaggtttatatatttttgtttttgattgttttttttagtaattaaatggttgggtatatatatgttgagtaagtagaggaggtttaaatttaatatggatgtagttttttagagttaggatggatttcggaatttaattaatttaatttttttgtgattttttttttagatgaaggaataaggtttagtgatgttcgtagagtatgtagttggttaaagattaattttagattagaatggatgttttttgattttattttagtttttattttattttattatattgttggttgattgtggtgttacggtgtataattagaattaatttttggtattattttttaggatttagtatattatgggatataaaaggaattgtagtaaagttagtgagagggtattttgattatattttgtgttttatatttaatttattgtgtgattttttgtaaattatttaatttttttaggtagtagttttttaaatttaaaacggaggagattacgtagttataaaaaagaatgaaggtgtgttttttgtagtaatatagatgtagttggaggttaatattttaaataaattaatataggaaaagaaagttaagtattatatgtttttagttataagtgggggttaaatattgagatattgggggttattagaggggaaaggaggtagaggagtgtggaaaattaattgtggggtattatgtttattatttgggtgataagattatattttattttttagtatttgagtgggtttgggttggggttgataatttgtattttaaaataagtttttaggtgatattgaagtttttggtttagaggttatatttttataatttttggtttggaataatgaggtttttttttgttggagtagtttttgttgtttttagtttaggggttttttaaaagtatttgtttttaatatttttatgatatttatttttattttgtgttcgatattgttgtgtttgtgtttgttttttttacgtgttttttaaggatgttagtgtaatttaaatgtttttgaaggtttttgttttttaataattgtggattaggtagtttaaaaagaatagttagaatatttgatatatatatatatatatatatacgtatatgtgtattttgtaggtattagagaattaatagtaaagaattattaggttaagatttgagagaaagatagaaataaaagtaggaatattatattttattaatataaaaaaagttattatgaaggtatgaaatattttgaaatgaagaagatttaaatgagtggaaatgttttgttaaagtatttgaagattatttttttaaaaaaattaattttttggtttaattaaatattatgggaatttttagaggttttaatttgataaagtgattttaaattttatttggaaatttaaagggtcgagaatagtcgagatatatttggaaaaaaggtgagaggttttgttttattgtattttaagattaagtgtagagttattgtaattaaggtaatgtgtttatggtataaggatagaaaaatgtttaaatggaataagatagagtgtagaaagaggtttatgtatatatggagaattgatgtagaatagtagtgttttagtagaacggtggggaaaaatagttttattaatagttggttttgggttgggtatggtggtttatggttataattttagtattttgtgaggtagaggtaggtagataatttgaggttaggtatttgagattagtttggttaatatggtgaaatttgttttttattaaaaatataaaaattagttaggtgtggtgataggcgtttgtaattttagttattcgggaggttgaggtaggagaattttttgaatttgggagggaggggttgcggttagttaagattgtgttattgtattatagtttgggtgatagagcgagatttagttttaaaaaaaaaaaaagttggttttggataattagatatttatattggggaaaaaaagtaatttgatcgttattttatatcgaagttatatatatatatatatatatatatatatatatatatatatatattttattgttagatggattataagtttaaatgtaaaaagaaaaaggataagtttttagaagataatattggggattatttttatgtttttgatgtaaagaaagtttttttaaataagatagaaagtgtagtaattttacggaaaaagatatgatatattcgattatattgaaattatgataaaagttttttttttaggaaagtttttattaagagagtgaaaaattaaaatataaagtaagagaagatatttgtgatgtatataattgataaaaggtttgtatagaaaatatataaagaattataaattaataagaaaagatagataatttaaaagaaaatatggataaaagataaataggtattttataaaaaataatttagttgtttgtaattatgtataaaagggtttaatttattatttatcggggaaatgtagattaaaattttagtgagttattgttatatttattaggtggttaaaatttaaaaataattgatgttattaaatgttggtaaggatatagagtaagaggaatttttatttattgtttgtgggagtgtaaattggtgtaaataattttggaaaatagtttggtattgtttaatataattgaatatatgtatagtttatgatttagtgatgtaattttttagtatgtagaaatagaggtataagggtatttattggttaatagaaatgtgtgtataaattaagttgtattatttaatttgaatattaattagtgtggtaaaagtgtaaatatgaaaagttattattataaaagttaagtgagtgattatttttgggggtaggagggagttgtgattgggaaggttcgagaatagttttttataatttaatttagatataatagattgaaaataaaaattttttatgttaataaagtgttttttaaatttttttgagtttggattgaattattattagaaagaaattttttattgttatttagtaaaaatatatgtatatattttaaattgaaatatgggtgtaattaaatagtatttatttttattatatggtatgaagtaatattttttatttttttaaaaaaatatgggtcgggcgtggtggtttatggttgtaattttagtattttgggaggcggaggtaggtggattatgaggttaggagttaaagataagtatgattagtatggtgaaatttcgtttgtattaaaaaatataaaaattagttaggtttggtggtacgtatttgtaattttagttaatttaggaggttgaggtaggagaattgtttgaatttaggaggtggaggttgtagtgagttgagattgtgttattgtattttagtttgggtgatagagtaagattttattttaaaaaaataaaataaaataaaataaaaaaatacggtaggttgagtggagtggtttatgtttataattttagaattttgggagtttgaattaggagggttgtttgtgtttaggagtttgagattagtttggttaatatagtaagattttatttttacgaaaaaataaaaataaaaaaattagttaggtgtggtggtgtatgtttgtagttatagttttttgggaggttgaggtgggaggatggtttgagtttagggggtagaggttgtagtgaggcgagattatattattgtattttagtttgggtgatagagtgagattttgttttaaaaaaaaagtaaagtaaaattaaaaattaaaaattaaaaattaaaaaaaaaaaaaaaaaataaaatttattgtagtaattggtagtatgaaaagttttgtatttagaatgtttttgtatttagtttttagatggaaaaattgaggtataattggaataaattaagtttatttgttggatatagtgatggtttagagaaatttataataggattttatagagattttttgaattggagtgtttgtttttaggattattttttttagttttttattttgtagatgaataaattaaggtttagtattatgtgattcgtgtgaataaggatagggttgggataaaatatgttttcgatttttttcgtacgttttattattatgttagggttatggttgttttggtttagagaagttgatatatatttggtttataggaagtttttttttattgattggggagattgttaatttggagaatgtggatgtattttttaggagagggagaggatcgtttgtttgtatacgaggtgagtttaaggtatcggttgagttggtttgatgggtggggcggtagtattttatttgtattagggtattttaggaggttgtatttagtgacgtgggttgaggatggggtcggtttttttttttgtataggaagttggttttttagtgtgaggagtcgttttgtaggggaagtagtaattttatttatataggatattgtttatatgtttaggataaggatgtaggtagttgtttgtgataagcgttatgattttgttaggtttattttttggcggtttatagattttgaaggtttggtagggtttgtttgttgttttttgttaattgtaggttatttaattacgggatgtttttttgttgtttgtttttcgttttttgggatacggaggtagttattcgagatttatattagttttattgtttttagttttggggatgggaaattttagtaggtattagagtttatttgaggttattttagataaaagtaagtagagagtaaatagtagaaggtaggaagtttttatggcgattggtaggtaatatttaggattttaggaattggggagaggttggtttttttggaggttgagttgatagaggtttttagaggttggagcgttattgtatttataagattggtggattgtataatttcgtcgacggaattgaagggaggtgttatagttaagggtgaatttttaatcgttaatttttggtgttatttgttttgagtagttagtagttatatggtatattgtttttatttggttgtcgttggatttagtttttagtttggagttttggtgttagttttttttgtttggttttttaggttaggtagttttgatggggtttttggaataggtagtttatattggagtttttttttttggattatatggaggagagttattgggaagttttgagtagggggtcgttcggttttaagttggtgttggtttttttagtttgattgtttttttgtaagataaatttaaattttattttttttttttgtagaaggagagttggttgtaatgaagtttttttttttggttaaggttatttttttatttttttttttatgtagaatatttttttcgatggattaatttttttttttttttattagatgtgtttttgggacgtttttaaagcgtattttttagaaagtgagtttttagtgtggtttttggaggttgagggtttggtttagtttgggtttattttgtagagttataattgttagattggagtgttgttagtgattttttaagtattttttaggttttttttgattttaaagatttaagaaatattttatttattattgatttttattgtaattttgtgagtagtttttttgatgttttagtggtttatttgtaagtagtagatattggttttcgttgattaaggaagggaagagtttattcggaggatattagggttggtggggggtggtggtattgttggagaatttagtttgaggtttagtttttaggaatgatatttattttatattgttacggtggtttaatgagaattttatattgtagttatatggtatgagatatttagagtggagtgatttttagttattttatcgttggtagaatgttattttgtatttaaatatgtatttgtcgtatatttttattgtatttttgttagagaaagatagagagagatttagaaagatggataaataaaaatagagatagaggaagagatagagatatgtagagagatagtagagagatatagagaaatagagagatagaaatagatagagagagatggaaatagagagagagagagagatagagagaaatagatttagagagatagaaagaaggagatagaaagatgtagtgggattttgtagttagtttattgaggtagtttataaagggtgtttgggagaaaatttggaagaggttgagttaagtttgatttaggagtagtgagattgtggaaagagaaaagaaagaaggggattttgtggaaagagtagagaatttaatcgaaatatagatttatttgatggtgttgggtaagatatggtttagttttttttaagttttttttaaatatcgtttgtgaattgttttaatgagttagttatagtattttatcggatttgtttttgtttttttttttttgttttattgaagttatattatgattttttgattaggtaatataatttttatgttagagaagaaaaatattggggtttagagaattgaaataaattgtttaaggttattttgttggtaaatggaaaattggtgtaatggtttggaaagttttattttttagtttttgtgttgatcgttttttggggaggtttttaggttattatattaggtgtgggtttaataagattgtgaaagaaaaatattttaggtatttttaagttgggaattgtttattgcgaatttgtttttttttttatttaagttatttttttgtttttagagatatatgcgtatttcgattaatttttttggaaagatttataataaatttaaaagaatgtaatcggttagggcgtagtggtttacgtttgtaattttaatattttgggaggtcgaggcgggtagatcgtttgaggttaggagttcgagattagtttggttaatatggtgaagtttcgtttttattaaaaatataaaaattagttgggtgtggtggtatatatttgtaattttatttatttaaaaggcggaggtcggagaattgtttgaaattaggatatattggttgtagtgagtcgagatcgtattattgtattttaatttgggtgataaaatcgtatttcgttttaaaaatataataaaaagaatgtaattgtttgttttttatatatttgtgatttggaagtttttagtggtgggggttttgttttgagttgtttttgtttttttggatagaattattgtattttttatatattgattgatgttttatgtttttttaaaatgtataaaagtaagttgtgttttgattatttggagtatatgttgttaggattttttgaggttatgttataggtatatttttaattttggtaaaataaattttttaaattaaatgagatttgttttaaattttgggggtttataagataataaagtaaaaaattttagaatgttgtcgggtattatgtgaggttcgatggtgtttgtagattttgggagtgaaaggaatttaaattttggaattttgatttttaggattgatgttttttgttttgaatttggaaaattttttttttaaattttatttttattttttattttatttatttttttattatatttgaagttttagggtatatgtgtataacgtatagttttgttatatatttatatatgtgttgtgttggtttgttgtatttattagtttattatttatattaggtattttttttaatgttatttgttttttttttttttattttataataggtttcggtgtgtgatgttatttattttatgtttatgtgtttttattgtttaatttatatttatgagtgagaatatgcggtgtttggttttttgtttttgtgatagtttgtttagaatggtggtttttagttttatttatgttgttgtaaaggatatgaatttatttttttttatggttgtatagtagtttatggtgtatatgtgttatattttttttaatttagtttattattgatggatatttgggttggttttaagtttttgtaattgtgaaagtgttgtagtaatatacgtgtgtatgtgtttttatagtagtatgatttatagttttttgggtatatatttagtaatgggatggttgggttaaatggtatttttagttttagatttttgaggaatcgttatatcgatttttataatggttgaattagtttatagtttcgttaatagtgtaaaagtgtttttgtttttttatattttttttagtatttgttgttttttgattttttaatgatcgttattttaattggtgggagatggtattttattgtggttttgatttgtatttttttgatggttagggatgacgagtatttttttatgtgttttttggttgtatatatgtttttttttgagaagaaatattttgttttttaaggttatatttttaggattttaagtattttgtgagggtgttagaagaaggttattttagttttagtgtttagggtattattttgtttcgtttacgtttattaatagggtgatgttggagagtagagtttatttttgggcgtttttgaggagtgaggcgtggtagttagttcggaaggtatgggagttcgggcgagatgataaggaggttaggttttgtgttatgtgtttaggagaaattatatataagtagaatgtagtatttatttttatataaatattgtagtgagattggttagagttttggttttattatttataattgattaaagtgtggtttttgtgggtgggcgttgattaaggagattgatgggggttgtggtggtagaaagtgtataagtttttgatagtttagggatgaggttattgatttatttgtgatgaatgatagtttaatggaggaaatgatattcgggatgaggttgtagagtagatgggggttaagtagatgaaagtgtggtgggaggattacggatattttaggagagtagggattaaggtttatataggagatgtatgcgtgtgtgtgtggtgtattaaggtttatgtgtggtttgtatttaggtttatatttttgtgtgtatgtggtgtatatttaggttttttcgtgtgtgtatttaggtttgtgtgtgtgtttgtttgtatttgggattgtgtgtttgtgtgtgtgtatttagatttgtgtgtgtgtatttaggcgtgtgtgtgtgtatgtacgtgtatttaggtttgtgtgtgtgtgtatttaggtttttgtgtgtttgtattttggtttgtgtgtttgtgtgtgtgtttatttaggtttttgtgtgtgtgtatttagatttgtgtgtgtgtgtattttggtttgtgtgtgtgtacgtgtatttaggtttgcgtgtgtgtgtgtatgtgtgtattttgatttgcgtgtttgtgtgtgtatttacgttgtggtgtgtgcgtgtatttaggtttgtgtgtgcgtggagggtgtatatttaggtttttgagtgttttattgagtagttttggttttttttttaggtaatagggagattttggaagaggaattatatgagtttgttgttattatagaattagtttaatatggaggtgtcgaggatgtatggagagggcgttagtttggatttgggaagatttaggaaggggttgaggagttattagggttttatataatatggggaagggggaagaaatgagataggaatttgagaggaattaagaagttaaagttaattattttttattggtagatggaaggagttggatttttggttttggatggaaggagttggatt

SEQ ID NO: 569 - DNA, 5908 bp, Artificial Sequence
  chemically treated genomic DNA (Homo sapiens)
  unsure 4900, 4910: n is a or g or c or t
tatataatatttataattattttataattataataatatttatataattataaatattatttataattataatatttattattttataaaataataaatataaaatatataaaaatatttttataaaataataaaaatatatatatatatatatatatatatattttttgagataagtttcgttttgtcgtttaggttggagcgtagtggtataattttagtttattgtaattttcgttttttaggtttaagcgatttttttgttttagttttttaggtagttgggattataggcgttcgttattacgtttggttaatttttggtattgttagtagagacggggtttaattatgttagttaggatggttttgattttttgattttttgattggtttattttagttttttaaaatgttgggattataggcgtgagttatcgtatttggtaatttttttttattatttttgtagatatggggttttgttatattgtttaggttggttttgaatgtttggttttaagtgatttttttgtttcgtttttttaaagtgttgggtttataagtatgagttatcgcgttcggttgtagtttttttgttaattgagtatttattgttttttgtatttaagttatatttagggataatttttaacgttttgagttttggtgacggtttttattttatagatggggaaatcgaggtttgttttggggagtagagtgtggggtgggtattttgttttgtaggattttagaattatagtggaatttgagatggggaaattgaggttcggagaggggagggttattattattgtttcgtgtgacgcgttgacgatttgtttttatcgttatagtttaacgggtcggttattattaacgttaacgtgtaggtggtttagttgtcggtttagggacgtcgtttgggtaacggggtgtagtgtttggttatgggttggggttttttgggtaggaatcgtgggatcgttagcgttttgtaggagtttaacgtgacggtggtgacgtttttttgtcgtcgtagtaacgtttgtattttcgtgaggggtcggtaggtcggcgtttgtttcgtacgtgttttgggtgtttttttgttttttattcgtttttagttcggattgtagtaataggtatcgtggttagattttaggagggattttttaattttgataggcggcgggtaggtgggtagggtttcgtagtttagtttttttattttgtttgtttttatagggggatttcggtagttttttggtttgtaacgggttaatttacggaattgtttttttcgttcggggaggttgcgttttagggttttatttcgatgtttttgtttcggtggtatagtttgtaaattggatcgattttattatttaacgtttcgaggataatttttgtttttattttcgggattcggattcggttagtaggatttattgagaagggttgttcgggttattttagttgtttatatttatattttttagtatttggtataataaatattttttgttttgtagaatgtgtttgatgttttttggttgtgtgattgggtgttgaaaatggttagtaggtcgggcgtggtggtttatatttgtaattttagtattttgggaggttgaggtaggcggattatttgagtttaggagtttaagattagtttgggtaatatggtaaaattttcgttttattaaaaaaaaataaataaataaaataaaataaaataaaatggtttaagtttggtttagtggtttacgtttgtaattttagtattttgggaggtcgaggttggtagattatttgagatcgggagtttaagattagtttgattaacgtggtgaaattcgtgtttattataaatataaaaaaaattagtttggcgtcgtggcgcgtgggaggttgaggtaggagaatcgtttgaatttgcgaggcggaggttgtagtgagtcgagattacgttattgtattttagtttgggtaatatagagagatttcgttttaaaaaaaaaaaaaatatcggtgcggtggttcgtgtttgtaattttagttttttgggaggtttaggtaggcggattatttgaggtttaaagttcgagattagtttgattaatatggagaaattttatatttattaaaaatataaaattagtcgggcgtggtggtgtatgtttgtaattttagttattcgggaagtttgaggtaggagaattatttgaattttggaaggtggaggttgtagtgagttaagatcgttttattgtattttagtttgggtaataagagcgaaattttattttaaaaataaataaataaataaataaataaataaataaataaataaataaataaaaataaataataatgataataataataataaataataaattagaatttagagttttttgggtatttttggagtaagttattattagggggtagtatagttagggtaatggagtagaagtgatttttttatattgtgttttttttttttttgtttttagatggagtttcgttttgtcgtttaggttggagtgtagtggcgcgatttcggtttattgtaagtttcgtttttcgggtttacgttatttttttgttttagtttttcgagtagttgggattataggcgttcgttattacgttcggtttattttttgtatttttagtagagacggggttttatcgtgttagttaggatggtttcgattttttgaattcgtgattcgttcgttttgattttttaaagtgttgggattataggcgtagttattacgtttagttttgttgttatattattttttattttttgtgcgtatgaaataatttatagggggttaggtatggtggtttatgtttgtaattttagtattttgggaggtcgaggtgggcggattatttgaggttagaggttcgagattagtttggttaatatggtaaaattttgtttttattaaaaatataaaaagttagtttagtgtggttgtttatgcgtgtaattttagttattcgggaagttgaggtagtagaatcgtttgaattcgggaggtggaggtcgtagtgagtcgagattgtgttattgtattttagtttggacgatagagtaagattttgtcgtaaaaaaaaaaaaaaagtaagaaagaaagaaaaaaagaaggaaagagaaagaaagaaagaaaaagaaagggaaagaaagagaaaaatagagaaaggaaggaaggaaatgaggttaggcgtggtggtttatatttgtaattttagtattttgggaggtcgaggtaggcggattacgaggttgggagatcgagattattttggttaatacggtgaaatttatttttattaaaaatataaaaaattattcgggcgtggtggcggacgtttgtagttttagttatttcggaggttgaggtaggagaatggtgtgaattcgggaggcggagtttgtagtgagttgagatcgcgttattgtattttagtttgggcgatagagcgagatttcgttttaaaaaaaaaaaaaaaaggaaagaaaagaaagaaatgatttatggtgaagagaaaagtcgggggaatttcgtgtgttgttttttttggggataatgtttgaggttttttttataaggtatttttatttttttggtttttgtattatggattaatgtaacgtgaatttcgttggtttttgtggggtagatgtgaaaaatggagttatattatgagtaggtttgtagttttagtatttttggaggttgaggtgggaggattatttgagtttcggaggtcgaggaggttgtagtgagttatgattgtatcgttgtattcgagtttggatgaaagagtaagattttgtttgtaataaaataaaaataatatatataaatttttattttataaaaggttttatggtttagattttgagaagtattttattttaatttttttgtagagatggggtttcgtcgttttttttaagttggttttgaatttttgggtttaagagatgtttttatttgggttttttaatgtgtcgggatggtaggtgggagttattgtgttcggttagttttgattttgtttattagaatttgtttttagtgaatagtttgggagggggcgtgtgatttaggttttattaatttaaggtatttttgagatttggttggagtgaggaagaattttaggaggggtttattgagttattgggttgagtgtggggtttttggaaatatattaggggaggttggtgaggaaagaagttattagagaagaaaggagaagttagaagtagatattggatattgtttaggtatttggattaagttatatttgaaggcggtatttttgaattttttatataatttttatgatttaggttttatttagtttgtttgggtttttttgttttttgtagttagtttttttagttgtttttgttttggtttttttaattttttattcgttagggtgttaagttttagaggatatagggatagagataaaggtgttaagtgatttttttatttttaatagattttttttttaatatagaggaggaaaagaagggagggtagtaggataagaaagtgggttgtttatacgttgtggtttttagttaggattgtgaaatattttgggggattttgggtgtggtgaagttggggtcggggtgggtgtagtttttttttttgttttttgtttatttgagggattgttttttattagggttagtaggttgttaggtttatagaggttcgagggttttttagcgatttgtcgattttggtgtgagtttggtaggaggtaatttagtttcggggagggcggaggttgggcgggcgagtttttttttttttagttgggtcgttgtttattcggggancggttcggtnttttttatttttataaaagtatttttagggttttgtttgggttagtgttttagttatagcggttttattatgtatagttgggagcgtttggtagttttggtttttttaggagcggtcgtttgcggtgaggaggtttgggtttggggtgagggatagggttgtgtaggggcgtggtgttttttttcgttatacggacggttttttagtttttttaggtgggtaggaagggggtgtttttttttattaatggaaggttttgaacgttgaaaaattttagaaaatttagattggaaatcggaattttttggagttagttttttttgtagatagagtttgaacgtttgcgtggaaaattttatttgcgtggttgattgggttggtttaggtattggttgggttagttttattttttttatgtttaattggaaggtattgcgtttagggtagggcgttgggatttgttttcggtttttagtttattgtgggttttgtattttggggtattttcgttcgagggtatttgagtttgtaatattgaggggttttaagacggaaacgggatttttttttttttttttttttttttttgatagggagtttcgttttgtcgtttaggttggagtgtagtggtgcgatttcggtttattgtaaatttcgattttcgggtttaagcgatttttttgttttagtttttcgaatagttgagattataggttacgtcgattaaattttgtatttttttttaaagtagagacggggttttattatattggttaggttggttttgaatttttgattttatgatttgtatttttttttttttttttcgttttcgcgcggttttataaagtgttgggattataggcgtgagttatcgcgtttagagatgggatttttgcggggagcggtttggggggtgagagttgggatttcgttaggtagtttcgttcgggggaggagtttatttcgcggtttttacgcgttcgtttatttatagt

SEQ ID NO: 570 - DNA, 5908 bp, Artificial Sequence
  chemically treated genomic DNA (Homo sapiens)
  unsure 999, 1009: n is a or g or c or t
gttgtgggtgggcgggcgcgtgagggtcgcggggtggatttttttttcgggcgaggttgtttgacgggattttagtttttattttttaggtcgtttttcgtaagaattttatttttgggcgcggtggtttacgtttgtaattttagtattttgtgaagtcgcgcgggggcggggggggagggggggggtgtagattatgaggttaggagtttaagattagtttggttaatatggtgaaatttcgtttttattttaaaaaaaaatataaaatttagtcggcgtggtttataattttagttattcggaaggttgaggtaggagaatcgtttgaattcgggagtcggagtttgtagtgagtcgagatcgtattattgtattttagtttggacgatagagcgagattttttattaaaaaaaaaaagaaagaaaaaaaagaatttcgttttcgttttggggttttttagtgttgtaaatttagatattttcgggcgggaatgttttagagtatagaatttatagtgggttggggatcgggggtagattttagcgttttattttgggcgtagtgttttttagttggatataagagaaatggggttgatttagttagtgtttgggttagtttagttagttacgtagatgaagttttttacgtagacgtttagattttgtttgtaagaaaagttgattttagaaagtttcgatttttaatttgaattttttagaattttttagcgtttagagttttttattagtgaggagagatattttttttttgtttatttggaggggttggaggatcgttcgtgtgacggaagggagtattacgtttttatatagttttgttttttattttaggtttaggtttttttatcgtaggcggtcgtttttaggaggattagaattgttaggcgtttttagttgtgtatggtgaagtcgttgtggttgagatattgatttaggtagggttttgggggtgtttttatgagggtgaggggngtcgggtcgnttttcgggtgggtagcggtttagttggggaaaggggaattcgttcgtttagttttcgtttttttcgggattgggttattttttgttagatttatattagagtcgataagtcgttgggagattttcgggtttttgtgagtttgatagtttgttggttttggtggggggtagttttttagatgggtaggaggtagagaggggggttgtatttatttcggttttaattttattatatttagagttttttagggtgttttataattttagttggaggttatagcgtgtaaataatttatttttttgttttgttattttttttttttttttttttttatattagagagaaggtttgttgggggtaggaaggttatttgatatttttgtttttgtttttgtgttttttggggtttgatattttgacgaatagaaagttggaaaggttaaggtagaggtagttgggaagattggttataagggataggaaaatttagataaattgggtggagtttgaattatgaaagttatatggaaagtttagggatgtcgtttttaggtgtggtttgatttaggtgtttgaataatgtttagtgtttgtttttggtttttttttttttttttgatggtttttttttttattagttttttttggtgtgtttttagggattttatatttaatttagtggtttagtgggttttttttaaaatttttttttattttagttaagttttaagggtgttttgggttggtggagtttggattatacgtttttttttaaattgtttattgagggtaggttttgatgaatagagttagggttggtcgggtatagtggtttttatttattatttcggtatattgagagatttagataggagtattttttgagtttaggaatttaaggttagtttggggaagacggcgagattttatttttataaaaaaattaaaataaaatattttttagaatttgggttatagggttttttgtgaggtggggatttgtgtgtgttgtttttgttttattatagatagggttttgtttttttatttaggttcgagtgtagcggtgtaattatagtttattgtagttttttcgattttcggggtttaagtgatttttttattttagtttttagaagtgttgggattgtaggtttgtttatggtgtagttttattttttatatttgttttataggggttagcgggatttacgttgtattaatttatggtgtagggattagaaggatggggatattttgtggggaggattttagatattgtttttagggggagtagtatacgaggttttttcggtttttttttttattatggattattttttttttttttttttttttttttttttttttgagacggagtttcgttttgtcgtttaggttggagtgtagtggcgcgattttagtttattgtaagtttcgtttttcgggtttatattatttttttgttttagttttcggagtagttgggattataagcgttcgttattacgttcggataattttttgtatttttagtagagatgggttttatcgtgttagttaggatggtttcgattttttaatttcgtgattcgtttgtttcggttttttaaagtgttgagattataggtgtgagttattacgtttagttttattttttttttttttttttttgttttttttttttttttttttttttttttttttttttttttttttttttttttttttttttttttttttgttttttttttttttttgcgatagagttttgttttgtcgtttaggttggagtgtagtggtataatttcggtttattgcgatttttatttttcgagtttaagcgattttattgttttagtttttcgagtagttgggattatacgtatgagtaattatattgggttaattttttgtatttttagtagagatagggttttgttatgttggttaggttggtttcgaatttttgattttaggtgattcgtttatttcggttttttaaagtgttgggattataggtatgagttattatgtttggttttttgtggattattttatacgtatagagaatagaaaatgatataataatagggttgggcgtggtggttacgtttgtaattttagtattttgggaggttaaggcgggcggattacgagtttaggagatcgagattattttggttaatacggtgaaatttcgtttttattaaaaatataaaaaatgagtcgggcgtggtggcgggcgtttgtagttttagttattcgggaggttgaggtaggagaatggcgtgaattcgggaggcggagtttgtagtgagtcgagatcgcgttattgtattttagtttgggcgatagagcgagattttatttaaaaataaaaaagaaaaaaatataatgtggggaagttatttttgttttattgttttggttgtgttgttttttggtggtggtttattttagagatgtttaagagattttggattttagtttgttgtttattattattattattattattatttatttttatttatttatttatttatttatttatttatttatttatttatttatttttgagatggagtttcgtttttgttgtttaggttggagtgtaatggagcgattttggtttattgtaatttttattttttagaatttaggtgatttttttgttttaggtttttcgagtagttgggattataggtatgtattattacgttcggttaattttgtatttttagtagatatggggtttttttatgttggttaggttggtttcgaattttagattttagatgattcgtttgtttgggttttttaaagagttgggattataggtacgagttatcgtatcggtattttttttttttttgagacggagtttttttgtgttgtttaggttggagtgtagtggcgtaatttcggtttattatagttttcgtttcgtaggtttaagcgatttttttgttttagttttttacgcgttacgacgttaagttaattttttttgtatttatagtagatacgggttttattacgttggttagattagttttgaattttcgattttaggtgatttgttagtttcggttttttaaagtgttgggattgtaggcgtaagttattgggttaggtttggattattttattttattttattttatttatttatttttttttaatggagcgggggttttgttatgttgtttaggttggttttgaatttttgagtttaagtgattcgtttgttttaattttttaaagtgttgggattataggtgtgagttattacgttcgatttattgattatttttaatatttaattatatagttaaggagtattaaatatattttataaaatagagaatgtttattgtgttagatgttggagagtgtgggtgtgggtagttgaggtgattcgggtagttttttttagtgggttttgttggtcgggttcgggtttcgggggtggggataggggttgttttcggagcgttggatgatagagtcgatttagtttataaattgtgttatcggggtaaaggtatcggggtagagttttgaggcgtagttttttcggacgaaggaggtaatttcgtggattagttcgttgtagattaaggggttgtcggagtttttttgtggaggtagataaggtggggaagttggattgcgaggttttgtttatttgttcgtcgtttgttagggttgggaagttttttttagggtttagttacggtgtttgttgttgtagttcgggttgggagcgggtggggagtagagggatatttagggtacgtacgaaatagacgtcggtttgtcggttttttacgagagtgtagacgttgttgcgacggtagagggacgttattatcgttacgttgagtttttgtaggacgttggcgattttacggtttttgtttagaaggttttagtttatggttaggtattgtatttcgttgtttaggcggcgtttttgagtcggtagttgggttatttgtacgttggcgttgatggtggtcgattcgttgagttgtggcggtggggatagatcgttagcgcgttatacggggtagtgatgatgattttttttttttcgggttttagtttttttattttaggttttattgtggttttgggattttgtagggtaggatatttattttatattttgttttttaaggtaagtttcggtttttttatttgtagagtgggagtcgttattaaggtttagggcgttggaggttgtttttggatgtggtttgagtgtaggaagtagtaggtgtttagttaataaaaaaattatagtcgggcgcggtggtttatgtttgtaagtttagtattttgggagggcgaggtaggaggattatttgaggttaggtatttaagattagtttgggtaatgtggtaaagttttatgtttataaaaataataaaaaaaaattgttaggtgcggtggtttacgtttataattttagtattttgggaggttgaggtgggttaattaaaaggttaggagattaagattattttggttaatatggttaaatttcgtttttattaataatattaaaaattagttaggcgtggtggcgggcgtttgtagttttagttatttgggaggttgaggtaggagaatcgtttgaatttgggaggcggaggttgtagtgagttgagattgtgttattgcgttttagtttgggcgatagagcgagatttgttttaaaaaatatatatatatgtgtgtatatatatatttttattattttataaaaatatttttatatattttatatttattattttataaaataataaatattataattataaatgatatttataattatataaatattattataattataaaataattataaatattatata

SEQ ID NO: 571 - DNA, 6192 bp, Artificial Sequence
  chemically treated genomic DNA (Homo sapiens)
gttttaatcggagaaatgggaaattggattgattaagatttgaaaatgaaataggtaattgttgaagagtattggtttatttaaaaagcgtgtatttgttttttgttagatagttatagagtttgttatgaaaagtttaagttttggttaggtattgtagtttacgtttgtaattttagtattttgggaggttgaggtgggcggattatgaggttaggagattaagattattttggttaatacggtgaaattttatttttattaaaaatataaaaaattagttgggtatggtggcgggcgtttgtagttttagttattagggaggttgaggtaggagaatggcgtgaatttaggaggcggaggttgtagtgagtagagatcgcgttattgtattttagtttgggtgatatagcgagattttgttttaaaaaaaaaaaaagaaaagtttaagttttttttttaggttgttagtatgttttgtggtaattttatttttattagttttggaaaggagggtaaaggagaagtagagttgaaaattaaataagtgatggttatgtttttttaaaggattttagatttttttttattaaatatatatatagagagggtaaatttgtaaaattaaaagaatttttgggtataatagtggttttaagtggtaagatttttagtattgtttatagtattggtaaattaaatgttttataagaattaggaatagagtcgggtacggtggtttacgtatataattttagtattttgggaggttgaggcgggtagattatttgaagttaggagtttaagattagtttggttaatatggtgaaatttatcgttattaaaattataaaaattagttaggtgtggtggtaggtattcgtagttttagttatttgggaggttgaggtaggagaattgttcgaattcgggaggtagtgagtcgagattgcgttaatgtattttagtatgggcgatagagagagatttcgttttaagaaagaaaaaagaattaggaattgaggatattttttaattttagtttgtgggtatttttaatataaaataatttagagaaatttagattttaagatgttttagtattttagtaaattaaatgtggtaaggtaagaaaggagaggtttttttttcgagatatttgttaaattttagaatatttgatagtgagaaggttagaattagtttttgttattttttatgttttataattaagatattttttttttgaattatttatattgttaatagaaattggtatgggggaatatattaatttttttaagtttaatttttgtaatagacgtgtagaataagatagtaagaaatattaagcggtggttttttgtttttgaaggaagtgaaatattagtaagttgttgaaaatttttagaggtgttttaaggagatgggagaggaggaatgaggttttaagttgaaattattttttttttttttattttaattttaattaaatttaaaaatgtatggatgattagtggagttatataggtttaatataggtttaatagagtatacgatttggggtatgttataaatttttagtatttatttttgtgaaatggaggttagtagtttgtattttataaaggttgtagtgaatattaaacgagataatagatgtaatttgtgtttaatatgatattatataggtagttaaatgtaagatgttttttagtttttttttttttattttattttattttatttttggattataaattttttcggagattttattatttattgtttttcggtcgtagaggtataggcgttaacgttggtttttatggtttttttattggagtgggatttgtttgaatttgtaggtgaaaagttagagcggagttttcggttaataaaattaaatttagggaagcgaggatgggtttttagttaaaagtttggtggcgtttgttagttatagtgcgttttttttttattaacgtattgagagggttcgattagattatttttgattatttaatttgacgagagaagcgtaaaggtgattatagatgaagaggttggtagtcgttttaggaggttgaggtcgtgagggagtgggaattttaatggaaataggttttttttcggaggggatagtcgggaacgatcgatttatttttttttttttaagttttcgtagtttaaggttggggattttttaagggtttcgttattttttttaataagtttaagtgggattagaggtgttggtaggcgggaagtggggattcgggggtatagttaaatattagagttcgggtttcggaatgtggttaaagaggggttatcggggggaggggtcgggtggggaggatttggggaggggcggggtttaggagggggtaagaggtcggggtttttagtttcggagattcggggtttttattcggtttttagtcgtatgttgagcgttttttttagtcggggttttcgtcgtatagcggggtagttttattttttttatttggttcggttgttttgtttgtttcgaggacgttatttttttgaggtttgattaattaatcgtcgttgggcgaggttttttttaggcgttttcgttttcgttttttcgtttagattaaggtagtcggaatagagtttgtcgatgtaggggattggggtagaggggtggagttcgggtgttcgggttattttgtatagttttcgttaagattttgttttttaggaagattttaagtttatattttttttgcgttgttatatgtgtattattttggttttgttttttttttttgagacggagtttcgtatttgttgtttaggttggagtgtaatggcgcgatatcggtttatcgtaattttagtttttcggttttaagtgatttttttgttttagtttttcgagtagttgggattgtaggtatgcgttattatgttcggttaatattgtatttttagtagagatggagtttttttatgttggttaggttgttttcgaattttcgattttaggtgatttgttcgtttcggttttttaaagtgttgggattatagaagtgagttatagcgttcggtttatattatttttattgagttaatttttgtttatttttatagtgttatgggtatatttagggatttgttaatggatgaatgcgaagaaatttggaaattaatttttagatattagtttagttttatttattgagtgtttattatatgttagggattttggtaggttttgaaataaaaatatttaagatttaatttttatttttacgtttaggttaaatatatttataattatagtattatggggataggattcggataagtgtgtaggtttattgggagaatataaaagggggtattttgaagagaagaggtttttataaaacgttattattttatattggttgaattgttagatttttttaattgttagattttaaattaaatattggacgggagtagtggtttatatttgtaattttaatattttaggaggttaaggtaggaggattttttgagtttaggaggttgaggttgtagtgaattatgattatgttattgtattttagtttgggcgatagagcgagattttgtttaaaaataagataagaaaataaaaaatgaaattatatgaaaaaggatatatatattagagttaatcgttagtttttattatagttgtgttttgattaatatagattgtttaaaagggatgatttaatgaataattttttttattaaacgttgttttaaatgtttaaattttttttgagataatatttaatttttttttttacgttttttttgtttgtttttgtttttgtttttgtttttgtttgagacgaagttttgtttttgacgtttaggttggagtgtaatggtgcgatttgggtcgattgtaattttcgtttttcgggtttaagcgatttatttgttttagttttttaagagttgggattataggcgtgcgttattacgttcggttaatttttgtatttttagtagagatagggttttattatgttggttaggttggttttaaattattgattttagattatttgttcgtttcggttttttaaagtgttgagattataggggtgagttatcgttttcggggtttttgtttacgtttttataaataaaatatgaggtgggaggattgtttgagtttaggagattaaaattgtagtgagttattatcgcgttattgtattttagtttgggagatagagcgaaacgttgttttaaaaaaagaaaaaagaaataaggaaggaaagtgtttttcgaatgaataaatatgagtagataattatttttagtttatataaaatgtttttttttaagagaggaattttttgattatttttattattatttttttaattttagatgtttattttttaggaggaaaaaaataaatttttttatagtagtagtattaaaataaagatgaatatgttgttaagaggtatttgaataatttttaatagtgtcgagtcgtattttttttttttttttcgatgtatttgagattttaatgtttattatatttatttaagcgttttgttttgagattttaaattaatttgtatagttgaagtaggaaatagaatgggtggaaatatgcgggtgtttgtattagtattatgtattttatatgcgaataggaatgttttaaaaatttaatatagtatatatgcgtgtgtatcgttatgtaaaataagtttttattggttttatatttgaacgcgcgaatgtagtttttaaaagttaaaaataatttttaggttgaatcgcgcgatagaacgaaagcggttttaaatttagagattatagttttcggtatgtttcgacgttatacgtgattagcggtaattagaattatatttttcggcgtgttttggttttacgtgtgatttgttgcggaacgaattatatttttcggtaggttgcggaagggggtcgagtagaaggatcgtcgtttcggtttttcgcgatttttcgaaggtgggtaggttttattttgtggaggatggaggtgatcggggacgtcggggtattagaatttggcgagattcggattttaaagtcgtgtttgttgcgtcgtaattatagtcgcgaatagtacggcgtggtcgttttttgtttcgaagatttgaggagtaagggttggttcgggatttcgggcgagggtgtgggggagttagggtcgggtgaggacgttcggcgggggcgaggcggggttaggagaggcgatttggggatttttgtatttcgggtggaggtttgggatagaaacggttcgagtgggtatagcgatttatagatttaaggcgtttgagcgtaattaatttcgtgtgagattttacggtggtgggaagatagttaggaagtaatgtgtaaattaagttagattcggtttaggttttttgtttgaaattatttcgatgttggattaaacggattttattgggtttttgttatttcgttatatttagatggtataagaatttttagttgagtttacggcggtgtggggaggggtttttatcgttcgttttggtaggaatttatgtaggaaagagggagttgttattgattatttttggaggtttagataaggaacgtgagttgtaagtgacggagtcgacggaagtttcgagttcggttttatatttttattagttgtttggttttgtatttaattagtttttaatttttagtttttttattagtaaattgggtataatatttatagttttgttttaaagggttgttggtttttttaaataagatgatatatttaagtgatttataagttttattagttagtagtaataaatcgtttatttaaagaagttttataggttatatgtgtgagttagttttaggtatgtagttatagtgtgtgttagagggtatagttgtttttttttagttattaatagaaattatatggaaatttttagagatttatgaatagttaaagtattataaatgttttggtaatatggattttgtatataagtatttatgtatttttttttttgatattagattattttatttttaatttttttttagtgtcgtggttggatgtgcgtggtatagaggttggtgttttttgtagtttagcgtatatatgttttgttgttttattgggtggta

SEQ ID NO: 572 - DNA, 6192 bp, Artificial Sequence
  chemically treated genomic DNA (Homo sapiens)
tattatttaatagaatagtaaggtatgtatgcgttggattgtagagaatattagtttttgtgttacgtatatttagttacggtattgaaggggaattagaagtaaagtaatttaatgttaggaaaaaaaatatataaatgtttatatgtaaaatttatgttattaaagtatttataatgttttggttgtttatgggtttttgaaaatttttatatgatttttgttggtgattgagaggaagtaattgtgttttttgatatatattgtgattatatgtttggggttggtttatatatgtaatttgtaaaatttttttgggtaagcgatttgttgttattggttaataagatttgtaagttatttaaatatattattttatttgagagaattaataattttttgaagtagggttataaatattatatttaatttgttgatgagaaaattgagggttgagagttggttaagtgtaaggttaagtagttggtaaaggtatggggtcgggttcggaattttcgtcggtttcgttatttataatttacgttttttgtttggatttttagaaatggttagtagtagtttttttttttttgtataggtttttgttagagcggacggtggaaatttttttttatatcgtcgtgggtttagttgggggtttttgtattatttgagtgtggcggagtggtaggaatttagtggggttcgtttggtttaatatcgaagtgattttaggtaagagatttaagtcgagtttggtttaatttgtatattgttttttggttgtttttttattatcgtggagttttatacgagattaattacgtttaagcgttttaaatttgtaaatcgttatgtttattcggatcgtttttgttttaagtttttattcgagatataagaatttttaagtcgttttttttgatttcgtttcgttttcgtcggacgtttttattcggttttggtttttttatattttcgttcggggtttcgagttaatttttgttttttaggttttcgaggtaggaggcggttacgtcgtgttgttcgcggttgtagttgcggcgtagtagatacggttttagagttcggatttcgttagattttggtatttcggcgttttcggttatttttattttttataaggtgggatttgtttattttcgagaagtcgcgggaggtcggagcggcggtttttttattcgattttttttcgtagtttgtcgggagatgtagttcgtttcgtagtaaattatacgtgagattagggtacgtcgggaaatgtagttttagttgtcgttaattacgtgtggcgtcgaagtatgtcggaaattgtagtttttgggtttaaagtcgttttcgttttatcgcgcgatttagtttaggagttgtttttaatttttaggagttgtattcgcgcgtttaaatataaggttaatagagatttattttgtatgacgatgtatacgtatgtatattgtattgaatttttagagtatttttattcgtatatgagatgtataatgttaatatagatattcgtatgtttttatttattttattttttgttttaattgtgtaaattagtttggggttttagaataaaacgtttaaataaatatagtaagtattaaagttttaaatgtatcggagaggaaaggggaaatgcgattcggtattgttggagattgtttagatgttttttgataatatatttatttttgttttaatattgttattatggaaaagtttgtttttttttttttgaaaaataaatatttaagattaaaagaatagtaataaaaatgattaaaaagttttttttttaaaagagggtattttatgtaaattagaagtaattatttgtttatatttatttattcgggggatattttttttttttgttttttttttttttttttgagatagcgtttcgttttgttttttaggttggagtgtagtggcgcgatgatggtttattgtagttttgattttttgggtttaagtaatttttttattttatattttgtttataaaaacgtgggtaagggtttcgggggcggtggtttatttttgtaattttagtattttaggaggtcgaggcggatagatgatttgaggttagtagtttgagattagtttggttagtatggtgaaattttatttttattaaaaatataaaaattagtcgggcgtgatggcgtacgtttgtagttttagtttttgggaggttgaggtaggtgaatcgtttgaattcgggaggcggaggttgtagtcggtttagatcgtattattgtattttagtttgggcgttaggagtaagatttcgttttaagtaaaaataaaaataaaagtaaaaataaataaaaaaaacgtgggagaggaaattggatattattttaagaaaagtttagatatttaaaatagcgtttagtaggaggaattatttattaagttattttttttaagtagtttatattgattaaaatataattataataggagttggcggttaattttaatgtatgtatttttttttatataattttattttttatttttttattttatttttagataaggtttcgttttgtcgtttaggttggagtgtagtggtataattatagtttattgtagttttaattttttgggtttaagggatttttttgttttggttttttaaagtgttgggattataggtgtgagttattgttttcgtttaatatttaatttaaaatttaataattaaaaaaatttaataatttaattagtgtaaaataatgacgttttgtagaagttttttttttttaaaatgtttttttttatgtttttttaatagatttgtatatttattcgagttttatttttataatattgtaattgtaagtgtgtttggtttgggcgtgggagtagggattgagttttgaatgtttttattttaaggtttattaaagtttttagtatatagtaggtatttaatgaatggaattgaattgatgtttaaaaattaatttttaagttttttcgtatttatttattggtaagtttttaaatgtgtttatggtattgtggggatgggtagagattaatttaataagaataatatgggtcgggcgttgtggtttatttttgtaattttaatattttgggaggtcgaggcgggtagattatttgaggtcgggagttcgagagtagtttgattaatatggagaaattttatttttattaaaaatataatgttagtcgggtatggtggcgtatgtttgtaattttagttattcgggaggttgaggtaggagaattatttgaaatcgggaggttgaggttgcggtgagtcgatatcgcgttattgtattttagtttaggtaataagtgcgaaatttcgttttaaaaaaaaaaagtaaaattagaataatatatatataataacgtaaagaagatatagatttgggatttttttggaaagtagagttttaacggaaattatgtaaggtgattcggatattcgggttttatttttttgttttagttttttatatcgataggttttgtttcggttattttagtttgggcgggagggcgagagcgagggcgtttgggagaaatttcgtttagcggcggttgattagttaggttttagaaagatggcgttttcggagtaggtagagtagtcgagttaggtaaggggagtgggattgtttcgttgtgcggcggagatttcggttggagggggcgtttagtatacggttgggagtcgggtagggatttcgagttttcgaagttggggatttcgattttttgtttttttttgagtttcgtttttttttaggttttttttattcggttttttttttcggtgatttttttttgattatatttcggagttcgggttttggtgtttggttgtgttttcgggtttttatttttcgtttgttagtatttttggttttatttgagtttgttggggagggtgacgggatttttgggaagtttttagttttgagttgcgagggtttgagaaggagaggatagatcgatcgttttcggttgtttttttcggggaggggtttgtttttattagggtttttatttttttacggttttagttttttggagcggttgttagtttttttatttgtggttatttttgcgtttttttcgttaagttggatagttagaaataatttagtcgagtttttttagtgcgttgataggaaagggacgtattgtgattaatagacgttattaagtttttggttgaggatttattttcgtttttttgggtttggttttgttggtcgagggtttcgttttagttttttatttgtagatttagataaattttattttaataaggggattataaggattagcgttgacgtttgtgtttttgcggtcgggaggtagtggatgataaggttttcgaaggggtttatagtttaaaggtggggtagggtggggtgaggagaaaagggttaagagatattttatatttaattgtttgtgtggtgttatgttgagtataaattatatttattatttcgtttagtgtttattataatttttatgaagtgtaggttattaatttttattttatagaaatgaatattaagggtttgtgatatgttttaaatcgtgtgttttgttgagtttgtattgaatttgtgtgattttattagttatttatatatttttgagtttagttaggattagaatgaggaagaagaaaatagttttaatttggggttttatttttttttttttatttttttgaagtatttttaagagtttttagtaatttattagtattttattttttttagaggtagaagattatcgtttagtgttttttattgttttattttgtacgtttgttataagaattgaatttaaaggagttggtgtgtttttttatattagtttttattagtagtgtgaatgatttaggaagaagatgttttgattgtaaaatatgggagataataaggattgattttggtttttttattgttaggtgttttggagtttggtaagtgtttcgagaggagggtttttttttttttgttttattatatttagtttgttgaaatattaaggtattttggggtttgggtttttttgaattgttttgtgttaggaatgtttataggttgggattgaagggtgtttttagtttttgattttttttttttttttaagacggagtttttttttgtcgtttatgttggagtgtattggcgtaatttcggtttattgtttttcgggttcgagtaatttttttgttttagttttttaagtagttgggattacgggtgtttgttattatatttgattaatttttgtaattttagtagcgataggttttattatgttggttaggttggttttaaatttttgattttaagtgatttgttcgttttagttttttaaagtgttgagattatatgcgtgagttatcgtgttcggttttgtttttgatttttataggatatttaatttgttagtgttgtaaatagtattaaaaattttgttatttggagttattgttatgtttaaggatttttttggttttgtaagtttgttttttttgtatatgtatttaatagaaaaggatttaaggttttttaagggggtatggttattatttgtttgatttttagttttgttttttttttgtttttttttttaaagttggtggaggtaggattgttatagaatatgttggtagtttgggggaaaaatttgaatttttttttttttttttttgagatagagtttcgttgtgttatttaggttggagtgtagtggcgcgatttttgtttattgtaattttcgttttttgggtttacgttatttttttgttttagtttttttagtagttgggattataggcgttcgttattatgtttagttaattttttgtgtttttagtagagatggggttttatcgtgttagttaggatggttttgattttttgattttatgattcgtttattttagttttttaaagtgttgggattataggcgtgagttgtagtgtttggttaaaatttgaattttttataatagattttatggttatttaataagaagtaaatgtacgttttttgaatgaattaatgttttttagtaattgtttgttttatttttaagttttgattaatttagttttttattttttcgattaaagt

SEQ ID NO: 573 - DNA, 17528 bp, Artificial Sequence
  chemically treated genomic DNA (Homo sapiens)
taaatgtaatgtttgatttgggattagagtttgagttagaaaaaaaaaagaatagttagaaaggattttatggggtaattgggaatatggatagataatagtatcgggttaatgttaagttttttgaatttgataattatataatgtaggagagcgattttgtttttgggagaagtatggggaagtgtttaggggtgaagggttaagtgtttgtaattaattgttatatggtttattaaaattaaatagagagatagggagatagagagaaaagtagggagaaagagaaagagttgaaatgataattattggtgaatgtgattgttgtatttatattatttttgtaatttttttgtacgttaaatatttttttcgaataaaagtttgagggagaataaatataaaatattagaagtagaaggagttttaaagatttcgaggtttgtttatttttttttagataagtgttttgagaaggaaaggttttggtttgcggttattttatgagtcgtagtagagttggttagatttaattttgttagttgtaaatacgagtttttagtttagggtttgagagtttttaagaatagtaggcgagtttttagttaatgttttttttgtttcgtttttttgtttttcggggttgttttatagttagtattttgtaggaggtgagtagtttttatgagttttaggggagaaatttatttttttttttttaaagaaattggatttttaattttttttaatttgttttgttgattatattggggagatatttttatttttttgggtgtaggtaggattagattttagggtaaaaaggagggtttagagtaaaaacgatatgttattttattttatttttttattttattttttgagatagagtttcgtttcgttgtttaggttggagtgtagtggtgtaatttcggtttacggtaatttttaattttcgggtttaagtaatttttttgttttagttttttgagaagttgggattataggcgttttttattatgtttggttaatttttgtatttttagtagagacggggttttattatgttggattaggttggtttcgaattttttaggtgatttgtttgttttggttttttaaagtgttgggattataggtgtgagttattaagtttggtagaaaaaaggatattttaatagtgttttttggaaagtagtaagttttggggttttatttggttgttgtaagtagatttaaattttagaaaggaaatgtgttgggagttgaggtttagattaataaatgggtaaaataaatatttttggtatagttttgtgttagggttgggggtagttagaggataggattgttggaattggggattaagttagttggagggtatggataatgaggggtttttagtgattttatttttttttttttttgagagagagagagaaatatgtaattggataatttgttagtttttttttttttttttttttttttttgagatggagttttttttagtggtttaggttggaatgtagtggtgtaattttagtttattgtaattttcgtttttcgggtttacgttatttttttgttttagtttttcgagtagttgggattataggtatttattattatgttcggttaattttttttgtatttttagtagagacggggttttatcgtgttagttaggatggttttgattttttgaatttatgatttattcgtttcggttttttaaagtgttgggattataggcgtgagttatcgtgttcggttagttttttttttttttttttttttttttgagttttaaatttttgattttaggtgatttatttattttagttttttaaagtgttgggattataggcgtgagttattgcgtttggtttgtgtgtttttttttttttttttttgttagttttttaattaaaaaaagatatttaatttatgtagtgttatttttttataattagtgtttttatgggggtaaaattatttagattatttgtacgtaaaaaataatttaatttttagtatgaaaatatgtggtaaaatttagaaagatttattatgaatttaagatatttttagtaaaaagttatattaaaataaataaaataaaattgaaataatgtttagttgattttaagttaagatttacgtttgtattttatggtagtaggtttttttttttatattgtttttagagttttttttttaaaattagtaggtgagttgggtatcgtggtttacgtttgtaattttagtattttgggaagtagaggcgagtggattatgaggttatgaaatcgagattattttggttaatatggtgaaatttcgtttttattaaaaatataaaaattagttggatatgttgggcgtggtggtttacgtttataattttagtattttgggaggtcgaggtaggtagattatttgaggttaggagttcgagaatagtttgattaatatggagaaattttgttttttttaaaaatataaaattagttgggtgtggtggcgtatgtttgtaattttcgttattcgggaggttaaggtaggagaattatttgaatttgagaggcggaggttgcggcgagtcgagatcgtattattgtattttagtttgggtaataagaacgaaatttcgttttaaaaaatataataataataataataattagttgggtatggtggtacgtatttgtagttttagttattagggaagttgaggtaggagaatcgtttgaatttcggaggttgtagtgagtcgcgattgtagtgagtttggtaatagagtaagatttcgttttaaaaaagaaaaattaattaattaattaaataaataaaaaaaatagtaggttaggtgggtgggtaggtagacgggtatggtggtttatgtttgtaattttagtgtttcgggaggttgtggtgggaggatggtttgagttgtagtgagttgtgattgtattattatattttagtttgggtattagagcgagattttttttttgggtaaataaatttagtgagttatttttttagttatttagattttgtagggttttttattttttttgatattttagttttttttattcggggttttatattgtttttttaacgttatattatattttagttcggttgtattagtttttttaattttgtttattaggtttttgtttatttgtttttatttttaggttttgttagtaaggcgtttttttttttttttgtttggtttgtgttacgttgtttgaatatatagtttattttatttttttagagtattaggagtttatatttgggtttaagattttattaggagagtaaggtaagagaatgacgttaaggtttagtatgagtttatatagagaaggtgtttattgtttgttaaatttatttatttaataagtatttaggttgtttatcgtggtttacgtttataattttagtattttgggaggttaaggtgggaggatggtttgaatttaggagtttcggattagtttgggtaatatagtgaaattcgtttttataaaaaaatgtaaaaatggtcgggcgcggtagtttttatttgtaatttcggtattttgggaagtcgaggtaggtggattatttgaggtcggaagttcgagattagttttattaatatgttgaaatatcgtttttattaaaaatataaaattaggtcgggcgcggtggtttacgtttgtaattttagtattttgggaggtcgaggcgggcggattacgaggttaggagatcgagattattttcgttaatacggtgaaatttcgtttttattgaaaatataaaaaattagtcgggcgcggtggggtgtttgtagtgttagttattcgggaggttgagaatggcgtgaattttggaggcggagtttgtattgagtcgaaatggcgttattgtattttagtttgggggatagggcgagattttgttttaaaaaaaaaaaaaaaaaaaaaaaaaaaaagattagttggttagttagatgtggtggtatatgtttgtaatttcgggaggttgaggtaggaggatttgttgaattttggaggcggagtttgcggtgagtcgagatcgcgttaatgtatattagtttgggtaataagagcgaaattgcgttttaaaaaaaaaaataattagtcggacgtggtggtatgtgtttagttatttaggaggttgaggtaggaggaatatttgagtttgggaggttgaggttaaagtgagttgtgattaggtttttgtattttagtttgggtaagagtgagattttgttttattaaaaaaaaaaaaaaaaaaaaaggtatttattgagtatttattatatgttaggttttgtgtggttaggttttggggatgtacgggattttaaattagatagggttttgtttttcgggagcgtatagtttattgggatggggtgggagtgggggaaatacgtaggaggtttttagttaagtgggataaagattattttatagtgggataatggcgtggggagcggaggcgtcgtcggcgaggaggtttcgggcgggtcgtgttgagatcgtagtatttaattcggttcgaggtagttgggaatagtgttgtttagggaattataaatttaaaggttcggggaagggtcgcgttgagtagttgtaggtataggtttaggttaggttaggtaggatcggtttttgtagtttcggaggtcgggggaagatttcgttttttattttcgtttttattcggggggcgttattttgttttttttatggcggcgaacgaggtttagagaggttatcgtttcgcgcggggtagtatagcggcgggagagttcggagcgtagagggtcgtatttttagtttttagtttttattttcggtagaagtaggcggagcgattcggttttcgttttcgcgttcgtttcgtttcgcgcgttcgtttggtttttcggtttcgtttttgtttcggagtgacgcgggttcgggcgcgacggtttcggcggcggcggcggcggcgatagagcgagcgcggcgcggggttattatgggggtttagtttagtacggtaggcggggagggggcgtcggggtcgcggggcgtcgcgagggattgggattcggcggcgagggggcgggttggtttgcgggaggtgacgcgggattcgggtcgtattcggtcgtatttatttcgttcgtttagttcgtcgcgttttattttattttataagggtttgggcgagttacgtggtgatcgttatttacgttttggtagtttgtagcggggatttagtttttttgttcggggggcgcgttagagtttagtattcgggggtatttgggttttgttttggtcgtcgtggggttttggttgttggagggattcgtggttgtgagcgtgtgtgtcgttgagtgtgagtgtgtgagcgagcgtgtgaatggtttgagagtgaatgtgtgtgtgagtgtgatcgtgggtgtgaagggcgggtatggaaacgtgtgatggggtgtgtgtgtgtgtacgggagtatgtgaatgggcgatgttattgattgcgattgaacgtgtgtgtgtgtgcgatgttattatgttagagggttttgtacgtttagtaataaggaatagaattcggatgatacgggggtatttttttaatgtttagtgggttaggtttttattaaggttaggtttttattgattttgtaagttgtgttggggattttatattttgcggtgttagtgttgtttgttttattttatagatggggaaatgtaaattagttttggttatcgttttataacgttgtcgtcggaaggagtttgttttatggggttttaaagtttattttgttgttgttatttttgggttggtttagagttatttttttttttttttaggttattttttttttttagttttttaaaagttgattatggtgaggttggaggtttgagtttgtgtggatatgtggaggttgcggttgtagagggtagtttttttgttaattgtgattcgttaggcgtggggaggttggtataggaggaattagtttagtgtttttttatttttatttttatttttatgtttggtatttgttatttggagggtatttgggttttttttttttggggaggatttggagttttttttttggggatttaggtaaaaggttttttggtttgggtggttgttaaggaaagtgtggtttaatttagaatttcgggatgtttagattttaggtaattttggttagggtgaatttgtgggtattattttaatttttatgtaatattcggtttatttttttttagaaagtatttgttttttttattgttgaaatgttttgtttgtgtttttaaagttttttttggtttttatttaatttttttttgttgtttttggtggtgttttatattttttagttggtggttggatttatggttacgttttttgtatttggttgttttatatattttttttttttttttttttttttgagaagagttttttatttagatagtagtgtagtggcgcgattatagtttattgtagttttaattttttgggtataagtgatttttttattttagtgttttgagtataggtacgtgttaatatgtttggttaagttttttttttttgagatggagtttttttttgttatttaggttggagtgtagtggtatgattttagtttattgtaatttttattttttgggttttagtaatttttttgttttagttttttaagtagttgggattataggtattcgttattatatttgggtttcgttattttggttaagttggtttcgaatttttgattttagatgatttatttgttttagttttttaaagtgttgggattataggagtgagttattgtgtttggtttaattttttgtatttttaatggagataatgttttgttatgttgtttaggttggttataaattgagtttaagtgatttttttattttagttttttaaagtgttgggattataggtgtgaacgtcgtttttggttttattttatatatttttgttgaatggttgagtagttttttgtaaggggtagagtattgtttgggagtcgggagatttttattaattttttttcgtttagttttatttttttaagggtgggtggggattattttttgtgggtgttgttgggattttcgtttggtttagaatgtttttagtatattttgagttaggttttttggtttacgggttttttatagtttggaggaggttggttgggggtttggtgttttaggtgttttatttaagatatgtaggttttatgggaggttttttttaatattttgtgggatttaggttaggggttggttttggagtttgttagttatattgggaaaatattggagtttggtttgttattttgaattgtggtttttttgttttttagttcggttgtgagtgtttagcgattttgataggttgataggtatagtttgtcgggtttttttattgtttttggtagttttatgtttattttgcggtttagattttagttttgtgtttatttgtttttttttttgggttttttttttttatagtttttagttaagttagagttttttattgtagaattttttttatttttttttattttttttcggttagaataggattaggagggaggtgtcgtttagattttggtaggatcgttggcgggtaggtaggggataggtaagtaagttattcgattggtttgtttaagttttagggtagggagttggtatttggggaggatcgggtttgttaggtcgggggttttggtagttttttttgtttatttttaatttggtttgggtagagtggaggttagggttttagtggggaattttaggggtgggtagttgcgtagggtattttatgtgtggggagtagagttacgtagttttttagttatggtgtatgagttgggggttttttgggattttggtattttgtgtttttttttttttttgtgttattagaggtaaggagaggcgggtgatgggttttttggtggggtagagtatggtttgtgggtattaggttaggggttgggaggtagttgttttttgggtttttaggtggttggggtgaggtggtttgtgtgtgtgagtgtgtgtgtgagtgtgtacgtagtataggtgaggaggtataggggtgggattttggttttagttatttgttttttgtttatttggtttattgttggtgagggttggggtggtgttgtggacgaggacggggtagagtttgttttaattcgtgtgggtaggaagagagtgtattttatcgtgtgagtttggtagggtttttggttttttggaggtgaaattttcgtttttttattgtttttggttgtggtgcgttttttttgtcggtgtttgttttttcgtttggtttgaattcgggcggggttttttggtttgtgttttttgcgttgtatatgggatttgttattttagtgtttattggggtttgtggattaaacgattgatcgacggtgatggtttgtttgtggttgtttttttagataagaatttttatttataaaaagtttattttttttttttagtggttagaaagtgttttcgggtttaagtttgttttttgaggtttggtttttttatttgaagtgggaggagttatgaataggtttgaggattgaatgaggtggcgtgagtagaggttgttcgtttggtttcgggtagtttttgttgttgggagtagatattggaaggaaggtttttgatttttatttgttgtttacggcgagtttggttttttgagtagtgtttgatttttagtttagttacgggagttgcgtatgttttttttgagtgtggaataggcgtggaaatagtttggagtcggattttaagtttatttttgaggtttgtgtttttggaggataagcgggtttttttgataaataggataggttgtgtcgcgtttttatttaggagtttgggtttttgttttggttttggaaatttttaggtaaaataaaaatattgggagggtgggagtttgttgtttttttattaatttattttataaatatttgttgagtgttttttgtgtggagtgttggggatatagtggtgacgatagatatagattttgcggtttgttttagggttatttttggagatttgtggggagtcggtagtttggggttggaggttagtattcggggatttgttatcggagttattaatacgcgggtgttttttttttggtttagcgtttatttaggtttatttttatgggtttaggtttagggtaagggagggaagtgggaaagtaatagaaaattagaaattaggttttattttgggtttttttgagttatatttgtttttttattgttatacggggagtttggttgtttttattttgtattattgtgggagggtcggggaggaaatgggggaaggtgtttcgtagttcgtgaagttagttgttcgcggaggggttttaagttgggttgtgtattgacgtagttgtgttggaaaaatagaattttagggagtattaagtataattttagtttttaatgttatttaagtttattgttagggtttttaataatggtgattttttgtgaatgtaatttcggttaattttttttttagattttattttacgtgggcgtggtttttgtgattgagggagaggtcgatagtagaggaattttcggaatagtatttgttttagggagtttttagaagggattaggggttgtgaaaagtttattaagggtttggttagttagggaagggtttattagggaagatttgatgtttgagttaggttttgaggaatgaataggagtttgttggttggatgtatgtagagtaaggatatttggggtagagaggagagtatatgcgaacgtttgaagtaagatgggtttgatgttgaaagagtagagagttgggaggtgagtttagagttggggttatagagagggtgtttttaggtaggtagtggggagttatggtgggtatttgaggaggggtggagtcgtttgttggttcggattttcggggttgggggtaggtgtttaggttttattgtgggaggtaggatgttagatttgggttgtgagttttttgattggagtagaaagagtgtttttgttttgggaggtggtttaggaagagtagtattttgggttggatattgagagtttattttcggtttattttgaatggttatatgattttggtaggttattttatttatttgagggatagataatagtgttatgtggtgagcgatgtttggagggttggttttggtgtatttcgggtaggttattttttttttttggttttagtttttttacgtgttgggatgattatagtgttcgtagtttagggttgaggtggggagtattttaggaaattcgcggtttttatttagaatagtgttagtttaggggcgttgatcgttgtgtgttttttttttttttattttttttattttttaggtagggttcggggaagtgaagcgatttttttgttatttttagttgggatttaaattttggtttttttgatttaagtttatagttgttaattggggttttaaaggaggtttgggatgagtgaaatatttgggttatgttgattaaatgggtggtggttagagattttagttgggtggttttgggtatgggtgaggggtgggttaggtatttatagttttttttttagatttatgggttaaatattaagggttttatggagcgaggttttagttgtatttagtatggaggttttgtttgggagagaggttttttgttttaagtttaataaaggatttgtaattgtagttgggtagtttggagttgttgggtcgttgtagggtggggggtgggggggcgggggttaggtttggtgtgaggttgtagtattttgttttttttttatttggttattttattttttttagttggtagtggtttcgtgagggtggtaggaaaagtttttgtgtgtgagtcgggattttttaggttatagatttttacgtgatttgggttttagtttattttattttatatcgttttaaggagataggttaggtagtggttttcgttttttatagataggatacgtggttttattagagcgttttttttaaattgttggagagtagggatttttggtagtgtttttagaaggggaggggtaatggggttaggttttgagaggttaggagtattttatttggttttgaatagagtagaggtatttgtttgtgttttgtaggatatattattttaaggggttcgtagtaggttttataaagtaagtagagaggtttgtacgtatgtaaggaatttgttttttagttttttggtatttaaagtgaaaagggaatttgtagggtaatgataagagaatatatatgtatatttgttgggagaattataattagggaggtatatggggagggtgtataaataagttttgaaatagtttttttgagagttagtgttttatatgaattttggttttttagtttttttagttgaattattagtatgggttttatatattttttattttgaaataattttaaattattggtcgggcgaggtggtttacgtttgtaattttagtattttgggaggttgaggcgggcggattacgaggttaggagatcgagattattttggttaacgtagtgaaatttcgtttttattaaaaatattaaaaattaattgggtttggtggcgaacgtttgtagttttagttattcgggaggttgaggtaggagaatggtgtgaatttaggaggtagagtttgtagtgagttgagatcgtgttattgtattttagtttgggtaatagagcgagattttattttaaaaaaaataataattttaaagttattgtaaaagaatatttatgggttggacgtaggggtttatatttgtaattttagaatttggaaggttgaggttggttgttggtttgagtttagaagtttgagattagtttgggtaatatggtgaaatcgtatttttataaaaaatataaaaaaattattaaggtttggtggtacgtgtttgtagttttagttatttcggggattgggttgggaggattgtttgggtataagaggttaaggttatagtgagttgagattacgttattgtattttagtttgggtgatagagtgaaattttgttttaaaaaaaaaaaaagagtttttatgtattttttatttagatgtatttaatgttattatttgttatatttgttttatttttttttatatagtatatatttaatgtatgttaaatatattagatattatatgtgtgtatatttatatagtggatttttgaatggtatgggggttaggggttgatttgtatagttgatagtttacgtataggttgggtgtagtggtttatgtttgtaattttagtattgtgggaggttgaggcgggtggattatttgaggttaggagttcgatgagattagtttggttaatgagaaaaaatttcggttttattaaaaatataaaaattggttaggcgttgtggtttatgtttgtaattttagtattttgggaggttaaggtaggtagattatttgaggttagaagttcgagattagtttggttaatatgatgaaaattcgtttttattaatgatataaaaattaattgggtgtggtggtgggcgtttgtaattttatttatttgggatgttgaggtaggagaatcgattgaattcgggaggtggaggttgttgtgagttgagattttattattgtattttagtttgggtgatagagttagattttattttaaaaaaataaaataaaatagaaaataaaaattagttaagtgtggtggcgtgcgtttgtaattttagttatttgggaggttgaggtaggagaatcgttggagtttagaaggcggaggttggagtgagataagatcgcgttattgtattttagtttgggttagatttgttttaaataaaagaaaaaaaaaagaaaatttatgtataatttttggtttttttaaaatttttttattaatatattattgattagaagttttattaataatatatttgtatattgtatgtattatatattatatttttatagtaaagtaagttagagaaaattgttattttaaaaattataaggggtcgggcgtggtggtttacgtttgtaattttagtattttgggaggtcgaggtaggaggattattaggttaggattttaagattagtttggttaatatggtgaaattttgtttttattaaaaatataaaaatgagttaggagtggtgacgtgcgtttgtgattttagttattcgggaggttgagatagaagaattgttttaatttgggagttggaggttgtagtgagttgagatcgtgttattgtattttagtttgggtgatagtaagatttcgttttaaaaaataaataaagagaaaaaaaaattataaggaagagaaaatatatttattatttattaagaggaagtggattattataaaggtttttatttttgtttttacgttgagaaggttgaggaggaggtagggggtagttttgttgtttcgggtgatagaagaggaagaagatttttgtataagtgaattatttagggttttggtcgggtatagtggtttacgtttgtaattttagtattttgggaggtcgaggtgggtggattatgaggttaggagtttaagattagtttggttaatatggcgaaatattgtttttattaaaagtataaaaattagttagacgtggtggtgtttatttgtaattttagttattcgggaggttgaggtaggaaaattatttgaattcgggaggcggaggttatagttagttaagattatattattgtattttagtttgggtgatagagtgagattttattttaaataaataaataaataaataaataaataaataaataaataaataagtgaattacgtagggttttttcggggggtgatttttagttggttattcgggatgatggattttttattttagaattatggttttatttgttcgtaattttgtggagaagattttagtattggtgaatgttgttgtgatttatttgaagtttcgattggtcgtattttggtattatattacggttgagttggttttttttatttttgttgagatttttagagttatttagagtttgaaaaaaatagttagtagtgtttagattggtagttttaaatagtttatagttaaggaagttttgttgaacggtttggtggttattgaggtgtcgacgtggttttatgttagagagattataggtaagcgtggtattattggttagaatgtttgaagattagttttaatatttgattatatttgatttattatttgagtgttgttggattaggtgtgattagattgttatttgaataaaataagatttgttagaaattttaaaaaaaaaaaaaagtgaattaagtagttttaatttatgtttaagggttaattgtgtttatattttgaattatttaagagtaagttgtttttttgtttttaaatattttagtgtgtattttttaagaataaggatatttttttgcgtaattatagaataattataggaaagtaatattggtataatattattatttaatttataagttttatttaattttttttttttgagatggagttttggtttttgttatttaggttggagtttagtggtatgatttcggtttattgtaatttttgttttttgggtttaagtgatttttatgttttagtattttgagtagttgggattgtagacgttcgttattatatttggttaatttttgtatttttggtagagacgcggtttttttatgttgtttaggttggtttttaatttttgattttaggtgatttatttgtttcggttttttaaagtgttgggattataggcgtgagttatcgtgttcggtttttttttattttttttttttttgagatagagtttcgttttgttatttaggttggagtgtagtggtacgattttagtttattgttattttcgttttttaggtttagatgatttttttgttttagttttttgagtagttggggtagtttgttattatatttagttaatttttgtatttttggtagagacggggttttattatgttggttaggttggtttcgaatttttgattttaagtaatttgtttgttttgggtttttaaagtgtttagattataagtgtgagttatagcgtttggtttttttttttttttgagatggagttttatttttgttgtttaagttggagtgtaatggtacgatttcggtttattgtaatttttattttttagttttaagtattttttttgttttagttttttgagtagttgggattttaggtatgcgttattatatttagttaattttttgtatttttagtagaaattgggttttacgatgttagttaggttggttttgaatttttgattttagatgattttttcgttttagttttttaaagtgttgggattataggcgtgagttatcgcgttcggttttttttttttttttttttttttatggagttttgttttgttttttaggttggagtgtggtggtgtgattttggtttattgtaattttttttataggtaattttttgttttagttttttgagtagttgggattataggtatgcgttattgtgttcgtttagggatttaggttttttaattaatttttagggttttttttttttttttttttaatagagatagagttttgttatgttgtttaggttggtcgcgaattattgggtttaagtaattttttgtttttgttatttgagtagttgggattacgggcgtgtgatattgtaattagttaattttttttttttttttttttttttgagatggagttttatttttgttgtttaggttggagtgtaatggtatgattttggtttattgtaattttcgttttttaggtttaagcgatttttttgttttatttttttaagtagttgggattataggtatttgttattacgttcggttaatttttgtatttttagtagagatggggttttattttgttggttaggttggtttcgaatttttgattttaggtgatttatttattttggttttttaaattgttgggattataggcgtgagttattgtatcgggtttataattagttaattttttatattttttgtagagatggagttttattttgttgtttaggttggttttgaattcgtggatttaaattgtttatttgttttcgttttttagagtgttgggattataggttggagttattatgtttagtttttttttagggtttttaggagattgagatgtcgggggtaggggttggggaggaatagttttttagggtcgtgtggtagggtttatttggttatgaggtattttagcgtggtataagggatgggtggattttgggttagttttttatttgttagttgtgtgattgggtgagtcgttttgtttttttgggttgtttttttatttgcgaaatggtggtgatgatagtgtttattatacggggttgttgcgagagtcgtgttcgtgtggtattcgacgtggttttgggattttagaggttgttggttttggtgatttgagttgtagggttttagttttgggggttttgtagattatttggtttatttaggttgagaggggaagggattttttcggggttatatagttagtgatttttttagtgtttggtttagtgtttcgtttttttttatatttgatggtagaattttagggtttagggatatttatggatgttatttgggggaagtggtttagtttatttagttttattggtttgttttagtgtgttttgtgggagagtaaagaggagagtattaattttagtggttttaagggattggatttaaaggtgttatagagttatttggttagtgtaggttttttagatagattttgagttggggttattatttgtttgtttgtttaaattaagttagaatttgatattatttaataagattagggaagttgattgaaggaagtaagagaaggaaggagtataaatatattatgtttaagattaattttattttgagttttttagtagttaaagtgaaaaaggatatgtgtttagatttatagttttttttggttttggttttttagaggaaatggagtttttttttatggtattgagtatagaagtttaggtaatgtttagtgataggtgttatgaggttggtttttatagttttttttagtgggtattaaaatggatgatgaagttttttggatgagggtggtggggagagggtgtttttggtagagggggtagcgtgagtagaggtttggtagtgtggataagtcggtgtgtttggggaaaggtaggtttttgtattgatttcgcgggttttgtcgttttagt

SEQ ID NO: 574 - DNA, 17528 bp, Artificial Sequence
  chemically treated genomic DNA (Homo sapiens)
attgaaacgataggattcgcggggttagtgtaggagtttgtttttttttaaatatatcggtttgtttatattattaggtttttgtttacgttgttttttttgttaggagtattttttttttattatttttatttagaaagttttattatttattttggtgtttattaggagaagttataaagattagttttatgatatttgttattgagtattatttgggtttttatgtttagtattatgagaaaaagttttattttttttgaagagttaggattaaaaagagttgtgggtttaagtatatatttttttttattttggttattaggaagtttagagtaaaattaattttgagtataatgtatttgtgtttttttttttttttgttttttttagttaatttttttggttttattaagtgatgttaagttttagtttgatttagataaatagataaataataattttaatttagaatttatttgaaaggtttatattgattaaatggttttatggtatttttaaatttagttttttggggttattgggattgatgtttttttttttgtttttttatagagtatattagaataagttagtgaagttgagtaaattgagttattttttttaaatgatatttatgagtgtttttgagttttggggttttgttattaggtgtaaggggaagcgaagtattgagttaggtattgggaaggttattggttgtgtgatttcgagaaagttttttttttttttaatttgagtggattaggtgatttgtaaggtttttagagttgagattttatagtttagattattaaagttaatagtttttgggattttagggttacgtcgggtattatacgggtacggttttcgtagtaatttcgtgtggtaggtattgttattattattatttcgtagatgaggaaatagtttagaaaggtaaagcgatttatttagttatatagttggtaggtgaggagttgatttagagtttatttattttttatattacgttgggatattttatgattaagtggattttgttatacggttttgaggggttgtttttttttagtttttgttttcgatattttagttttttgaaggttttaaaagggggttgggtatagtggttttagtttgtaattttaatattttgagaggcggaggtaggtgaatagtttgagtttacgagtttaagattagtttgggtaatagggtgaaattttatttttataaaaaatataaaaagttagttggttgtaggttcggtgtagtggtttacgtttataattttagtaatttgggaggttaaggtgggtggattatttgaggttaggagttcgagattagtttggttaatagggtaaaattttatttttattaaaaatataaaaattagtcgggcgtggtggtaggtgtttgtaattttagttatttgagagggtgaggtaggagaatcgtttgaatttgggaggcggaggttgtagtgagttaagattatgttattgtattttagtttgggtaataagagtgaaattttattttaaaaaaaaaaaaaaaaaaaaaaagttagttggttgtagtgttatacgttcgtggttttagttatttagatggtagaggtagaagattgtttgagtttagtagttcgcgattagtttgggtaatatagtaaaattttgtttttgttgaaaaaaaaaaaaaaaaagattttaaaagttggttagaaaatttgaatttttgggcgggtatagtggcgtatgtttgtaattttagttatttaggaggttgaggtagaaggttgtttgtggaggaggttgtagtgagttaagattatattattatattttagtttgggagatagagtaagattttataaaaaaaaaaaaaaaaaaaaaaggtcgggcgcggtggtttacgtttgtaattttagtattttgggaggttgaggcggggggattatttgaggttaggagtttaagattagtttggttaatatcgtgaaatttagtttttattaaaaatataaaaaattagttggatgtggtggcgtatgtttggaattttagttatttaggaaattgaggtaggagaaatgtttgaagttaggagatggaggttgtagtgagtcgagatcgtgttattgtattttagtttgggtaataagagtgaaattttattttaaaaaaaaaaaaaggttaggcgttgtagtttatatttgtaatttgagtattttgggagtttaaggtaggtagattatttgaggttagaagttcgagattagtttggttaatatggtgaaatttcgtttttattaaaaatataaaaattagttgggtgtggtggtaggttattttagttatttaggaagttggagtaggagaattatttgaatttgggaggcggaggtagtagtgagttgagatcgtgttattgtattttagtttgggtgatagagcgagattttgttttaaaaaaaaaaaaagtggggggggatcgggtacggtggtttacgtttgtaattttagtattttgggaggtcgaggtaggtgaattatttgaggttaggagttggagattagtttggataatatggaaaaatcgcgtttttattaaaaatataaaaattagttaggtatggtagcgggcgtttgtaattttagttatttaggatgttgaggtatgagaattatttgaatttaggaggtagaggttgtagtgagtcgagattatgttattggattttagtttgggtgataagagttaagattttattttaaaaaaaaaaaattgaataaggtttgtggattagataatagtgttgtattaatgttatttttttgtaattattttgtggttacgtaaaggaatgtttttgtttttaggagatatatattgaaatatttaggggtaaaggggtaatttatttttaaatggtttaaaatatagatatagttgatttttgaatatgggttggaattgtttgatttatttttttttttttttggaatttttgataaattttattttatttagatagtagtttgattatatttggtttaataatatttaaataataaattaaatataattagatgttaagattggtttttaaatattttagttaatgatgttacgtttgtttgtgatttttttgatataaaattacgtcgatattttagtggttattaaatcgtttagtaaagtttttttaattgtgagttgtttgaagttattagtttgagtattattgattattttttttaggttttgaatagttttagggattttagtaggggtgggaggaattagtttaatcgtggtgtagtattaaaatgcggttaatcgaggttttaagtaagttatagtagtatttattagtgttggggttttttttataaggttacggataaatggagttatggttttgggatggaaagtttattatttcgaatggttagttgaaggttatttttcggaaggattttgcgtggtttatttatttatttatttatttatttatttatttatttatttatttatttgagatggagttttattttattatttaggttggagtatagtggtgtgattttggttaattgtgattttcgtttttcgggtttaagtgatttttttgttttagtttttcgagtagttgggattataggtgagtattattacgtttggttaatttttgtatttttagtagagataatgtttcgttatgttggttaggttggttttgaatttttgattttatgatttatttatttcggttttttaaagtgttgggattataggcgtgagttattgtgttcggttaggattttgagtggtttatttatataaggatttttttttttttttgttattcgagatagtaagattattttttgttttttttttagtttttttaacgtgagaataaggatgaagatttttatgatgatttatttttttttaatgaatagtaaatatgtttttttttttttatgatttttttttttttttatttattttttgagacggagttttgttgttatttaggttggagtgtagtggtacggttttagtttattgtaatttttaatttttaggttgaagtaatttttttgttttagtttttcgagtagttgggattataggcgtacgttattatttttggtttatttttgtatttttagtagagatagggttttattatgttggttaggttggttttgaagttttgatttggtgatttttttgtttcggttttttaaagtgttggggttataggcgtgagttattacgttcggttttttatgatttttaaaataatagttttttttagtttattttattgtaaaaatatagtatataatatatataatatataaatatgttattggtaaggtttttagttaatagtatattagtaggaaagttttgggggaattagaagttatatatggattttttttttttttttttttatttaagatagatttggtttaggttggaatgtagtggcgcgattttgttttattttaattttcgttttttgggttttagcgatttttttgttttaattttttaagtagttgggattataggcgtacgttattatatttggttaatttttattttttgttttgttttgtttttttgagatggagtttggttttgttatttaggttggagtgtagtggtgagattttaatttatagtaatttttatttttcgggtttaatcgatttttttgttttagtattttaagtgggtgggattataggcgtttattattatatttagttaatttttgtattattagtagagacgagtttttattatgttggttaggttggtttcgaatttttgattttaggtgatttgtttgttttggttttttaaagtgttgggattatagatatgagttatagcgtttggttaatttttgtatttttagtagagtcggggtttttttttattggttaggttggttttatcgaatttttgattttaagtgatttattcgttttagttttttatagtattgggattataggtatgagttattgtatttagtttatacgtggattgttaattatataggttagtttttaatttttatattatttaagggtttattgtatggatatgtatatatgtagtatttaatatatttaatatatattagatatatattgtatagagagaaataaagtaaatgtagtaaataataatattaggtatatttgggtgaagagtatataagagttttttttttttttttgagatagggttttattttattatttaggttggaatgtagtggcgtgattttagtttattatagttttgattttttgtatttaagtaatttttttagtttagttttcgaagtaattggggttataggtacgtattattaggttttggtaatttttttgtattttttgtagagatgcggttttattatgttgtttaggttaattttaaatttttgagtttaagttaatagttagttttagttttttaagttttaggattgtaggtataagtttttgcgtttagtttataaatgtttttttatagtaattttgaaattattattttttttgagatggagtttcgttttgttgtttaggttggagtgtagtggtacgattttagtttattgtaagttttgttttttgggtttatattatttttttgttttagtttttcgagtagttgggattataggcgttcgttattaagtttagttaatttttggtatttttagtagagacggggttttattgcgttagttaggatggtttcgattttttgatttcgtgattcgttcgttttagttttttaaagtgttgggattataggcgtgagttatttcgttcggttagtaatttgaaattattttaaaataaaaagtgtgtgaagtttatattggtagtttaattagagaggttgagaagttaaagtttatataaaatattggtttttaagaaagttgttttagagtttgtttatatattttttttatatatttttttgattgtagtttttttagtaaatgtgtatgtgtgtttttttattattattttataagttttttttttattttgagtgttaggaagttgagaaataagttttttgtatgcgtgtaggtttttttatttgttttgtgggatttgttacgggttttttgaggtagtatattttgtagaatatagataagtgtttttgttttatttagagttaggtaagatgtttttaattttttaaggtttagttttattgtttttttttttttggaaatattattaggagtttttattttttaataatttgaggaggacgttttggtggagttacgtgttttgtttgtaaaaagcgagggttattgtttggtttatttttttgaagcgatgtgagatgagatgagttggggtttaggttacgtaggggtttataatttgggaagtttcggtttatatataggagttttttttgttatttttacggggttattattaattgagaggagtggaatagttaagtgaaggaagggtagggtgttataattttatattaggtttggttttcgtttttttattttttattttgtaacggtttagtagttttaagttgtttagttatagttataggttttttgttgggtttaaaataaaaggttttttttttaggtagggtttttatgttgggtgtagttgaggtttcgttttatggggtttttggtatttgatttatgggtttaaaggaagggttgtggatgtttagtttattttttatttatgtttagggttatttagttggggtttttggttattatttatttaattagtatggtttaggtgttttatttattttaggttttttttaaggttttagttggtagttgtggatttgggttagagagattagggtttgagttttagttaaggatggtaggagagtcgttttattttttcgggttttatttggaggatggggagggtggggaggaaggaggtatatagcggttagcgtttttgagttggtattgttttgagtaggggtcgcgggttttttggaatattttttattttaattttaggttgcgggtattgtgattattttagtacgtgaggaaattgaggttaggaaaggggagtgatttgttcggagtatattaaagttagttttttaagtatcgtttattatatgatattgttatttattttttagatagatgaagtgatttgttaaggttatatagttatttagggtgggtcgggagtggatttttaatgtttagtttaaagtgttgttttttttgagttattttttaggataggggtattttttttgttttagttaaagagtttatagtttaaatttgatattttgttttttatagtgaggtttgagtatttgtttttagtttcgggggttcgaattaataggcggttttatttttttttaaatatttattatagttttttattgtttatttgaaggtattttttttatggttttaattttggatttattttttagttttttgtttttttaatattaagtttattttgttttaggcgttcgtatatgtttttttttttgttttaaatgtttttgttttgtatgtatttaattagtaaatttttatttattttttagagtttagtttaaatattaaattttttttgatgagtttttttttagttaattaggtttttggtagattttttatagtttttggttttttttggaaattttttggggtaagtattatttcgaggatttttttgttatcgattttttttttagttatagaaattacgtttacgtggaatagagtttagggaaaaagttggtcgaagttatatttataggaaattattattgttgggggttttggtaatgaatttgaatgatattaggagttggggttgtgtttggtgttttttggagttttgtttttttagtatagttgcgttagtgtatagtttagtttaaggttttttcgcgggtagttggttttacgggttgcgaggtatttttttttatttttttttcggtttttttatagtggtgtaaggtgggaataattaggtttttcgtgtgataatgaggggataaatgtagtttaaggaggtttagggtggagtttggtttttgattttttgttgtttttttattttttttttttgttttaaatttaaatttatggaagtgagtttgggtgggcgttgggttaagaaaaagatattcgcgtattagtggtttcgatggtaagttttcgaatgttggtttttaattttaggttgtcggttttttataagtttttagaagtggttttggagtagatcgtaggatttgtgtttgtcgttattattgtatttttaatattttatatagaaagtatttaataaatatttgtggaatgaattagtgaagggataataggtttttatttttttagtgtttttattttgtttagaagtttttagaattaggataagagtttagatttttggatgagggcgcggtatagtttgttttgtttgttagaaaagttcgtttgttttttaagagtataggttttagaggtgggtttaggattcggttttaggttgtttttacgtttgttttatatttagagaggatatacgtagttttcgtggttgagttgggagttaagtattgtttagaaggttaggttcgtcgtgggtagtagatgagagttaaggattttttttttagtgtttgtttttaataataggggttgttcggagttaggcgggtagtttttgtttacgttattttatttagtttttaagtttgtttatgattttttttattttaggtgaggaaattaagttttaggggatagatttgagttcggggatattttttggttattaaagagaaggggtgggttttttataggtaaaagtttttatttggggaggtagttataggtagattattatcgtcggttagtcgtttagtttataaattttagtgggtattgaggtggtaggttttatgtgtaacgtaggggatataggttaggaggtttcgttcgagtttaagttagacggggagatagatatcggtagagagggcgtattatagttaggagtagtggaggggcgaaggttttatttttagaaagttagaggttttgttagatttatacggtggggtgtattttttttttatttatacgggttggaataggttttgtttcgttttcgtttatagtattattttaatttttattagtagtgggttaagtaaatagaaggtaggtggttgaggttaaggttttatttttgtgtttttttatttgtgttgcgtgtatatttatatatatatttatatatatagattattttattttagttatttgggggtttaggagatagttgttttttagtttttgatttaatgtttataagttatgttttgttttattagggaatttattattcgtttttttttgtttttaataatatagaggggaagagggatatagggtgttagagttttagggagtttttagtttatgtattatagttgaggggttgcgtagttttgttttttatatatagaatgttttgcgtagttgtttatttttggaattttttattgggattttggtttttattttgtttaggttaggttaggggtgggtagagagagttgttagggttttcgatttggtaggttcggttttttttaggtgttagttttttgttttggagtttagataagttagtcgggtgatttgtttatttgttttttgtttgttcgttagcggttttgttagaatttgagcggtattttttttttggttttgttttaatcgggaggaagtgggagggagtggaggaagttttgtagtggggggttttggtttggttgggaattgtgggggaagggaatttaggagaaggaataggtggatatagagttgggatttgggtcgtagagtaagtatggggttgttagggatagtaggaaagttcggtagattgtatttgttagtttgttagggtcgttgagtatttatagtcgggttgggaggtaggggaattatagtttaggatggtagattaagttttaatgtttttttagtgtggttggtagattttagggttaatttttggtttggattttataaagtgttgggagaggttttttatggggtttgtatgttttagataagatatttagagtattaggtttttagttagttttttttagattgtggggagttcgtaagttaggaggtttggtttagaatgtgttggagatattttgggttaagcgaggattttagtagtatttataaagggtaatttttatttatttttggagagatggggttgggcgggggagggttggtggaggtttttcgatttttaggtagtgttttgttttttatagaggattgtttagttatttaatagaaatatatggaatgaggttaagaacggcgtttatatttgtaattttagtattttgaggagttgggatgggaggattatttgagtttagtttgtggttagtttgggtaatatagtaagatattgtttttattaaaaatataaaaaattaggttaggtatagtggtttatttttgtaattttagtattttgggaggttgaggtaggtggattatttgaggttaggagttcgggattagtttggttaagatggcgaagtttaggtgtgatggcgagtgtttgtaattttagttatttgggaggttgaggtaggagaattgttggagtttaggaagtggaggttgtagtgagttgagattatgttattgtattttaatttgggtgatagagagagattttattttaaaaaaaaaaaatttagttaggtatattggtacgtgtttgtatttaggatattgaggtagaaggattatttgtgtttaagaggttgaggttgtagtgagttatgatcgcgttattgtattattgtttgggtgagagattttttttaaaaaagaaaaaagaaaaaagaaatgtatggagtagttaggtgtaggggacgtggttataaatttaattattagttggaaggtatggaatattattaaaaatagtagggaagggttgggtggagattaggggaagttttagagatataggtaggatattttaataataaaggaggtagatgttttttggggaaaaatgggtcgggtgttgtatggaggttggggtgatgtttataggtttattttggttaaggttgtttggggtttgaatatttcgaagttttgggttgggttatattttttttagtaattatttaagttaagaggttttttgtttggatttttaaggaggagattttaggttttttttaaggagggaggatttaggtgttttttaagtggtagatgttaggtatagaggtagaggtggaggtggaggagtattgggttgattttttttgtgttagtttttttacgtttagcgggttatagttgataggagagttgttttttgtagtcgtagtttttatatgtttatatagatttaagtttttagttttattatggttaatttttgagaaattggggagaggaggtggtttggggggaagggaaggtggttttaggttagtttaggagtgatagtagtagagtggattttgaaattttatggagtaggtttttttcggcggtagcgttgtgggacggtggttaagattagtttgtatttttttatttgtgaaatggggtaaatagtattgatatcgtaaagtgtgaggtttttagtatagtttgtagggttagtgggagtttggttttgatgggagtttggtttattgagtattgggaggatgttttcgtgttattcgggttttgttttttgttgttaaacgtgtaaaattttttgatatagtgatatcgtatatatatatacgtttagtcgtagttagtgatatcgtttatttatatattttcgtatatatatatatattttattatacgtttttatgttcgttttttatatttacggttatatttatatatatatttatttttaagttatttatacgttcgtttatatatttatatttagcggtatatacgtttataattacgggtttttttagtagttaaggttttacggcggttagggtagggtttaggtgttttcgggtgttgggttttggcgcgtttttcgggtaggagggttgggttttcgttgtagattgttagggcgtaagtagcggttattacgtagttcgtttaggtttttgtggggtggggtggggcgcggcgggttgggcgggcgaagtgggtgcggtcgggtgcggttcgggtttcgcgttatttttcgtaggttagttcgttttttcgtcgtcgggttttagtttttcgcgacgtttcgcggtttcggcgtttttttttcgtttatcgtgttgagttgggtttttatggtggtttcgcgtcgcgttcgttttgtcgtcgtcgtcgtcgtcgtcgagatcgtcgcgttcgggttcgcgttatttcggagtaggggcggggtcgaggggttaggcgggcgcgcggggcggggcgggcgcgggggcggggatcgggtcgtttcgtttgtttttgtcggggatggagattgggaattggggatgcggttttttgcgtttcgagttttttcgtcgttgtgttgtttcgcgcgggacggtggtttttttgggtttcgttcgtcgttataaaggaagtaagatggcgtttttcggatgggagcgagaataagaggcggaattttttttcggttttcgagattgtaggggtcggttttgtttggtttggtttgggtttgtgtttgtagttgtttagcgcggttttttttcgggtttttgaatttgtagttttttgggtagtattgtttttagttgtttcgggtcgggttaaatgttgcggttttagtacggttcgttcggagttttttcgtcggcggcgttttcgttttttacgttattgttttattgtggagtgatttttgttttatttagttgaaggttttttgcgtgttttttttatttttattttattttagtggattgtgcgttttcggagggtaaggttttatttggtttgaagtttcgtatatttttagagtttagttatatagagtttagtatatagtaggtgtttaataaatatttttttttttttttttttttttggtaaagtagggttttatttttgtttagattggaatgtaggagtttgattatagtttattttagttttaattttttaggtttaagtgttttttttgttttaattttttgagtagttgggtatatgttattacgttcggttaattgtttttttttttgagacgtagtttcgtttttgttgtttaggttggtatgtattgacgcgatttcggtttatcgtaaatttcgtttttagggtttaatagatttttttgttttagtttttcgaaattataggtatgtgttattatatttggttaattagttaatttttttttttttttttttttttttttttttgagatagagtttcgttttgttttttaggttggaatgtagtggcgttatttcggtttaatgtaagtttcgtttttagggtttacgttatttttagtttttcgagtagttggtattataggtattttatcgcgttcggttaattttttgtatttttagtagggacggggttttatcgtgttagcgaggatggtttcgattttttgatttcgtgattcgttcgtttcggttttttaaagtgttgggattataggcgtgagttatcgcgttcggtttaattttgtatttttagtagagacggtgttttaatatgttggtgaggttggtttcgaattttcgattttaggtgatttatttgtttcggttttttaaagtgtcgggattataggtgggaattatcgcgttcggttatttttgtatttttttgtagagacgggttttattatgttgtttaggttggttcggaatttttgggtttaagttatttttttattttggttttttaaagtgttgggattataagcgtgagttacgatgagtagtttaaatatttgttgaatggatgaatttgatagatagtgggtattttttttgtgtaggtttatgttgggttttagcgttatttttttgttttgtttttttggtagggttttggatttagatgtgagtttttggtgttttgaggggatggggtgggttgtgtgtttaggtaacgtggtatagattaggtagagaaagggagaagcgttttgttggtagggtttggaggtggagataggtgaatagaggtttgatgggtaaggttagaggggttgatatagtcgagttggggtgtgatgtgacgttggggaggtaatgtggagtttcgggtggaaagaattggaatgttaaggagaatggggagttttgtaggatttaggtagttgagggagtgatttattgggtttatttatttagagaagagatttcgttttgatgtttaggttggagtgtagtgatgtagttatagtttattgtagtttaagttatttttttattatagtttttcggagtattgggattataggtatgagttattatgttcgtttgtttatttatttatttgatttattgttttttttgtttgtttggttggttggttggttttttttttttgagacggagttttgttttgttgttaggtttattgtaatcgcggtttattgtaattttcggggtttaagcgatttttttgttttagtttttttagtggttgggattataggtgcgtgttattatgtttagttaattattattattattattatattttttgagacggagtttcgtttttgttgtttaggttggagtgtaatggtgcgatttcggttcgtcgtaattttcgttttttaggtttaagtgatttttttattttagtttttcgagtagcgaggattataggtatgcgttattatatttagttaattttgtatttttaggagagatagggtttttttatgttggttaggttgttttcgaatttttgattttaggtgatttgtttgtttcggttttttaaagtgttgggattataggcgtgagttattacgtttagtatgtttaattagtttttgtatttttagtagagacggggttttattatgttggttagaatggtttcgattttatgattttatgatttattcgtttttgttttttaaagtgttaggattataggcgtgagttacggtgtttagtttatttattggttttaaagagggaattttgggggtagtgtggagggagggatttattgttatagaatataaacgtaaattttgatttgggattagttaagtattattttaattttattttatttattttggtataattttttgttgaaagtattttggatttatgatggatttttttgggttttgttatatatttttatgttaaaggttaaattattttttacgtgtaagtaatttgaatagttttatttttatgggaatattggttgtagaaagatgatattatatgggttaggtgtttttttttaattgaaaaattaataaaaagaggaaaagaaaaatatataggttaggcgtagtggtttacgtttgtaattttagtattttgagaggttgaggtgaatggattatttgaggttaggagtttgagatttaaaaaaaaaaaaaaggaaaagaaaagttagtcgggtacggtggtttacgtttgtaattttagtattttgggaggtcgaggcgggtggattatgagtttaggagattaagattattttggttaatacggtgaaatttcgtttttattaaaaatataaaaaaaattagtcgggtatagtggtggatgtttgtagttttagttattcgggaggttgaggtaggagaatggcgtgaattcggaaggcggaggttgtagtgagttgagattatattattgtattttagtttgggttattgagagagattttattttaaaaaaaaaaaaaaaagaaaagaaaagttaataaattgtttagttgtatattttttttttttttttaaaaaaaaaaaaagatggggttattggagattttttattgtttatattttttagttggtttggtttttagttttagtaattttgttttttggttgtttttaattttggtataggattgtgttaagggtgtttattttgtttatttattgatttgggttttagtttttaatatattttttttttggggtttggatttgtttgtaatagttaagtgaggttttagaatttgttgttttttaggggatattgttaaaatgtttttttttttgttaagtttggtggtttatatttgtaattttagtattttgggaggttaaggtaggtagattatttgaggagttcgagattagtttggtttaatatggtgaaatttcgtttttattaaaaatataaaaattagttaggtatggtggagggcgtttgtagttttagttttttaggaggttgaggtaggagaattgtttgaattcgagagttggaggttgtcgtgagtcgagattgtattattgtattttagtttgggtaacggggcgagattttgttttaaaaaataaaataaaaaaataaaataaaataatatatcgtttttgttttgagtttttttttttattttgaggtttaattttgtttgtatttagggaggtagggatgtttttttagtgtggttagtagagtaggttgagggaagttgggggtttagtttttttggaaagggaggggtaggttttttttttgaagtttatgggggttgtttattttttgtaaggtgttgattgtgaggtagtttcggggagtagggagacgaaataggaaggatattgattagaggttcgtttgttgtttttgggagtttttagattttgggttggggattcgtgtttgtagttagtaaggttgggtttggttagttttgttacggtttatggagtgatcgtaggttaagattttttttttttagggtatttgtttgagagagggtgggtagatttcgaggtttttaaagttttttttgtttttgatattttatatttatttttttttagatttttgttcgggaaaaatatttaacgtatagagaagttgtaagaatagtataaatataataattatatttattagtggttattattttagttttttttttttttttttgtttttttttttatttttttatttttttatttggttttggtgaattatgtgataattagttgtagatatttgattttttatttttaaatatttttttatattttttttaagaatagggtcgtttttttatattgtgtgattattaaatttaggaaatttaatattgattcgatgttattatttgtttatatttttaattattttataaagttttttttagttatttttttttttttttgatttaggttttaattttaggttaagtattgtattta

SEQ ID NO: 575 - DNA, 5912 bp, Artificial Sequence
  chemically treated genomic DNA (Homo sapiens)
ttagaaggaatatatttgtttttttgtattgtggatttttttgtattttttagaatttttaatttaaattaaatattgtaaaatatattattgtaaataattggttggttattagttttttaaatattttgtagtaatttggttgtttgttagaggttttttttgagtgaagtttttaatttatagttttttatgtttgattagtataattgtattaaattgttatttaatttgaaaaatagttgttttttagagttttatttaatattgaaaatttattgtgtttgtattgtaattgtatttttttttttatttttttttttgttttttagtttgtataatttttgttattttatatttaagtttattggttttttttttgtttttgttgaatttatagatgagtttatttaaggtattttttttttttgttattgtttttaatttttagtatttttatttgatttatttatagtttttagttttatattgaaatatattgaaatatagagttggaaattataagagtgaattaaatttaattttgtatattgttttttaattttatatattttttatttaattttgtatattgtttttttttttttttaagagtttttaaaatattaattatggttattttaaattttttgtttgatagttttaataattgttatatatttaagtttggttttgatttttgttttgtttttttagattgtgattttttttgtttaggtatgttttgtattttaggggtaaaagttaggtattttagatagcgtaatagatattgaggtaaataaatttttgatatggtaatttattttaatttgattgggaattgggttgtgtttgatgttggtagttgttttggttgttattggtgagttttgttgttgttgtggttattagagattttaaatttttttggtaattttgtttttttattggaagtttgttagtgtagtggttgagtgtcgggtagaggtattttttaatgtttgaattaatatatagttggtttgggttttggggatgtggtttttataattatttttttttttttttttagaggtagagtaattttaattttttattttttttttggagttgtagtggatatttattagtgtttttagtttatggttttaaggtttttttttttgtataaggttgaaaaataataataataataaataaataaaaaaaaataaataaaaaaagaataaaataaaattatatatagatgagatttggtgttttttttttttaaaatgtagtggtatttttttagtgtttgatatggtttggttttgtgtttttatttaaatgttatgttaaattgtaatttttatatgttggaggaggggtttgatgggaggtgaatgaattatgggggtagattttttcgttgttgtatttgtgatagtgagtgagtttttaagagatttagttatttgagagtatgtaggatttttttttttattgtgtttattttgttgttgtgtgaagatgtgtttgttttttttttgttttttgttatgattttaagttttttgagggttttttagttatgttttttatatagtttgtagaattgtgagttaattaaatttttttgttttataaattatttagttacgggtagttttttatagtaatgtgatgtttttttttttgaagagaagggtataagtagatttatggtgattagttattgtgatttttttttaattagtaatatagagggtgttggggaggttttttttagatttttcgtattttttttgtgaaggtaaggtatagtttttgaaggaagaagtttgtaaaaggttgggattttatttatggtagtagtttttaggatttttatatttttaggttagtttttatatgttttttaataatttaatttttttattagtttatatggtatttgttttagggatttaaatgtttaggtattgtttttggttaaaggttaatttttttttagattttaggttgttttataatgttatttttttgatggattgatgaaaagttattaatttatttgtttagtagtttttttgttataagtatgggagtaatttttttgtagttttttatttttatttttaagttgaaattggaagtttgagtaatatattttagaaattaatatttgtaagtttttcgtgttataataaaaataataaatgtttattgtggaaaatatagaaaaagattaaaaatatttaagtgtttattattatttagataattgtaatgaatatgttggtaatgtttttttttagttttttaaaatttgttgataaaatataaaagatattgtttatataattttgtattttatttttttttgagtaatgtaagtttaaatttaaatacgaagatattttaattttttattttatatttttgacggtagatgttagttgtttttttaagtgtagtatttttggtttaatattaggtagataaataaggttattataaatttattttttattttaataatataggtaatttgatagttttatagattttataatattatttgattgaagatttagaatataagttttttaaggattattttagaaattatataaagtattggtattatttttttttattatattttgttaaatttaataggtttggaatttttgtaggaagatttttgtaatatgaaaaatgcgtgttgtattttttatatttagtaaatatattatcggttttttgttggttgtattaatgatataaaatgattttattgaatagggggtgatttagaatggaaatgtagagtatcgaaaataaaattaatcgacgtagtttttgtagtaaattatgtggaaataaatttaaatatggaatatattttttttaatttatttttagatgttgttttaaaatttgtgtaggtgaaaaaaaaatttttattttaaggtaatttaattttttattattggagagaatagaattatttttgtttttttttgtatatttttagttgtttaaatgttttttgtttttttgtgtggatatataaatttaaatatatttaatattaaggtatttattatatgtagtattttttttttagatagttattttttgaaatatttaaatagtttatttgtattattttttttatttttttttttttttttttttttttttaagacggagtttttttttgttattaggttggagtgtagtggtgcgatttcggtttattgtaatttttattttttaggtttaagcgatttttttgttttagttttttaagtagttgggattatagttgtatgttattatatttagttaatttttgtatttttagtagagatagggttttattaatttggttaggatggttttgattttttgattttatgatttatttattttagcgttttaaagtgttgggattataggcgtgagttattatatttagtttattttattttttaaacgaataattagttgatttttttttagtttttatttagaaatatttgattttaggttttaatttttgttttgttttttgtagttagtttttatgtgtattgttagggagatgtgttttttttttatttttaaatttaaaagagagagtttttaattttttttaagttaaaatataattgttttattttaaagttttttttaaaaaaagaaaagtattaaatttttattcgtagtaattaattttgatagtgtaggtttagtagtgatttataaatttgtattttgtgtattagtattttttattattttaattaaagtggaatattgtgttttcgttaattattaatgggtttttattttgtaaatgatatttgtagaagttaaaatagcgagtttatgtgaagtttataggtaacggtgttgaaattagtattattatagtaatagttttttattattagtatttagggtaataggaggtgttttgttgtgttttgttttttaaaaaaagaaaaagaaaaaaattttaaaggtaaagtttatagaaatttttttagaagatatttatgttttttgtgtgtatgtgtattgtattagatttttaagtttatatagaattttttttaaaaattgtaatgtggattattttttttttagatttgtgttttgtttagtatattagttaaattttatgatttttttttagttgtatacgtttgatttgttgagtagtatttatttattgttaatttgttgtttattaatagggttttttacgtggatgaagagagtttgtatttatgaaaatatttggtttaatttaaaagtattatgtgtatttatgagtttttaatttaatttatggaaaatagatttatgttgttagattttttggtgaatttatttagttatgttgtagatataggttaatgattatttttatttatgtttagacggaattaaagaggagttaaatagagaataatattattttaattgagtttttggtagtggtattattattattattttgtatgtgtgtgtgtgtatgtgtgtgtgtgtgtgtgtgtatgtgtgtgtgtgtgtgtgtttgaattttaatattttgggaaattttaaaagtggtatatttagtatttatgttttttttagtattaaaatgtataaaagagtattatattgatttattagttgtttttaaattatattagtagtaggtaattatgaaatttaaatgaagtttaatttttatttattatataaaaatgttatagtttaaatttagaagtgttatttttaagtttggatatagataggtatgtgtgtatattttattttttaagatgaattatagtagttttttttattatatgtaaggattagaagttgtatattttatttaggtatttaaaggtaagtttgtgttagtttatattaataaagtaaaaaaaagtaaaggatttatttggtttttaattagggatgtatttatgttattattagttttgttatataataaatgagtttatagataatttgaattatttagttaatgggttgtaatttagtgattttgtggtattgaaaggtagtaatttttagaagttatatgttttagtgtgtattttaggattgtaggtttatagaatttgtatgtatgtatatatgtatatgtattttttatttttttaatggcgatttaatttaggtttaatttatagttagtttagaaaagaatttttttaggttttttgtttgttattattttgttgagaggtagtataagttaagtaggtgtttgtatttataatatgtataatgttaggataatttaaatttataagggaaagattaatggttgattattatgaaaatcgtttttagttttgtgatattagtatttattattttttttttttttttatatgatgaaaagattttaatgttggttttttattttgatagaatgtgtaagttaaaatttaaataaagtttagtggtaatgatttttttaaatattatattttttttttcgatatgttgatgtttttttttataaaaatttatgtaagttttaagatttatatgatagataaattatataaataggaggttttttatatttattattagttatttgttttattattttggggatagcggtttttagattgtatttttattttattttttgttttttttaattttttttttttttttagattatatagggtattagataaggtttagtttattattaaattttggggattggaagatggtgtatatttttttgagtttttgttttaatttgatttatttagatggtattaatttatggtgtagaatataaaagttaaaggataataaaaattttaggaattttatgttagtaagaaagttttattagttagatgagatgt

SEQ ID NO: 576 - DNA, 5912 bp, Artificial Sequence
  chemically treated genomic DNA (Homo sapiens)
atattttatttgattggtagaatttttttattggtatgagatttttaggatttttgttattttttagtttttatattttatattatggattggtattatttaaatggattaaattggaataaagatttaaaaagatgtatattattttttaatttttaaagtttagtggtaaattaaattttgtttgatgttttgtatggtttaaaaaagaggagagggttgaaaagagtaagaggtagagtagagatgtaatttgaagatcgttatttttagagtgatagagtaagtgattagtagtgaatgtgagggattttttgtttgtgtggtttgtttgttatataaattttgaaatttatatagatttttataagggaaaatattagtatatcgagaagaaagatataatgtttaaggggattattgttattggattttatttagattttggtttgtatattttattagaatgaaaagttaatattgaaatttttttattatataagagaaaaaggaagatagtaggtgttggtattataaggttagaagcggtttttatagtagttagttattaattttttttttatgagtttgagttattttaatattgtgtatattataaatatagatatttgtttggtttgtattgttttttaataaagtgatggtagatagaaaatttaaaaaagtttttttttggattagttgtggattaggtttagattggatcgttattagaaaagtggggaatgtatatgtatgtgtgtatatatataagttttatgggtttatagttttggagtgtatattgagatatgtggtttttgggggttgttgttttttaatattatagaattattgggttatagtttattggttgagtagtttaagttatttatagatttatttattatgtgatagagttgatgatagtatagatgtatttttgattgaaagttagatagattttttgtttttttttgttttgttagtgtgggttagtataggtttgtttttaggtatttgagtggaatgtataatttttagtttttatatgtaatggagaagattgttatgatttattttgaaaagtaaaatgtatatatatatttgtttatatttaagtttgggggtaatatttttgggtttgagttatgatatttttgtataataaatgaaaattaaattttatttgaattttataattatttattattggtgtgatttagaagtagttggtaggttaatatggtgtttttttatgtattttagtattgagaaaaatataagtgttagatatgttatttttaaagttttttagaatattagaatttaaatatatatatatatatatatatatatatatatatatatatatatatatatatatatatagagtaatagtggtaatattattgttagagatttagttaagataatattgttttttatttgatttttttttaatttcgtttaaatatgaatgagaataattattgatttatatttataatatgattaaatgagtttattagaggatttaatagtataaatttattttttatgaattaaattaaaaatttatgaatatatataatatttttagattgaattaaatatttttatgaatatagattttttttatttacgtaggaaattttattggtgagtagtaggttggtaatgagtaaatgttgtttagtaggttagacgtgtatagttggagaaagattatgaaatttagttagtatattaggtaaaatataaatttggaaaggagatgatttatattgtaatttttaaaaaaaattttatgtagatttagaggtttagtatagtatatatatatataaggaatataaatattttttgagagagtttttgtaggttttatttttgaagtttttttttttttttttttttgggaaataaaatataataaaatattttttgttgttttgaatgttaatgatggaagattgttgttatggtgatgttaattttaatatcgttgtttgtggattttatatgaattcgttgttttaatttttgtaaatgttatttataaaatgaaaatttattaatgattagcgagggtataatgttttattttaattagaataataaggaatgttgatgtataaaatataggtttgtgaattattattgagtttatattgttaaaattaattattacggatgaggatttggtatttttttttttttaaagaaagttttagagtagaatagttgtattttgatttaaaaggaattgaaaatttttttttttaaatttgaaggtaaaaaaaaagtatatttttttaatagtatatataaaaattaattgtaaagagtaaaataaaagttggaatttagggttagatatttttgagtaagaattgaagaaaagttaattaattgttcgtttagaaaatagggtaggttgggtgtgatggtttacgtttgtaattttagtattttgggacgttgaggtgggtggattatgaggttaagagattaagattattttggttaaattggtgaaattttgtttttattaaaaatataaaaattagttgggtatggtggtatgtaattgtagttttagttatttgggaggttgaggtaggagaatcgtttgaatttgggaggtggaggttgtagtgagtcgagatcgtattattgtattttagtttggtgatagaggaagatttcgttttaaaaaaaaaaaaaaaaaaaaaaaaggatgggggggatgatataggtaagttatttgaatattttaaaaaataattatttgaggaaaaagtgttgtatatggtaaatattttgatattagatatatttggatttatgtgtttatataaggaaatagagaatatttaaataattgggaatatataagaggaaataaaaataattttattttttttaatggtaaaagattgagttattttaaaataaagattttttttttatttgtataaattttaaagtaatatttgaagatgagttggaaagagtatgttttatatttaaatttgtttttatatggtttgttgtaaagattgcgtcggttgattttattttcgatgttttatatttttattttgggttattttttatttagtgaaattattttatgttattggtgtagttaataaaaaatcgatggtgtatttgttggatatggaaggtgtaatacgtattttttatgttataaaaatttttttatagaagttttaaatttgttggatttggtaagatatgatgaagggagatgatattaatattttatatagtttttagagtaatttttgaaagatttgtattttgggtttttagttaagtaatattatagggtttgtagaattattaaattatttgtgttattgaggtgaaaggtgaatttgtggtggttttatttgtttatttgatattaagttaagggtattgtatttgggaagatagttgatatttgtcgttaaaaatgtaaagtaggaagttagagtattttcgtatttaggtttaaatttgtattgtttaagaaaaggtaggatataaagttatataaataatattttttgtattttattagtagattttaaaaaattggaagaagatattattaatatgtttattgtagttgtttaggtggtgatgggtatttaaatatttttaatttttttttatgttttttatagtgaatatttattatttttgttatgatacggaaaatttataaatattaatttttaaaatgtattgtttagatttttagttttaatttggagatggagatggagagttgtaaagaggttgtttttatatttgtagtaagaaaattgttggatagataaattaatgattttttattagtttattagagaaatgatattatagaataatttgaaatttggagagagattggtttttagttagaagtagtgtttgagtatttggatttttggagtagatgttatataaattagtagggagattaaattgttgggggatatgtgggagttagtttgagagtgtgaagattttgggggttattgttataggtggagttttaattttttgtaagtttttttttttaggaattgtattttgtttttataaggaggatgcgaagaatttggagaaagtttttttaatattttttgtgttgttgattggggaagggttatagtagttagttattatgaatttgtttatatttttttttttagaggaaaagatattatattgttataaagaattattcgtgattgggtagtttataaagtaaagaggtttaattgatttatagttttgtaggttgtataggaggtatggttggggagtttttaggaagtttaaaattatggtagaaggtaaaggggaagtaagtatatttttatatagtagtaggatagatatagtgaaggggaaagttttatatatttttaaataattagattttttgagaatttatttattattataagtatagtaacggagaaatttgtttttatgatttatttattttttattaggttttttttttaatatgtggggattataatttgatatgatatttgggtggagatatagaattaaattatattaggtattgaggaaatattattgtattttaggggaagggaatattagattttatttatgtgtggttttgttttgttttttttttgtttgtttttttttgtttgtttgttgttgttgttgttttttagttttatgtaggagaaagggttttggggttatagattgagaatattggtggatatttattgtagttttaggaagggaatgggaggttgaagttattttatttttggaggaagggaaagaaataattgtaaagattatatttttaagatttaggttaattgtgtattaatttaaatattagagaatgtttttgttcgatatttaattattatattaataagtttttaataaggaaataaagttattagaggaatttgaagtttttggtggttatagtagtaataaaatttattaatgataattaaagtaattattaatattaaatatagtttaatttttagttagattaagataaattattatgttaaaggtttatttattttagtatttattacgttatttaagatgtttgatttttatttttgagatataaagtatgtttaagtaagaaaaattatagtttaaggagataaagtaagaattagaattagatttagatatgtaatagttgttggaattattagataggaaatttaaaataattataattaatattttaaagatttttgagggaaaagaaagataatatgtaagattagatagaaaatatgtaagattagaagataatatgtaagattagatttgatttatttttatagtttttagttttatattttagtatattttagtatagagttggaaattataagtgaattaaatggaaatgttagaaattaaaagtagtaatagaaaagaaaaatattttagatgggtttatttgtagatttaataaagataaggaaagaattagtgaatttgaatatagggtaatagaaattatataaattgaaaagtagggggaaaagtaaaaaaaaaaatgtaattgtaatataaatatagtaggtttttagtattaagtagggttttaggaaatagttattttttagattaagtaatagtttggtgtaattatgttgattaagtataaagaattataaattaaagattttatttaaagaagatttttgataagtaattaagttgttataaagtatttaaaaagttagtgattaattagttgtttatagtgatatattttgtaatatttgatttagattaagagttttaggaaatataaaaagatttatagtataaaaaaataaatgtgttttttttaa

SEQ ID NO: 577 - DNA, 11155 bp, Artificial Sequence
  chemically treated genomic DNA (Homo sapiens)
gggaagttgatggtgtaatttttagtttgaggtttaaggtttgagaatttgggtgttaggaggagtagtttggtataaattttggagtttaaaggttatagaagttggagttgtgatgtttaagggtaggagaagaagaatgttttagttttaggagagagagaggaaattatttttttgtttttttttttgttttatcggggtttttagtagattggatattgtttgtttatattaggggtagatgttttttattaagtttatagatttatatgataagtttttttagaaatatttttatagatatgtttagaaataatgttttattagttttttaggtattttttaatttagttaagttgatatttaaaattaattattatataatttttttataaagataagtttttttttatgtttaatttggtttagtttatagaggtttgtataaatattttattttttttatttatttataagtttttaaggttatgaagtggttttttgttattattttaaggtgattaattagtattttattttatttttgtaatattattatgaatttagagatttaaaattatttattttaaagattatattgttttatttttggttagtagaggtttatttgagttggtttttgagttttttgatagaattttagtaatttttgatagtttttttggaatttgggacgataatatgttttaaatttattttgtatattttgggttatagatttggtattaattaattttttaataggttttagatgttagattataattcgggttttaggggttttagttatgattgtgtttttaggtttttatagtgatagagttaagatatatatgtaggatatgtgtgtgtgtgcgtgagtgtgtttttataataatttttgagtaaattttaattttttttatttaaatttaggattataggattatggagtttattattttttttttttgagatagggttttattttgttatttaggttggagtgtagtggtgtgattatggtttattgtagttttgattttttgggtttaagtaatttttttgttttagttttttgagtagttgggattataggtgggagttattacgtttagttaatttttttgtattgtttgtagagatgaggttttattatgttgtttaagttggtttggaatttttggtttaaggtatttgttggtttcggttttttaaagggtttttgtttttttgtattaaatttgtattttttttttttatattgagaattttgatttttatggatgtattggttaaagaaagagaataatttaaaattattaatatattttattttatattatatatataatatttttagaataataataatattgttattattagtataattattgagagtagttgaaattatttttgtatatatgtttttcgttttttttatttttttaaaagttgtattatattaatgttaagtatttagttattatatatcgtgttgtttttcgtttagttttatttaattatatttttataagtaattatatgttttatgtttattatttgtttttacgataatgtttttttagttattttggttgattgaaattttttatttagtagattttttagtaatggtttgagaaaataatattttttgaatttttgtttgttgatagtagtttgttttagttttttatatttaaaagttagtttgttgatttataaaatttttattttatatttttttattttgaatgtattaggtatattattttattttttttggtatgaagtattattgttaaagttttaatgataatttaatatttttttttttatgaattatttgttgtttttgtttagaagtttaaaggattttatttttaaagtttagtaattttattagaatatgttttggtgttggttattttgggttaatatttttaggtatatgatatgttttttaaatgagagtttttaattttttttttttaaatttagggaaatttttttcgatgatatgtttgttattcgtttgttttttagtatttttgttgtttttttatttttgttattttttttaggttttttataatttataatttggatgttttttgttaatttttaatataatttatttttttttaaatattttttatttatttatttttttaattttaaaatattttttttttttttgttttttatttttattgaataattatttattatatttatttttttttgtgttttttttagattagtttttatttttaaaataatttttttttttatgttaatatttttttgagttttgatatttattttttgaattattttagtttttatgtattttttttatttattgtgttatttttttgatatttttttattattttaaaaatagaagtttagggttttaatttattatttaattatgttttttaagtatattttgtttattaggttgttattttgtttttatgggatttaatttttatagttttttgttgtttgttttatatgaaagtggtttttttgtatttttagaaagaaatgtggtttagggtaatttttaaattttatacggtttttttttttgttgttttcgtgttatgttaaaaaaaaatagtagttttttaagattttttggatttattttttttttttatatttatttgtgttttttttattgtttatattttgtgtaatttttattttatttttagaagttttttttgtatgtgagtttgttttagaaagtagttgtagtggtttagaatttttaggggttagattggtttagattttttagttgtgttatgaattattggtatttattagtaataatttttgattgttttgggttttgttgtttttatgtttattagattttttgttgttttttttcgtttatttttgtatagattttttaggttttgtggtagttgtggattttgtttttagttattttggagttagtggatataatttgttataaggggtggtaattaattaaaaattgttttaacgttttttttgttttttatatatgtgtattttgatttgatattaaaaggtagagagtatttttttttatgaatttgagatttttttgtgattgattgattaatagaatatggaaaaatgatattttaggaatttttggtttttagtttttaggttgtgagaaggttaagttaaggagaggttatgtaaagaattaaagtgtttagaattatagttttagttgagtttttaggtaataattatgaaagtggtatttgaaatgttttgttttaattgagtttttagatgattataatgttagttgtgagagataagaaaatggtagttgttttaaaatgtaaagtattgaagtggtttttgatatagtaatagataataaaaatgtttagttttattgtaaatgttatttatagtttttaattttgttatttaattgtttttttgtttttatgtagggatttgaagagagtttaaaataatgttttgtaatgtaatttgtttaaatttgtttagaatttaattttgttataagattataaggtttttttagtatagattttagttaagatttatgaaattattagagagtgtaatttagaattagagtaaattatagggaatttatagtttttttatatggattttggttttttaattaattttaaatgaaaatagatatttttttttttattgtttgtattattttttttcgtatattatagtttatattaaatatgttgataatttatatatttgatattagttgtttgaataaattgggtattttaattttttagatttatgttaggagtattagtttaatttttttttaataattaaagtatttttttaaaagttatagtgagttatgtagatattgtaattaagttaatagtttggttaatttttaagttaatttatttagttatttaaagagtattgagtgattattaagaattgttttaggtatttaggtattgattatagattagtaaataagtaaatatttttatttttaaggaaattaaggtttagtagttgatattttttaaatttttgtttagtggttattttgtcgttatttgaatacgtttttgggaaattgttaaatttatttttagttttttataatttttagtacgttttttcgaaaatgttttggtaaatattattttatttattttattatatttttagtggtggtatagagtttttttaagattagtttttttggatgttatttagttagtattttttttaatttaattttgattttaaagaattattaaaatgtggtaaacggggaatgattaagtgttaagtgttagatttaaattttttgaataatataatagttatttaaggggggtattttagtggacgttttattagattagtaggagtttgggaattttgtgtgtatatgggggtggggagatgagaggaaaaggaggtgagtagtagaggttgttaaaagaggaaaaaggaagaaataaaagtttatatttttaaaattaataatttaaggaattttagtattttagtagttttttttatgtataatttggaaatgtatattaataggaaattttttatttatttttgttttcgttttttttatttttgggtttgttgggatttgtcggtgggtagaagatattgttattgtttataagattgtttgaatgtgaatgatatatatttagaaattaaaataaagttttgggaagatttttaatttaatggaaattagtttagttatttgggaattataagagttttttagggaaaatgtgtttttgttagttggaggaagtgtgggtgtatcggggtttcggtgatattttgtgatgttagttatttttagtttgaggttgattggttatgaagagttgtagtagagtttaaatttttgtattattagagaagtgtttagaatattaatataagagtggttttattgggtatagattttttttttgagaatattaatttgatttttgagattttttgaaaaaattttttgtgaattacggagggtaagttatttttattatttaattttttaaaatgatttttgttggttgtttggaaaatattaaatatgtatatatgtttgaggtattatattatgtagagagagatgggagagttgcgttttgggtaaaaatagtttttatttttgtgtttgttgtttatgttatagtaaataatgatatgaaaatgatatgttaagataatatagttaggtgttttttttggtaatgttttaattagatttttgtatgatatttttaaaagggatagtttatagaataggaggtagatggaaggttattttgaaatttagttttaattagtaaaacgtataaaatttttatagtgtgttttatgaataagggaatgtttgtaatttttaagattgtgaaaaaaaagttaaatttattgaatggtaggattttaaaaagaattttttttaaattaaaatgttatttatttagagagtatttagtaatatttattatgaattgtataagtaattaaaagatgattaaattattgaaataattgagggtgtgataattatgttttttgtatttatgttagtatgatgttttgaatatagttagaatttaataaatgttgaatataattatattttaaaatattgtattttaaaatatatattttaaaatgtttatatgtatttttatttattgtatttagtgtatttttttatttgtgtgacgtttagaagagtttatgtgttttagtaatttgttttttttaagagtagtaatttgtggttaattatattttttgtttaattgaggtttgattattttattttaattttgttgtttaaaaatgcgaataaattattttttaaagggtattagtttatttatttatttgaaaatggtgatgtaaaataatgtgttttagatgtttagaggttttttaaatttatatttaattttgggggtattttagaggtatatttttgtgattaaaagtatataatattggatttatcgtaattgatttgaagatatatataataggaagaattggatttttttttggtttgtttgtttttttggatttttggtagagtttatattttggttaagtttgattttatttttaaagagtaataagaaaataaattttagtaggttttagttagttggattttggttaattttattattataaaataaatttattttattattattgtttattattattaaagttttttgttaatgtatatttataggttgtatatggagaaagttattaaaatattagagttttttaaattgttggttttgagaatatgggttagaaaagtgtttaatatattgtatgtttataaatatttattgattgttaatgaatgaatgtattgtttagttgtgtttttgaagataataatattaagataaataaagtaaattaatatgatgaattgttttttaaaagaaaaaagagtttatgattttttaaatttttattttttttttttggtttattttttttattttggtttatataaaagaagatatatattttataaatgtattttaattttgagaaaatgttagaataaatttttttatttaagagtcgaaagaagttttggttatatatttgaaattttgattttagtttttttttttatattttaaatatttggttttttttaattttatgaaaataatttataggggtagaaattttttaatatatcgttttttaaatggatggaatttaagttgtttatttttttttgttacgttattttattgtagaatgatagtatgtagaatgtagaaataatattaattaattattgaagaagaatttaaagttttggatttttaattgtaggtttgtagttgtggtttatatttattatttagaatacggttattgtttatttgtttttatttttttttgaatagtagttaaaatgtttataaaagtttggagtttttgtttggaaatgtattttataaaattataattatttttattagaaatattaaatgtaaatttaataaggggtttaagatttgattttttttaatgtttaaagttggattatattttttgggtggtaatattagtttttttagaattttagagtgttttttattttagtttattagatttgtatttgggaaattattgttttaggttaggatgttaacgagtatttttagaattttgagtaagttagggtattttttttgtgttttagaattttttatttttaagaaatttgagtatttggggtatgtatttttttgtgagaaaatataacgtttattggtttagaataaatgtataatggtatttttagttttttaattatttagattagagaagttaaagaaaatataagagaatttaatagttattgattttttgttaaggttttaatatttgttagtttttagagaattatgaaattataattttatttaaattttattttgaaaattaaaatgatgaggtaatttttatttgatttgtgaaattgaaagtattgaaagggttattttgagaatattatatttgagaaaattttgtttttttgaagaaataaatttaatatattttttaaaaagttttgattgtggtatttaaagagaagtaatatttattaaattaagtttgattttggtatagttaagtatttttatatgtttttttttgttgatattaattgaaggatttttaaaagaaattaagatagtattaaatataaggattgatatatattatgttgaattagaataaagaaagtagtataaattaagaataattatgttgaggagagataatgtttataatatatatgagaggttgtttgattatttgagttgtgtgaaagtagaaatgagaagtttgtttaggttttttattttaggatttttattattttattgaatatattaaaaataagattagatgattttttgagtttaatgttttagataatatttagtatatttaggtattatcgagtgatatatatatatatatatatatatatatatatatattttttttttgagatagggttttgttttgttatttaaataggtgtggagtggtacgattatggtttagtgtagttttaatttttttggtttaaagaattttttttatttagttttttgagtagttgggattataggtacgtgttattaagtttggttaattatgatatttttaatttttagattaagtgttaaaattttttgtggaattttaaaaataaatttatttttgtgtttatttaagtgaatggatttattgttttgggatgggatttgtgtattggtatttttaaaattttttttagttgatagtaatatatatttagggttgagaatttttggtttttaatttttattattattttaggggttaagggaaaattttttttttattttttgaaggtttgttgaaaattaattgataaaatatagattaataggagaaaaggaatataaaattatttttatgtgatataggagtttttagaacgaagatttaaagatataggagaaattgtttatttttatgtttatgtttaataaaatatgggtagttatgtagaaatatgattggataaaaaggttttgattttatattagtagattaagtggggtggtttagtaaagtttgtttagattttttttggttttttcgtgtagtatttttttttttttgatatgggataggattttttttgtaatgcgggttttatgatatataattaaattaggggggttagagaatttttttaaggttagttgttatatagaaagatagggggatttagggtaatatttttaggttttattgttggttttggggaaaagaggttttggtttttataatttgtttttgggaaagagggattttagtttttatggttagttttaggggagaatgaggggttagagataggagggtaggggaaggttagagagaagtttttgtttttgaggttgtttttgaggtttttattatggagtattgttttttgagtttttatattagtaaattattgtaaattaaagaaaatgattgaggtgagttttaattatttttggagatttattttgttaaaattgaggatgtatttgggaaaaatgaatataaaattattagaaatatttatggtttatgtttgtttataaagagttcgaggattttagtatttaaaggggaaagaataggtaataggagaaaggaaggatagataaaagaggtaagtggttgtatttttttgagtttttgtttagtgtttattgagtttatattttatatgtgaaaggagagggtagaggaatagttaattatgtatttgttttatgtttagtgaatttgtatttttatataagataaagtaaatatagattagaggaagttgttagatatgtatttgttttaggtgagaagaggaatgatttttagttttgttttttgttttgaatttatgaaggtaagttgttaatttatattgtgagggtgaaatttaattagattgttttggggtaaagattttagggtttataggaatttttttgtgagaaaattgtgagggaggtatgtagttttttatttttgtagttatttttttaagaataaaatgggaggtaggtttgagtgatttagtttttaggttgattttttttttgatttagtgagtttggggttttaagattttattttttttttatagtatatatttaatatttaaagaaatgaaataaatcgataaacgtgaaataaatttgtaggattatttgtgaaatgtatggaagtttattagataagtatgttagggtagttattagggtttattagtgtagggtaaattgcgttttttaaattattttaataaatttttattttagtatttagtatttttatttttaaatataaaataaagtgttttttaaagtaatagtttttgaagtgtgaaatgaagttattttttagaaaaatagtttgatttggcgtgttttttttagtatgatttataagtgtattttaaatttgtaattttttttaaattttttagtattgtgaatgatagtaaaaataatttagtataattatgtataatgtatgattaaacgtgttatagtagatattaagagttttttgaagttgtaatatgaagtttattttagcgtattttttgtagattataaaaaaagtaaaaaaaaatttattttgtgtagatattattatgtagttataaatgtgatttataagttattgtgtgtgtgtgtgtgtatgtgtatgtgtgtgtttgtgtgtgtgtgaaaataaatgtttattatttattattggtgttaataagtgtagttttttagggagaatatatttgttagggtgttttgttatattaagttgtataattattgtaaaagggaatggatagaaatttttatatttttttttttttattttttcgttaatttattatattttatgtgttagcgtttgtatatttttttattgaaatatttttaatttattttttaggagtgaggtttttaaaaattattttgttgagttataatttatatattatatattttattaatttgaagtgtatagtttagtggtttttagtatgtttatagagttgtgtaatttttattataatatatggaatagttttattatttttaaaagaaattttgtatttattagttgttattttttaattttttatttgtataagttttgggtaattattagtttattttttgtttttgtagatttgtttattgtggatattttatgtaaatagaattattttaatgtggtttttttatttggttttttttatttagtatagtgtttttaagttttttttattttgtagtatatgttagtattttatttttttttatggttgaataatattttgttttatagatatagtaaattttatttatttatttattagtttatggatatttggatgaatttttagtaggaagaaattgttaaaaagttgaagttattttatttttttaatatggagagaaatatttatgttttttattttagg

SEQ ID NO: 578 - DNA, 11155 bp, Artificial Sequence
  chemically treated genomic DNA (Homo sapiens)
tttggaatgaaggatatagatgtttttttttatgttaaaggaataaagtagttttaattttttaatagtttttttttattaaaaatttatttaaatgtttatgaattgatgaatggataaataaaatttattgtatttataaaatagaatattatttaattataaagaggaatgaagtattgatatgtgttgtagagtagaggaagtttgagaatattatgttaagtgaaagaagttagataaaaaggttatattggaatgattttatttatatgaaatgtttataataggtaaatttatagagataaaaagtagattagtggttgtttagagtttgtgtagatgggaggttgaggggtgatagttaatgggtataggattttttttggaggtgatgaaattgttttatgtattgtagtgaaggttgtataattttgtgaatatattgaaaattattgagttatatattttaaattagtgaagtatgtggtgtatagattataatttaataaagtggtttttaaaaattttatttttaagaaataaattgaaaatgttttaatgaggagatgtataaacgttaatatataaagtatgataaattgacgaaaaagtaaagaaagaggaatatagaaatttttatttatttttttttataataattatgtagtttggtatggtagagtattttagtaaatgtattttttttaaaaaattatatttattgatattagtgataggtggtgggtatttgtttttatatatatataaatatatatatatatatatatatatatatatataatggtttgtaagttatatttatgattgtataataatgtttatataaaatagatttttttttgttttttttgtgatttgtaagagatgcgttagagtgggttttatattataattttagaaagtttttaatatttattgtgatacgtttagttatatattatatatgattatgttaaattatttttgttgttatttatagtattgaaggatttggggaagattataggtttgggatatatttgtaaattatgttgagagaaatacgttaaattaaattatttttttggagggtaattttattttatattttaagagttgttgttttggaaaatattttgttttgtatttaaaaatagaagtattagatgttaaagtaaaaatttattgaaatggtttaaggaacgtaatttattttgtattagtaagttttggtagttgttttagtatatttgtttgatgaatttttatatattttataaataattttgtaagtttattttacgtttgtcgatttgttttatttttttaaatgttaaatgtatattgtgaaaggaaaataaaattttgggattttaaatttattaagttaaagggaaagttaatttaggaattgggttatttaaatttgttttttattttgtttttaaaaagatagttataaggataaaaggttatatattttttttataatttttttatagggaaatttttgtgggttttgagatttttattttaaaatagtttggttgaattttatttttataatgtaaattaatagtttatttttataagtttaggataaaggatagaattaaaagttatttttttttttatttgagatagatgtatgtttgatagttttttttagtttatgtttattttattttatgtagaaatgtagatttattgagtatgagataaatgtataattgattatttttttattttttttttttatatataaaatgtgggtttagtgagtattaaataaagatttaaaggaatgtaattatttgttttttttatttgtttttttttttttttattgtttgtttttttttttttaaatattgaagttttcggattttttgtaaataaatatggattatagatgtttttggtagttttgtgtttattttttttaggtgtatttttaattttggtaagataagtttttaaaaataattgagatttattttagttattttttttgatttgtaatagtttattggtataggaatttagaaaataatattttataatgaaggttttagaagtagttttagaagtaaaagtttttttttgatttttttttgtttttttatttttggttttttatttttttttgagattaattatagaaattagaattttttttttttaaaggtaggttatagaaattagaattttttttttttaaagttagtaataaaatttgaaaatattattttaagtttttttgtttttttgtgtaataattggttttaaagaaattttttgatttttttagtttaattgtatgttataagattcgtattgtagagaaggttttgttttatattaggaaggaagaaatgttgtacggagaggttaagaagaatttggataggttttgttgggttattttatttggtttattagtataaggttaaaatttttttgtttaattatatttttatatggttgtttatgttttgttggatataagtataaagatggatagttttttttgtatttttaggttttcgttttgaaggtttttgtgttatataaaaataattttgtatttttttttttttattaatttatattttgttagttgatttttagtaaatttttagagggtgagggggaagtttttttttggtttttaaaataatgataggagttaaaagttaaagatttttaattttaaatatatattattattaattgggaagagttttaaaaatgttaatgtataaattttattttagggtaataaatttatttatttgggtgggtataggaataggtttgtttttaaagttttataagagattttaatatttgatttaagaattaaaaatattataattaattaggtttggtggtacgtgtttgtagttttagttatttaggaggttgagtggggagaattttttgagttagggaggttgaagttgtattgagttatgatcgtgttattttatatttgtttgggtgatagagtaagattttattttaaaaaaaaagtatatatatatatatatatatatatatatatatattattcgataatgtttgaatatgttgaatattgtttgaaatattgggtttaagaagttatttaattttatttttaatgtatttaataaaataatagaaattttaagataaggagtttgaataggttttttatttttgtttttatataatttaaatggttaaataattttttatgtatgttatgggtattatttttttttagtatagttatttttaatttgtgttattttttttattttaatttagtatagtgtatattagtttttatgtttgatattattttaattttttttaaaaattttttaattaatattaatagagaaaaatatatgaaaatgtttaattatattaaaattaagtttaatttaatagatgttatttttttttagatattataattaaaattttttaaaaaatgtgttaggtttatttttttaggaaagtaaaatttttttaaatatgatatttttaaaataatttttttaatgtttttagttttatagattaaatgaaagttattttattattttaatttttaaagtgaaatttgaatagggttataattttatgattttttgaaagttagtaaatgttagagttttgatagaaggttaatgattattgaatttttttgtattttttttagtttttttaatttaaataattagaaaattggggatgttattgtgtatttattttaaattaatgaacgttgtgtttttttataaagaagtgtatgttttaagtgtttaagttttttagggatggaagattttaaaatataagaaagatgttttaatttgtttaggattttagaaatattcgttagtattttgatttaaagtaataattttttagatgtaagtttagtaaattaaaataaaagatattttagagttttgagagagttgatgttgttatttaaaaaatatagtttaattttaagtattaaagaaaattagattttaaattttttgttaggtttgtatttggtatttttgataaaaataattataattttgtgaagtgtatttttaaataagagttttaaatttttataaatattttggttattatttaaaaaagagtagaagtagataggtagtagtcgtattttgaataataaatgtgaattatagttataagtttgtaattaaaagtttagaattttgagtttttttttagtgattggttaatgttatttttatattttatatgttgttattttatagtgagatgacgtaataaaaggaaataaataatttgagttttatttatttggaaggcggtgtattagagaatttttgtttttgtgaattgtttttatagagttgaaaagagttaaatgtttagaatgtggagagggaaattaaagttaagattttaggtgtgtagttaaaatttttttcggtttttaagtaaggaaatttgttttagtatttttttaaggttaagatatatttgtaaaatatatatttttttttatgtaaattaaaatgaaggaaataggttaaaagaagaaaataaaggtttgaaaagttatagattttttttttttttggaaaataatttattatattaatttgttttatttgttttagtattgttatttttaagaatataattgaataatatatttatttattagtagttagtaaatatttatgaatatgtaatgtgttaggtatttttttagtttatatttttaaaattaataatttaagaaattttaatattttggtagttttttttatgtataatttgtaaatgtatattagtaggaaattttaataataataaataataataataaaataagtttgttttataataataaaattaattagaatttaattaattagaatttgttagaatttgtttttttattattttttgaaaatagaattaaatttggttaggatatgaattttattaggaatttagagaaataaataaattaaaaaaaaatttaattttttttattgtatgtgtttttaggttaattacgatgaatttaatattatatgtttttaattataggaatatatttttgaggtgtttttaaaattaaatatagatttggaaggtttttaagtatttgaggtatattgttttatattattatttttaggtaggtaagtggattaatattttttagaaaatagtttgttcgtatttttaaataataaagttaaaataagatagttaagttttagttaaatagaaagtatggttaattataagttattgtttttaaggaagataagttgttaaaatatatggatttttttaaacgttatatagatgaagaagtgtattaaatatagtaaataaaaatatatatggatattttaaaatatatgttttaaaatgtaatattttaaaatataattatatttaatatttattgaattttaattgtatttaaggtattatgttaatatgaatataaaaaatataattattatatttttagttattttagtagtttaattattttttagttatttatgtagtttataataaatgttattagatgttttttagatgaataatattttaatttaaaaaaaattttttttaaagttttgttatttaataagtttagttttttttttataattttgaaggttgtaaatatttttttatttatgaaatatattgtaaaagttttatacgttttgttaattaaaattaaattttaaaatgattttttatttgttttttgttttataaattattttttttagaagtgttatgtagagatttaattaaagtattattaagaaaaatatttggttgtattgttttaatatgttatttttatattattatttattgtggtataaataataggtataaaaataggaattgtttttatttaaagcgtagtttttttatttttttttatatggtataatgttttaaatatgtatatatatttaatattttttaaataattagtaaaagttattttaaaaaattaaatgatgaaaatgatttatttttcgtagtttataaagaatttttttaaaaagttttaaaaattaggttgatgtttttaaagaggaaatttatgtttaatgaagttatttttgtgttgatattttggatatttttttgatggtgtaggaatttaaattttgttgtagttttttatagttaattaattttaggttgggggtgattgatattataaggtgttatcgggatttcggtatatttatattttttttagttggtagaggtatattttttttaaaaagtttttgtggtttttaaatgattagattagtttttattaaattgaagatttttttaaaattttattttgatttttaaatatatgttatttatatttaggtagttttatgaataatgataatgttttttatttatcgatagattttagtagatttaaggatgggaaaggcggaggtaggggtgggtagaaagttttttgttaatgtatatttttaggttgtatatggagaaagttattaaaatattagagttttttaaattgttggttttgagaatatgggtttttatttttttttttttttttttttaataatttttattatttatttttttttttttttatttttttatttttatatatatataaagtttttaaatttttattaatttaataaagcgtttattaaagtattttttttaagtagttattgtgttatttaagaaatttagatttaatatttaatatttaattatttttcgtttgttatattttaatgattttttgaaattagaattggattaaggggaatattagttgggtagtatttaaggaaattaattttgaagggattttgtgttattattgaaaatgtaatgaaatggataaaatgatatttattaaaatattttcgaggaagcgtattaaaagttgtagggagttggaaatgggtttggtaattttttaggagcgtgtttaagtgacggtaggatggttattgaataagaatttagagaatattagttgttggattttaatttttttaagagtagggatgtttgtttgtttattgatttataattagtgtttggatatttagaatagtttttaataattatttagtattttttgaatgattgagtggattggtttgaaaattagttaaattattaatttgattatagtatttgtataatttattgtaatttttaaaaaaatgttttaattgttaaaaaaaaattgagttgatgtttttaatatggatttagaaaattagagtgtttaatttatttaggtaattaatgttagatatatggattattaatatatttagtgtgaattataatatgcgggggagggtggtgtagataatgaggaaagagatgtttatttttatttagggttgattagaaagttaaagtttatatggggaagttataaattttttgtgatttgttttggttttgaattatattttttgatggttttatgggttttaattgagatttatgttagaagaattttataattttatgatagaattggattttgggtagatttgggtagattgtattataagatattattttagattttttttaaatttttatataaaaatagaggagtaattagataataaaattgaaaattgtggataatatttataataaaattaggtatttttgttatttattgttatattaaaaattattttaatattttgtattttaaaataattattatttttttattttttatagttagtattgtagttatttgaagatttagttggggtagaatattttagatgttatttttatagttgttatttgagagtttagttggagttgtaattttgagtattttagttttttatatggtttttttttggtttggtttttttataatttgaaggttgggggttaagagtttttagaatattatttttttatattttgttggttaattaattataaggagattttagatttataaggagaaatattttttattttttggtgttagattaggatgtatatgtatagggagtagaggaaacgttgaggtagtttttgattagttattattttttatgataagttatatttattaattttaaggtgattaaggataaagtttataattgttataagatttagagagtttatgtaggagtgagcggaggaaagtagtaggaaatttgatgaatatgagaatagtagaatttaaagtagttaagaattattgttgatgggtgttaatggtttatagtatagttgaaggatttagattagtttagtttttaaggattttaagttattatagttgttttttaagatagatttatatataggagaaatttttgggagtggaataaaaattgtataggatatagataatagagaagatatagataaatatgggagaggggaatggatttaagaaattttagaaagttgttatttttttttaatataatacgaaagtaatagaagagggagtcgtgtgaagtttgaaagttattttgaattatatttttttttaaaagtataggaaaattatttttatataaaataaatagtaaaaaattatgaaggttaaattttataggagtagaataataatttgatagataaagtatgtttaaaagatataattaaataataaattaaaattttaagtttttatttttaaaatagtaaagaagtattaagaaaatgatataataggtgaaaaaaatatatggaaattagaataatttagaaaataaatattaggatttaggaaaatattagtatgaaagaaaaaattattttagaaatgaaaattaatttagagggaatataaaagagaataaatataataggtaattatttaatggaagtagaaggtaaaaaagagggaaatattttaaagttaaaaaaataaataaataaaaagtatttgggaaaaagtgaattatattaaagattggtaaagaatatttaaattgtagattataggaggtttaaagaagataataaaagtgagagaatagtagaagtattaaaaaataaacgaataataaatatattatcgaaggaagtttttttgaatttaaaaaaagaagattaaaaatttttatttaaagagtatattatgtatttgagaatattggtttaaaatgattaatattaaaatatattttaataaaattattgaattttgaaggtaaagttttttgggtttttaggtaaaagtaataagtgatttataagggaagggatattagattattattaagattttgatagtaatgttttatgttaggaaaaataaggtaatatatttaatgtatttaagataagaaaatgtgaagtaaggattttataagttagtaaattgatttttaggtatgagaggttaaagtaaattgttattaataggtaagaatttaaggaatattatttttttaaattattgttggggaatttattagataaagagttttagttaattaaaataattagagaggtattgtcgtaagaataggtgataaatataaaatatatagttatttgtaaaaatgtaattaagtgaggttaaacgggagatagtacggtatataataattaaatatttagtattgatatagtgtagtttttaaaaaggtggggagaacggagagtatatatgtaaaaataattttaattgtttttaataattatattagtgatggtaatattattgttattttgagaatgttgtatgtataatgtggaataaagtatattagtaattttgaattattttttttttttaattaatgtatttatgagaattaggatttttagtgtaaagaaaggagatataaatttgatataaaagagtaaaagttttttgggaggtcgaggttagtagatattttgagttaggagttttaaattagtttgggtaatatggtgaaattttatttttataaatagtataaaaaaattagttgggcgtggtggtttttatttgtagttttagttatttaggaggttgagataggaggattgtttgagtttaggaagttaaggttgtagtgagttatgattatattattgtattttagtttgggtgatagagtgagattttgttttaaaaaaaaagagtaatgaattttataattttataattttgaatttaaatggaaaagattagaatttatttagggattattataaagatatatttacgtatatatatatatattttatatgtatattttagttttgttattatagagatttaaaaatatagttatagttaggatttttagaattcggattatgatttagtatttggggtttgttgggaaattggttgatattaggtttatgatttaaaatatgtaagatgagtttggaatatattgtcgttttagattttaggaaagttattaaagattattaagattttgttaaaggatttaggagttaatttaaataggtttttattggttaaagatggagtaatgtagtttttaaaatagataattttaaatttttgagtttataatgatattataaaaatgaaatagaatattaattggttattttgggatgataataggaagttattttatgattttgaaaatttataagtaagtggaaagaatgaggtatttgtgtagatttttatgaattaaattaaattagatatgaggggaagtttatttttgtaaaagaattgtgtgatgattaattttaggtgttaatttgattggattaaagaatatttagagaattggtaaagtattatttttgggtatgtttgtgagggtgtttttagaggagtttgttatgtgagtttgtggatttggtgagaagtatttgtttttagtatggataggtaatatttagtttgttggagatttcgatagaataaaaaaggaagtagaaaaatgatttttttttttttttttggagttgagatatttttttttttttgtttttggatattataattttagtttttatggtttttaggttttaggatttatattaggttattttttttgatatttaggtttttagattttgggttttagattgagagttatattattagtttttt

SEQ ID NO: 579 - DNA, 5314 bp, Artificial Sequence
  chemically treated genomic DNA (Homo sapiens)
tttagtttatttttttcgatggaagagtggtttcggacgtatattttttttatgttggtgggagtagtggtaggagtagtggtagcgagtaggataggcggttgtttttttatttaaggattttgttattaggattcgtacgtttttttggttttggggatggggtatttgtgttttatggtgggtttttttgtggatatatttaggggttttggagtatttttgggtagtttgatagagtcgggaggtgtttttttattttttattttgatttggagaggtgaatgggattttggttgttgttcggatttgtgtgttgagggtttagtgtaggttgggtttagggtgtggtttagagtagtaggtttttttttttggagttagtagtttttggggtttttggataggggtaggttttggggtttaggtttagatgttttttttaggtggtgggtatattaaagaggttatcgtggttgttgaggcggagttgggagacggtgagatggtcgaggtttcgggtagttttcgttagtaggggttggggttcgtaggggagggtgagtaggtttaggtgaagttattggtgaataaggatggtcgttatgtgtgtgcgttgtgttataagatttttaagacggtgagtcggcgtgcggggagttagtgtgtgggtggtaggtttttttttgtttttttaggagggttttgagttgttacgtttttttttatagggtagtatttttaaggtttatatggttatttatagtagtcgtaaggattacgagtgtaagttttgtggggttttttttcgtattaagggtttatttattcggtattatcggcggtatacgggtgagttggtcgtatttcgggttggagttcggtagtatttcgatggttggttttggggtgttttagtttcgtattttttagttttgggggatgaggcgggggtttttgtttgttttcgttttgttattttgtcgttagtttgttggggttgttcggggttgattaggttttttttgtagatgagcgtttttataagtgttttaagtgtggaaagagttttcgggagtcgggtgtattgattcggtattttaagttttttattttttgtatagagaaaattcgttttagtgtgagtaaggacgtggttgttagtaaagaggacgtacgtgtaggttagtatggtgcgggtagttgtttggttttgggggttggttgtggacgtagtcgttattggggtgtgtgagggatttttatttttttattttattttgaaggttttggagttggagttgtcggtttggggatagttatattatcggtgataggcgagtttatagagattttattcgtgatttatttggtgatagatgttaagggtatcgttatttacgaagtttacgtttagatgtaggagttgtttttgggtatgaaagttttggttttagaggtgggggcgacggggggtttcggagggttgttttgttttttgtttgttcggtgttagtttttgttttgggtattggttttaggggtttgagttaggtaggcgagggttgggttttttatagggagagtagggttagtgggagcgttatgggggtttgagggtttgtataaggtttttggcgtgcgtttgttttatggggtgggtgttggatgttaggttgtttggttagttttttttttttgttttttttgtagtttttcgttttttaggagtttttttgttttagcgagggtagtcgtgagaatttgttgtattaggttatgtagaatttcggtatcgtttttgagcgcgttgttggggaggagggtgttttggagttagtttttgttgtcgggtttagtttttagtttttggtagtggtagtttcgtagttgtcggtattggaagtgtagtcgttggagatagtaggtgttagtattatttgcgggttttttttagggttggattttaggggttgtttttacgttggttttcgtttttttgaagtggttttttgtagtgattttgtttattgatttgtttattgttttttttggggttataagggagtttgttagggtggggtttatggttgtgtttttggtattgttagggtatagtttgtttcgggtgttggagatttttttgtggttttttagtaggtggttagcgaggttttagcggtgtttaggatttatttatgtttttagtgtagtgagattttttcgatagtagttattttggaggtttataagaggggttatatcggtaggtgatgggtgggtgtgtggtttatggtagtggatgggttataggtggtcggggtgtttttgggtgtttagggtgggtttatagatagtagggagttaggggatttgtgggtaggtggtaggcggtttggcgggttcgcgggtgatgggtttggtttgatgttgtgtgtggttgtagggtcgaggtcgttcgtttgcgcgtagtgtggtaaggttttttttaaggtttatttgtttaagaagtattaggaggtgtacgtgcgtgagcgtcgttttcgttgtggcgattgcgggaagttttataagattattgtttatgtgcgtggttatcggcgcgtttatttagacgagcggttttatttttgttttaagtgtggtaagcgttataagattaaggtgggtttttggtcgtaggattttggcgtttgatttttttattttgttttttggtcgtggtttaggtgtatttttttttttgtttttattatgtttagttttgatttagttttttttttgggttataggcgggaggggagagttgtagtttgttgtggttaaggttaggttggtattgataggtgtttttatagaacgtatagtaggtgtattttaggatatatttggaggagaagtcgtacgtgtgttagttttgtagtcgtggttttcgagagaagggtttattggtgcggtacgtgcgatattatataggcgagaagtcgtttaagtgttataagtgcggtcgtggtttcgtcgagtacggtacgttgaatcggtatttgcgtattaaaggtttgggtcggtggaggtgggagggggaggggagggggtcggggtttgtttagttttgatcgagtttttatttatagggggttgtttgttggaggtggaggagttgttggtgtttgaggatagtttcgcggtagttattatcgtttttacggaagattcgtatatagtgttggtggagttttcgttcgtggtagttgatatttaggagtatattatcgaggtgggtgtggggttttggggtcgtgttgggatttaggggtagttaaggttgatttttgtttttttgtttatttgtttaggttattgcggacgatgcggagattagtgaggttacggagattatcgagggtatttagatagaggtgaggggtagggtaggcgggggcggggaggttttttggtatagtcgtttttgttgagtcgtggttttgtaggtggatagttatattatgaaggtggtgtagtagatcgtgtattaggttagcgtcggttattagattatcgtgtagaacgttattatggacgaggagacggcgttgggtttagaggcggttgtcgtcgatattattattatcgttattttcgagagtttgatagagtaggtggttatgacgttggtttcggttattagcgagggtattgtgtttgtcgttcgggtagggataagtggtattgaataggttattgtgattatggtgttattagaggatatcgagattttggagtatgtaggcgagttggttatcgtttcgtcggagggttagttggaggtgtagacggttatcgtttagtatgaggtttgcggggttttggtcgggtagggatagggtagaggattttgagcgttttatttatgtttgtttggtttggtagagaagatggtataggatggaggcgttttaagacggatagtgtatataagagttttttgttgttttataataaaatatgagaatttgtagtttgtgatgttgtggtagtggtagttttcgcggttggtgttattatttttgtttaggttttcgtagtagtatttgttttttaggttatttttagatttacgtgtttggtcgttttatttaggggtttttgttagttttggcggcgttttggtgttgtgtgggtgttattggtatgttgattaatagttttttgttttgtttagttggagttgtgtttttagttgcgttgtttgaggtttgtgggtgggtgggaggattagggacggggatagggagatttgggagtttcggtttttatcgtagggtgagtaggtggagtagtagtaggagatgttgggtagggagtgtggttggttttatttgcgttgttttgttttttttgaagggattttgtttagggaggtagagtttaggcgatttaatttttaggggcgaggataagaatatagtcgtatcgggatgtggttgatcgtttattttttttttagggggttggtaggggtttttgggacggttttgggataggtttggggtattagaatcggtttaggtaggttttttattttttattttgggggtttttatgggaatgaaagttaggagtttattaggtatttagttgagtcgagggggcgggatttagtgtagttcggtttttttttggtttaggattttaaatatcggtttttgttttggtgttagagttattgttagagggagttagtgtagttttgtgtcggatacgttcgtagtttggattcgggatttttatttttttaggatttttgagtttcgggtttttgtatttatatttaaggtgagtttttcggttgttttgagttggggttggatgggtcggattttttatttcggttgtagtttttcgcgtagtgagaaggtagcggtttttgagagtttagtagtgttttgggagtttgtagaacgtaggggcggatttcgcgtcgtattggtcgttaaggggcggtcgcggagggaaggggtgggtcggtgggtttgatagcgggtttgcgtaggcggtagcgtttgttttttttagtttttcgtttcgcgttatgggcgggtttcgggttttgttggtcgtattttgggcgttggaagtcgtcgggatcgtcgcgtttcgtatcggagtttttaatatttagagtttcggtgatagtaaagtgtcggatttcgtttgcggtagtattatcgcgaaggtggggttcgggtcggggcggggcggcgtttaggggtgttgatcgcgttgattttcgtattcgtcgtttttttttaga

SEQ ID NO: 580 - DNA, 5314 bp, Artificial Sequence
  chemically treated genomic DNA (Homo sapiens)
tttggggaggagcggcgggtgcgggggttagcgcggttagtatttttaaacgtcgtttcgtttcggttcgggttttattttcgcgatgatgttgtcgtaagcggggttcgatattttgttgttatcgaagttttgaatgttgaaggtttcgatgcgaagcgcggcggtttcggcggtttttagcgtttagagtgcggttagtagagttcggggttcgtttatggcgcggagcgagaggttgggagggatagacgttgtcgtttacgtagattcgttgttagatttatcgatttatttttttttttcgcggtcgttttttgacggttagtgcgacgcggaattcgtttttgcgttttgtaggtttttagggtattgttgggtttttagggatcgttgtttttttattgcgcgggaagttgtagtcggaatggagggttcggtttatttagttttagtttagggtagtcgagagatttattttggatgtgggtgtagaggttcgaggtttagagattttagggggatggggatttcgggtttaggttgcgggcgtgttcgatataggattgtattgattttttttggtagtagttttggtattaaggtaggggtcggtatttgaggttttgggttagggaggggtcgggttgtattgggtttcgttttttcgatttagttgggtgtttgatgaatttttggtttttatttttatggagatttttagggtaaggggtgggagatttgtttgagtcggttttggtgttttagatttgttttaaaatcgttttagaagtttttgttagttttttaggagggaggtagacggttagttatatttcggtgcggttgtgtttttgttttcgtttttagaaattaggtcgtttagattttgtttttttgagtagaatttttttagggaaagtaaggtagcgtaggtaggattagttatattttttatttagtattttttgttgttgttttatttgtttattttgcggtggaggtcgaggtttttagatttttttgttttcgtttttggtttttttatttatttataggttttaggtagcgtagttgggggtatagttttagttgggtagggtaggaggttgttggttaatatgttaatgatatttatatagtattaaggcgtcgttagggttggtagaagtttttgggtggggcggttaggtacgtgagtttaggagtggtttgggaggtaggtgttgttgcgggggtttgggtaaaggtggtggtattagtcgcggaggttgttattgttataatattataagttgtaggtttttatgttttattgtaaagtaataagaaatttttatgtatattgttcgttttggggcgtttttattttgtgttattttttttattaggttaggtaggtatgggtggggcgtttagagttttttgttttgtttttgttcggttaggatttcgtagattttatgttagacgatgatcgtttgtatttttagttggtttttcggcgaggcgatgattagttcgtttgtatgttttaggatttcgatgttttttgatgatattatggttatagtggtttgtttagtgttatttgtttttgttcgggcggtaagtatagtgttttcgttgatggtcgaggttagcgttatggttatttgttttgttaggttttcgggggtggcgatggtgatggtgtcggcggtagtcgtttttgggtttagcgtcgttttttcgtttatggtgacgttttgtacgatgatttggtggtcggcgttagtttggtgtacgatttgttgtattatttttatgatgtggttgtttatttgtagggttacggtttagtaagagcggttgtgttagggagttttttcgttttcgtttgttttattttttatttttgtttgggtgttttcgatgattttcgtggttttattggttttcgtatcgttcgtagtggtttgggtagatgggtagaaggatagaggttagttttggttgtttttgggttttagtacggttttagggttttatatttatttcgatgatatatttttgggtgttagttattacggacgagaattttattaatattgtgtgcgggtttttcgtgaggacggtggtggttgtcgcggggttgtttttagatattagtaatttttttatttttagtaggtagttttttgtgggtggggattcggttagggttaggtaagtttcggttttttttttttttttttttatttttatcggtttagatttttggtgcgtaggtgtcggtttagcgtgtcgtgttcggcgaagttacggtcgtatttgtagtatttgaacggtttttcgtttgtgtggtgtcgtacgtgtcgtattagtgagtttttttttcggaagttacggttgtagaattggtatacgtgcggttttttttttaggtgtgttttgaagtgtatttgttgtgcgttttgtggagatatttgttagtgttagtttggttttggttataatagattatagtttttttttttcgtttgtggtttaagggaggggttgggttaagattgagtatggtggaggtagggaagggggtgtatttgggttacggttagggagtaggatggggggattaggcgttagggttttgcggttagagatttattttagttttgtagcgtttgttatatttgggataagggtagggtcgttcgtttgagtggacgcgtcggtggttacgtatatgggtaatggttttgtagagtttttcgtagtcgttatagcggaagcggcgtttacgtacgtgtattttttggtgttttttgagtaggtaggttttggggaaggttttgttatattgcgcgtaggcgaacggtttcggttttgtagttatatatagtattaggttaagtttattattcgcgggttcgttaggtcgtttgttatttgtttatagattttttggttttttgttgtttatggatttattttggatatttagaagtatttcggttatttatagtttatttattgttatgggttatatatttatttattatttatcggtgtggttttttttgtgggtttttagggtggttgttgtcgggaaggttttattgtattgaggatatgggtgggttttgggtatcgttgaggtttcgttggttatttgttggggaattataggaaggtttttagtattcggggtaggttgtgttttggtagtattaagaatataattatgggttttattttggtaggtttttttgtggttttagggaaggtagtaaatagattaatggataaagttattgtagaaagttattttagggaggcgaaggttagcgtggggatagtttttgggatttagttttgggaggagttcgtaggtggtgttggtatttattgtttttagcggttgtatttttagtatcggtagttgcggggttgttattgttaggggttggggattggattcggtagtaggagttggttttagggtatttttttttttagtagcgcgtttaaggacgatgtcggagttttgtatggtttggtgtagtaggtttttacggttgttttcgttggagtaggggagtttttgggagacggggggttgtaggggaggtagagagaggaggttggttaggtagtttggtatttagtatttattttatggggtagacgtacgttaggagttttgtgtaaatttttagatttttatggcgtttttattggttttgttttttttgtgggaagtttagttttcgtttgtttggtttagatttttggagttagtgtttagaataaagattggtatcgagtaggtagaagatagagtagtttttcggggtttttcgtcgtttttatttttggggttagggtttttatgtttagggatagtttttgtatttggacgtggatttcgtggatgacggtgtttttggtatttgttattaggtgaattacgggtgaagtttttataggttcgtttgttatcgatgatgtggttgtttttaagtcggtagttttagttttagaatttttaaggtggagtgagggagtgaagattttttatatattttagtggcggttgcgtttatagttagtttttaggattaggtagttgttcgtattatgttgatttgtacgtgcgttttttttgttgataattacgtttttgtttatattgaagcggattttttttgtgtagggggtgagagatttgaggtgtcgggttagtgtattcgattttcggaagttttttttatatttggagtatttgtaggggcgtttatttgtagagagaatttagttagtttcgggtagttttagtaggttggcgataaggtgataaggcgaaggtaggtaggggttttcgttttattttttaaagttggggaatgcgaggttggggtattttagggttaattatcggggtgttatcgggttttagttcgaggtgcggttagtttattcgtgtgtcgtcggtggtgtcggatgagtgagtttttggtgcggaaggaggttttatagagtttgtattcgtggtttttgcggttgttgtgagtgattatgtgggttttgaggatgttgttttgtgggggagggcgtggtagtttagggtttttttgggggaataggagggggtttgttatttatatattggtttttcgtacgtcggtttatcgttttgaaggttttgtggtatagcgtatatatatagcggttatttttgtttattagtagttttatttgggtttgtttatttttttttgcgagttttagtttttgttggcgggggttgttcggggtttcggttattttatcgttttttagtttcgttttagtagttacgatgatttttttgatgtgtttattatttaggagaagtatttgggtttaagttttaggatttgtttttgtttagagattttagagattgttggttttaggggaggggatttgttgttttgagttatattttggatttaatttgtattgagtttttaatatataggttcgagtaatagttaaggttttatttatttttttaggttagagtgagaggtggagagatatttttcgattttgttaggttgtttagagatgttttagggtttttaaatgtgtttatagggagatttattatggagtatagatgttttatttttaaagttaggaggacgtgcgaattttggtgataaggtttttgggtgaagagatagtcgtttgttttgttcgttgttattgtttttgttattgtttttattaatatagggaggatgtgcgttcggggttatttttttatcggaggagatgggttggg

SEQ ID NO: 581 - DNA, 5317 bp, Artificial Sequence
  chemically treated genomic DNA (Homo sapiens)
aaggttggtattttttttttcgttttttgttagttttttatttttagtagttttgttatttttttttttattttcgagtgtggttttagatagtggaagttttattttttgtttttagttagatttgatcggtttttgtttttggagttggggggggagcggggagaggggcggttagaggggtagtgttggggaagtgggatagatagataggtaaataagatttttttttaaagtttttgcgttagagtgtttagttcgcgatgtttttgggtagggtattttagtgtttatcgaatttcgagttgtttgttttttttcgtagtggtggcgtttcgaagaggcgtaggatatgggttcgggtttttttgattttacggagtcgtttttttacgtgaagtttgaggattagttcggggaggaagaggacgatgagaggggcgcggacgttatttgggatttggattttttttttattaatttttcgggttcggagttcggtggcgcgttttagatttgcgttttggcgtttagcgaggttttcggggcgtaatattcgtcgtcgttcgagattttgggcgtatatgttggcggttcggggttggtggttgggtttttgggttcggaggattattcgggttgggtgcgttttgttttgcgagttcgggttttcgacgttttcgtgggtttagttttggttttagtttcggttttcgagtttaaggcgttggcgttgtaatcggtgtattcggggttcggcgtcggtttttcgggtggttatttttcgcggatcgggtttttagtgtttgcggcgtcgggcgttttttacgggttattgttcgggtatttcgcgatgtattcggcgttttagtattaagggtatttttagttttttcgcgggttttagggattcgcgttcggtttcgttacgttttttttttttttgagttgtttgggattcgggacggtgggtattggattcggggggattgtagaggatttaggtgtgatagtcgagatcgcgttatttaagcgaggtcgacgttcgtgggcgcgtaagaggtaggtagcgtatacgtgcgcgtattcgggttgcggtaagagttatattaagagtttttatttgaaggcgtatttgcgtacgtatataggtgagggggcggggtttcggatatgagaaagggcgcggcgttcgttgtagttataggggaagaagggttgtagagggcgggatttggatttggttggtttttgagagtgagtgtttttttaaattttgtgttttaggggttttattttgtttattttagttttagtttaggttgagtaaaggggtgtggttagatgtaggggattcggggatatgattgggtagatagtggcgtttatggtttttttgttttttaggggagaagttatacgtttgtacgtgggaaggttgcggttggagattcgcgcgttcggacgagttgattcgttattatcggaaatatacggggtagcgtttttttcgttgttagttttgtttacgtgttttttcgcgttttgattatttggttttgtatatgaagcgttatttttgagttttgttttggtatttggatttttttagtgattggggatgggataagaagtttgtttggtggtttttttatacggacgcgcgtgatataatgttgggtggtttttttacgaatggatttttttttggattcgcgtttttaaagatttatttaaatattaaatacggatttatagatagttttgggggagttttttacggaaaattcgataagtttttagttatagggagttatatagagatgtttaaattgtcgtgtaaatttagtgagatagatcgttaaataaacggatttagtggatatttagattagtttttagatggttttggatagtaggagagggtgtgggatgaggttttttagagattttgggtttagaaagcggtttttgaaggttttttattgtggttgatattaattgttaatggttatgggttttataaaaatgttttttttagataaagttttagcgttggtttgaatttttgggttttggaggttggaagatggtaggaggttgtaaatttagtaggttatattagagggttttatatatttttattttttaaattatagtgatattttttaattttaataagtttttttgggtattggaggttttgttgttttttttttttttatttagtttaggttatattgtttttgttttttgttttgaattttgcggatattgatagtaaatatttttttggatttaagagtttatagtttatgattgtttagggggtttattttgtttattgtttagatagagttaatttatcgagatagagggattgtaatagagagagtttaatttatatatatttagttaaatgggagatgggagttttattatttgaattagtttttttgaaaatttagaggttagggttatttaagaatagtttggtgggtaggagggttagggaatgggtgttttgttgtaattttggagttgtggaaaatagttgttgagttagtttttgggtggggattatagagtcgttagtttgggtggagttatttagttgttagatatgtaaaaagtttaaaaagatatttaaaaaggttagcgttaggttttgtaatagttatgttatttgtagaaataattggggaagttgtaaattttgtgatttttagaataatggttggttatttttgtttttgtttttgagatggagttttgtttttgtttaggttggagtgtagttgttttattttggtttattgtaatttttgttttttgggtttaagtgatttttttgtgttagtttattaggtagttaggattataggtatatgttattatgtcgggttaatttttgtatttttagaagagatggggtttcgaaatgttggttaggttggtttcgaaattttgattttaggtaatttgttagtttcggttttttaaagtgttgggattataggcgtgaggtatcgtattcggtcggaaaaatggttggttataatttaattattatatttatagtttagtagaatttaggttttttttatttttttaatttagtgtttttttattatttttataaaggtagtttagtttggggaagggttattattatttaagttataaattaaattttttttaaaattagtttggggttaggtatggtggttttttttttaattttagtaatttggtaggttgaggcgggtagattatttgagtttaggagttcgatattagtttgagttttaaggtgaaattttatttttattaaaaatggtgaaatttagtttttattaaaaatataaaaattagttgggtatgtggcgtatgtttgtaattttagttatttaggaagttgaggtaggaggattgtttgaatttaggaggcggatgttgtagtgagttgagattatattattggattttagtttgggcgatagagtgagataacgtgttaaaaaaaaaaaaaaagttagtttgattttattttaggaatgattaagtaagggtagtttggagattaaaggtaagatggagttggttaggttagagtttttttattgatataattttttgttataatttttgtaaaggtagttttaagttagtatttagatttttatagttttttgttttgttatgattttttgaggttgaggtgggagaattatttgaatttcggagttttagagtagtttgggtaatatagtgagatttttatttttgtaatgaataattatttgggtgtggtggtataggtttgtagtattagttatttgggaagattttttgagtttagtaggttgaggttgtagtgaattgtgatggagttattgtattttagtttgggtgagaaattattattttgttttaaaacgataaaaaataaatatatagttatttttttgttagtttaggggattttggagaaaacgtgtagaatgaaaaaggagagtttgggtggcgtggattatatgtttgtaattttagtattttgggaggtaagataggtggattttttgagtttaggagtttagtttgagttatatggtgaaatcgtgttttaaaaaaaaaattataaaaattagttgggtatagtggtatgtgttcgtgattttagttattcgggaggttgaggtgagaggattatttgagttggggaggtagaggttgtagtgagttaagattgcgttattgtatttcggtttgggtaatagagcgagatattgttcgggaaaaaaaaaaaaaaaaaaggaaggaaaaaaaaaaagaaagaaaaaggggaagatatattggaatataaatgttttttaaggggcgtaggggtttatttttgtaatttgggtattttcgggggtcgaggttggtggattacgaggttaggagttcgagattagtttagttaatatggaaaaatttcgtttttattaaaattataaaaattagtcgggcgtggtgtcgggcgtttgtaattttagttattcgggaggttgaggtaggataatcgttttaattaggaaggcggaggttgtagtgaatcgagatcgtgttattgtattttagtttgggcgataagagtgaaatttcgttttaaaaaaaaaaaaaaaaaaaaaaaaaaaaaaagaggaagaataaaggttttaagagttggatttaggttgtagggttggaataaaaaataaaatataaatttgtgtttgatttagaaattcgggcgggagttgggttagatagaagagcgtgggttgggattagttattacgaaaaggaacggtggttaggttttaggagacgttggagcgtcgggttcgtcgtgggcgtggtttgggtagatttagcgttgttttttgtttttttaaaacgtagtatcgcgtttcgggggaggagtttgtattttcgtgatgttttcgtttcggtttttaggtaagtttagggaagtgaaaggcgttaggtgttagttttggtttttgatgtaatttagcgtttcgtagtttcgatatagatttttggattttagttttatagtagttatgatttcgttgttgttggtagcgttgttgtgcgttttcgtcggggttttgatttgttacggggatttcgggtagtttgtagattggtgagtgcgtagcggggggtttattatcgtttcggggttcggttgcggttatttaatcgggatggttattttttcggggaattttggggtgttttttttttttttttttttatttttgtgtatttttcgatttttagg

SEQ ID NO: 582 - DNA, 5317 bp, Artificial Sequence
  chemically treated genomic DNA (Homo sapiens)
tttggaggtcggagaatgtatagaaataggagagagggaagagaaggtattttagggtttttcgaggaggtagttatttcggttgagtgatcgtagtcggatttcggggcgatggtaggtttttcgttgcgtatttattagtttataggttgttcggagttttcgtagtaggttagggtttcggcggggacgtatagtagcgttgttagtagtagcgggattatagttgttatggggttgagatttaggaatttgtgtcgggattgcggggcgttgggttatattagaggttaggattggtatttggcgttttttatttttttaaatttgtttgggaatcggggcggggatattacgagggtatagatttttttttcgagacgcgatgttgcgttttggagaggtaaaaggtaacgttgagtttgtttagattacgtttacgacgggttcggcgttttagcgttttttggagtttggttatcgttttttttcgtggtagttaattttagtttacgtttttttgtttgatttaattttcgttcgggtttttggattaggtataagtttgtattttattttttattttagttttataatttgggtttaatttttgggatttttgttttttttttttttttttttttttttttttttttttttttgagacggagttttatttttgtcgtttaggttggagtgtaatggtacgatttcggtttattgtaattttcgtttttttgattaaagcgattattttgttttagtttttcgagtagttgggattataggcgttcgatattacgttcggttaatttttgtagttttagtagagacggggtttttttatgttgattaggttggtttcgaatttttgatttcgtgatttattagtttcggttttcgaaagtgtttagattgtagaagtgagtttttgcgttttttaagaagtatttgtgttttagtgtatttttttttttttttttttttttttttttttttttttttttttttttttttttttcggataatatttcgttttgttgtttaggtcggagtgtagtggcgtaattttggtttattgtaatttttgtttttttagtttaagtgatttttttattttagtttttcgagtagttgggattacgggtatatgttattatgtttagttaatttttgtagttttttttttgaaatacggttttattatgtggtttaggttgaatttttgagtttaagggatttatttgttttgttttttaaagtgttgggattataggtatgtaatttacgttatttagattttttttttttattttgtacgttttttttaggattttttgagttagtaaagaggtgattgtatgtttgttttttgtcgttttgagataggataatggttttttatttaggttagaatgtagtgattttattatagtttattgtagttttaatttattgggtttaagagatttttttaggtagttggtattataggtttgtgttattatatttagataattgtttattgtagagatgagggttttattatgttgtttaggttgttttggaatttcggggtttaagtgatttttttattttagttttaaaggattatggtagggtaaagggttatgggaatttgagtattggtttgaaattgtttttgtaaaaattatgatagaaaattatgttagtgaaagagttttgatttaattaattttattttgtttttaatttttaaattgtttttgtttggttatttttggagtggggttaagttaattttttttttttttttgatacgttgttttattttgtcgtttaggttggagtttagtggtgtgattttagtttattgtaatattcgttttttaggtttaagtaatttttttgttttagttttttgagtagttgggattataggtatgcgttatatgtttagttaatttttgtatttttggtagagattgggttttattatttttggtagagatggggttttattttggggtttaggttggtgtcgaatttttgggtttaagtgatttgttcgttttagtttgttaaattgttgggattaaagagggagttattatgtttggttttaagttaattttgggaggaatttagtttatagtttaaatgataatagtttttttttaaattaaattgtttttgtagaaataatgaaagggtattaggttaggaggatgagaggagtttgaattttgttaaattgtaggtgtagtagttaaattatgattagttattttttcggtcgggtgcggtgttttacgtttgtaattttagtattttgagaggtcgaggttggtagattatttgaggttaggatttcgaaattagtttggttagtatttcgaaattttattttttttaaaaatataaaaattagttcggtatggtggtatgtgtttgtaattttagttatttggtaggttgatataggagaattatttgaatttaggaggtagaggttgtagtgagttaagatggaataattgtattttagtttgggtaagagtaagattttattttaaaaataaaaataaagatggttagttattattttggaggttataaggtttgtaatttttttagttatttttgtaaataatatgattattgtaaaatttaacgttggtttttttagatgtttttttaggttttttgtatatttgataattggatgattttatttagattagcgattttatggtttttatttagaagttgatttagtaattgttttttatagttttaggattgtagtaaggtatttattttttagtttttttgtttattaaattgtttttgaataattttagtttttgaatttttagggaggttgatttaagtaataaaatttttattttttatttagttggatgtatgtggattaaattttttttattgtaatttttttgtttcgataaattggttttatttggatagtgggtaagatgaattttttgggtagttataggttgtgaatttttaaatttagggagatgtttgttgttaatgttcgtagggtttaaggtagaagataaggatagtgtagtttgaattgggtgggaaaagagaggatagtaaggtttttagtgtttaagggggtttgttggagttgaggggtgttattgtagtttaggagatgagggtgtgtaaggttttttaatatgatttattaggtttatagttttttgttattttttagtttttaaaatttaaaaatttaggttaacgttgaagttttatttgggaggggtatttttataggatttataattattgatagttaatattagttataataagggatttttaggagtcgttttttagatttagggtttttgggaagttttattttatatttttttttgttgtttagggttatttgggagttggtttgagtgtttattgagttcgtttatttggcggtttgttttattgggtttgtacgatagtttggatatttttgtgtggttttttgtggttgaaggtttgtcggatttttcgtaagaggtttttttagggttgtttatgggttcgtgtttgatatttgggtggatttttgggaacgcgagtttaggagagggtttattcgtgggaaaattatttagtattgtgttacgcgcgttcgtgtgaagagattattaaataggttttttgttttatttttagttattaggagagtttaagtgttagggtagggtttaaaggtggcgttttatgtgtaaggttaggtggttagagcgcgaaaaagtacgtgggtagagttggtagcggaaggggcgttgtttcgtgtgttttcggtagtggcgggttagttcgttcgagcgcgcgaatttttagtcgtagtttttttacgtgtaggcgtatggttttttttttaggggataaggaagttataagcgttattgtttgtttagttatgttttcgggttttttgtatttggttatatttttttatttagtttgggttgggattaggatgaataaagtgaggtttttagggtataaaatttaaggaggtatttatttttagaggttagttaagtttaagtttcgttttttgtaatttttttttttttgtaattatagcgggcgtcgcgtttttttttatgttcggggtttcgtttttttatttgtgtgcgtgcgtagatgcgtttttaggtgggagtttttggtgtagtttttgtcgtaattcgggtgcgcgtacgtgtgcgttgtttgttttttgcgcgtttacgaacgtcggtttcgtttggatggcgcggtttcggttattatatttggattttttgtagttttttcgagtttagtgtttatcgtttcgggttttaaataatttaggaaggagggggacgtggcgggatcgggcgcgggtttttggagttcgcggaagagttggaagtgtttttggtattgaggcgtcgggtatatcgcggggtattcggatagtagttcgtagggggcgttcgacgtcgtaggtattgaaagttcggttcgcgggaagtagttattcgaggagtcggcgtcgggtttcgggtatatcggttgtagcgttagcgttttgggttcgggggtcggggttggagttagggttgggtttacgaaggcgtcgggagttcgggttcgtagggtagggcgtatttaattcgagtgatttttcgaatttaaaagtttagttattagtttcgggtcgttagtatatgcgtttagagtttcgggcggcggcggatattgcgtttcggaggtttcgttgggcgttagagcgtaggtttggggcgcgttatcgggtttcgggttcgagaagttggtgaggaggagatttaggttttaggtggcgttcgcgttttttttatcgtttttttttttttcgggttggtttttagattttacgtggaggggcggtttcgtggggttaggaggattcgggtttatgttttgcgttttttcggagcgttattattgcgggagggagtaggtagttcgaggttcggtggatattggggtgttttgtttagggatatcgcgggttggatattttgacgtagaggttttggaaaggggttttgtttgtttgtttgtttgttttatttttttaatattgtttttttaatcgttttttttttcgttttttttttagttttagggatagaaatcgattaggtttggttggagataggagataagatttttattatttggaattatattcggggatgggggaaggggtagtagagttgttggagatggaaaattggtaggggacgggggagaggatgttagtttt

SEQ ID NO: 583 - DNA, 18855 bp, Artificial Sequence
  chemically treated genomic DNA (Homo sapiens)
tttggtaaggtagttttaagttttagaagatatttgttgttaagaattaaatatagttgtttaggtaatagaggaagttggtgttcggtgaaaaattaaattaaaataaaattttgttcgtatatttgaggatggtataggttttagatttatattttgaaacgaatagaagatataagatatttgatataaaagaaaatgaaagtgtcggaaatagaagtttttttttttaaattgattttttttaacgtgtatagagaataataataggatttttaaggataaaaatagtgtttgttgatgggaagagggttatttttttattgaattatggaaaatttaaaattttttttattgttttttgttttatatatttgtatttaataaagatttttaagaatgattatgtggagattaaatattatttaaaatggaaaaaatttaaaaataatttcgaattaaggggagaagtggttgtttgggagtattagtatggaaattagtgagtagttgtgttttttgtttttttatagttattattatttgaataggtaggagtattggttatatttgttagtattatgggagtggtagtatgaaagggaggatagaatagtggtttagtttttatgtggattaggtaggtagttgttatgttattttatttattatttataatgtgaagaagttggtattatgattgttattttatatgttggaaattgcgaattttttatggggtaagggaatggtttaagtttatatatttggtaagtagtaggtggtttaggtttgtgtagtttttgaggtattaatatttttagttgtatttaaaagggtgttgtaggtgttttataaaataaataaagaaaaggtaagtatgttgagaatatagtgggcgaatatagtttattataaatttttaatgttttaatatatattgtatagagtttttttggtttttttatatttaatttattgtagaatttttgttttgtttggaatattttatgggattagtgtttttataaattattgtaggatatttttttggttttattagagttttaggtttgttttatttttttgttttgttttgtttttttttttgagatagggttttattttgttatttaggttggagagtagtggtatggatagggttttttgtagtttcgatttattgggtttaagtgatttttttgtgttagttttttttaagcgggttggtattatttttggaagagtttagggaaagtaaaagattattgggaaggattgtgataggattatttataaagtatatgggaatatagggaagggaagggggaataaggagaaatttgtattattataatagtaatggatagtttttggaatttgtatgttagtggtttttgaagtgttttagtttttatagttatttgtaagatagaaattattttaatttttattgtagagataagggaaataaagtaaagaaaggttaggttttgaatttaggtagtttggtttttaatatttgtattttatttgtttatattgaagagttttaaatggagtagaattttttattaagtagtataaataaataaatttttgttaagatattgagatttggagattattgattaatttagtagattaaggagagtgtttaatatttgatgtaaagagttttagaaaattatagtatagtaagaagaaattaatttttgttattggtagtaatgttaaagagtataagagaattttgtatagtgttttattatttttaaggtattttatgagtacgatttaatttagtttttgagaaggcgatgagatatttgtgtttttagattttattttatatttttttttattataggggattggtttaatagatattaattgttgaaaaagtaaaaagaggatattgaggtaatttagagaaagaaattgtaagaagtatattatattattgggttggagtaataaagggatggagttgggattgttgaaaattggaagtttggagtagggtttttatggagttggaatatagatttttaataaggaagtgttgtttgtcgtttttggtgttatagaattttatagggaaatttttgtagagttggggtttagatttttgaggagatgttatttaagtggtattgatatttttgaagggtatagtaagattgggtttggttgtgtagaaaagaaaaaaagaaaaagaaaaaagttaaagattagaattaattattgttgtttgagtagagaattattattgcgaagattttgatttttgtagtagtaagtaaataaaaaaggttatttttttttttttatttagatttttagtttttttttggtattattattggtagagtttgatataaagttagttggtaaatgagaaagagaatttgtttagttttagttttaattttatggaatttattagaaaaaaggtagatttgtagttgagagatgatagtttgataattagataggtattagtatatttgaaatttttgttggtaatgtttttaatattagtgatttaaagtaaattaaaatgtgatattgtttaatatgatattttgatgatttagtagttttataaaatatatatattcgattttagattgaattggaatgtttttaaaaataaaatataaattattacgaattgatatttattgaaagtgttatttttgtgttaagtattttgtttagtaggttatgtgggttattttagtttttattttatagatggggtaaagttgaggtttaaagaagttaagtaatttgttttgaagttttagagtaatagagatagaatttttatgggtagtttgacgaagtttgagttgttagttatattttagtattatttttttattttttttattgtttaggtggtgtatttttattattaggtggttatattttgggaacgaatataataattttagatttttgttagaattatttatttaattttttgttgtagtattatttggtagttaagattgtattttaatatgaagtatttagttttttagtaattaaatatataatagtgagggttaaaatagatttttattttttagttgatttttagtaaatagttatagtattcgggaattttagggttgtattataggtttttattagatgtttgaatttttttttgttatagtttaataaatagttatttagtatttgtttgaatattttttatgatttgtaatatataattgtataaagttgttttttgtatatttttagatagttgagttattaaataggttttatttgcggagaattggaatttattattttataatttttatttgaagatttttgattttgtttttttgagtaatatagagtgttttatttatgttttaaggtagttgttatatgattttttttttaatacggttgtgaggtgtttacgtgttttggagatagtaaaagttttaaataatatggtatagacggttagttatggtggtttatatttgtaattttagtattttgagaggtcgaggtgggtcgattatttgaggttaggagtttaagattagtttgattaatatggtgaaattttatttttattaaaaatataaaaattagttaggcgtggtggcgtgcgtttgtaattttagttatttaggaggttgaggtagtaggatcgtttgaatttaggaggtggaggttgtagtgagttgagattgtgttattgtattttagtttgggtaataagagcgaaattttatttttaaaaaaaaaaaaaaggataaagggtgagtagagtttagattggttattggagaagataatatagaggaaggttttttggtggttaagagtagttttttaaaattagatagatttgagtttaaattttagtttaattattttttagttgtgaaaatttagtagttttgtgattttgggtaaattgtttagttaaatgagaaaggtaggattatttgatagtggtattgtgaggattttgttagttaaggttggtaggtgtttgttttggtcgtgtagtagttgtttaggaaatgagatttatagagtgtattggtgaaagataaatttaattttgtatataaagttatgaaaatgtttttttatggtagtggttattatttaaaagttatattattttattgaagaagatttattttagggtttataatagattattttttggataattttaatttatttaaaaaattaatatatgtatatagtatttggaatttaaagaattgaatttaagatatggtttggttttttattttgtgattttgaataattgagttttggtttttttgtttataaaatgtatttatgtaagtgaataggtggtaatatttattatgaaatattatggagtagttagaagtaatagagtaattagaatacggatttggaaaatatagttttaagtgaaataaaaaggtgattggtaaaatgagaaatgtaataatgttatttatgtaaagttaaaataattataagtagaatataatatttatgtaaataatagatatttagtatagtgtaatgattgtttataaaaggaggagaatgtaagtgagttgggaggtttaaaggggattaataaataaagattatagaagggttttagtatatttagaaataaataatatgtaaataatgatgtttttttattttttttacgaggttattttgaggagttaatgagattgtgcgtatgaaaataaaagttaattgattgtttttattatgatttttatattggataaatgaattgaatagagataaaaattttttattatattttggtaggaagttgttgttagggtagtatttgtgaagttttggtttggttttagagtttgttggtgagatgatattaaaatttttcgtgtaggagggtggtagttttttttttttttggagatattattagatgggttagttagaggtagtagtagtttttttttatggatttattacgagcgttttatttgagttttcggaagaagagatttcggtagacgggtgttttgatggttttttttttttaagatattaaattttaagatttggtcgtttttattttggagaagaaaatgggaattattcgtagagcgttttttatggagttggttcgtaggaaagggtttagggttgaaaatgagtttaggtaggatagtatcgattttgttttgtaaataagtagaggttttgtgaatagttttttgggaatttaaggaatttgtgtttttttttatatgtggaagaggtgatttttttattgggagaatagtagatttgaaattaaagaataattagttaaggaaaacgagataagtggggattgaatataattatattgaaattagttgatattaaaagatgagataaattttttgttttttgttttttatttttatgagatgtgttatttagggatgataagtagaatattaattggaaaatttaatgttgaattatttaattttatttttgattaatttgaataaagtattattgggtttaataaaaaagttttggttattttgatgtagaaagatgatttggttgtttggtttttatttatatatttgggcgtgttaaggtagttagtatttgtggtgggcgaggatgattagttagtttattataggtatttagatgtggttttgattatatttttttaaagagtggttttagtggggtttttagaaagagagatgttaggtaaagatgtatttattgttaagatagttttgtttagggatgatagatattatattgagtgagatgtaattagagtttaggtaaggaggcgatagaagtatttggattatttagattggtttatttattaatttatttattttgaatagtaattatttttgttgtttttttaatttttgtgtaagttttttattgattttaaatagatgaagagaaaataagtaaaatttagaaataaatggtattagaattttgatataagtgatggttttggattaaattgttaaggggtttgtaatgaaggagtaatgatttatgtagttgatcgttttgattgtgtaagaaataaattgattataaatttttaggtaaaattataaaaattttatgtgaaaggatattttgattgtataaatagtttttgatatttgaaaataaaattgataagtatgttatgtagaagaaatgttagtttttaagtgttgaggagatatattttaaaagttaatttttagatatgttaatgttcgtaatattttgatttatatgatattgattttttatttattttttgttaaaatgttttatttagaaatttttgaattttttatggttttttttttatttgatttttttttgtaaggttttttttttttttttgttgtttttttgtaattttttatagttattttgaattttattttttaatattttttttaagaaaattttagattttatttaattgttaagtttgtttgatattatagatttatatagaaggttagagttggagaagataggaagattatataggtaaagaagttaaaaaaatagatttttttttttttttttttgagatagagttttgttttgttgttcgggttggagtgtagtggtataatttcggtttattgtaattttcgttttttaggtgtaagtgatttttttgttttagttttttaagtagttgggattacggatacgcgttattataattagttaatttttgtgtttttagtagagacggggttttattatgttgattaggatggtttttattttttgattttgtaattcgtttgttttggttttttaaagtgttgggattataggtatgagttattacgtttggttaaaaatagattttttggaaaagaaattaaaagttttagtaaatatggaattgttttttatggtaaagaaatttgataagggttaggtaggaaggaaagaattagaagtattatttattggaaagttttttattgaaacgtttaagtttttagtaaggattcgttgatttattatagatatagtaatgaatatatataaggcggttgaggtaggtatttagggagatgatgggaggtaagttttttttgttggtaggatagttgaagaggtagttatatgttttagatgtttgttgttagggattaagtttagttgtttaggcggcggaggaagtttattggtgtatggtgagtaaattgtcgttgtgtatgtgatgatggtaaagtttttaggttggtagtttagaagatatattaaatataaatgtgttttatggcgtaaaaataaattataggaagtagaagttttaggttttaaacggaatttttgtgtatagatatatagattttaattggatagagaaataaaaattattgtaggggataaatttttagatacgaaatttagaaattttaaattttggttttgagtttttttagttatggggtatgggataaggttttttttttttcgattgattttaatattttgataaatggtttatttgatgtgattattaaatgagataatgtatgttaatgtgttttgataaattaaaatagttagataaatgtaaagtgtaattatttttttgtgaattgttggatttattgatttttatagtaaaattttaaggaatgggttttttttttataatatgaataaggttaaatgatattaataaatagaataaagataggaaagaaattcgttaatatgttataattggttttttgggagtgggggttggtagggagagattatggttgtttttattttttgggttttttagtttttttttttttttttttttttttttttttgagacggagtttcgttttgttttaggttggagtgtagtggtacgatttcggtttattgtaatttttattttttaggtttaagcgatatttttgtttaagttttttgaatagttgggattataggtacgcgttagtacgtttagataattttttttatttttaatagagttggggttttacgatgttggttaggatggtttcgattttttgatttcgtgattcgttcgttttggttttttaaaatgttgggattataagcgtgagtatcgtgtttggtttttaatatattttttataataagtatatatatatgtatgtgtgtgtgtgtgtgtatatatatatatatatatatatatataagtatatatatgtgtgtgtgtgtgtatatatatatatatatatattttttttttttgaggtagggttttgttttgttacgtaggttggagtgtagtggtgttatttcggtttattgtaattttcgttttttagatttaacggatttttttattttagttttttaagtagttgggattatagatgcgggttatgttcggttaatttttgtagagatggggtttcgttatgttgtttaggttggttttggatttttagtttttgtttttattttttaaaggattataggtgtgagttatcgtgtttaggttataataagtatgtattttaaaaataaaaataataaagaaagttgtttttttagttgataggtaatagtttttattgtttttaatatattttttggttgttagaaggattaaattagagaagaaatttgatttttgttttatttgggtttgaatatataaattagaaatggtgtattttaaagtgttgtattgtttggagttattttattttgtaatatgtatgtaatataattgggtggagttttgttaatatttatgttatattgtaaaatacgtgttatttaatgtgttataggaagttggttttaaaacgtagataagggaaagtattaaaatttttgaggtatttttgtatatttatgaaaagaatattgaattttattttatggttaattttttaaattttagagtaatttgttattcgggttaagttggagaaggattagaatttattgtttgttatttttttattttattttgagttttaatacgtggagttattttaaaattttattttgttattaatttttttttataaatatattagtgttattcgagtttatgtgaagagattattaaataggtattgtgtgagtaataaggttgtttattttatttgggtgtaagcgagttgagtttgaaaagagagttagtaaagggtggtgggattattattagtttttataggttttgggataggcggtggagttaggagtaatgttttgtgggtagggggcggattttaataaagtatatttttaaaggtggggagaattataaagaatttttttaagggtgggggagattataaaatatattcgttagggtgaggtagaaataaattataatggtggaatgttattagttaaggttatttttattttttttgtgtatttttagttgttttaggttatttggatgtatacgtgtaggttataggggatatgatggtttggtttgggtttagaggtttgataattagttaagtttattttttgtgttttgatttaaattattgatgttgaggaagaaaatgtacgattaggaaggttggttttttatttttgtatttatttagtcgtttaatatttgttaagttttattgtttaagtagtttgatatttattagaggatattgttattttttttagatttttatagtttatttataaggatgttattggaaggtattgtttttagtgaaagtaagatgtagtattatgttattattaataaagggttttgttagtatttattttgtgtagtatttgttaggttgtggagatataaaatagtggaagatatgagttttgtaaataaggagtttatagttagataggaaagttaggaattgtatttttgttattatttggaattaaaaaagtagtatagtatatattttaagtttgaataagttttttttaaaaaaaaaaaaaagttagtatttgtttgtttattttttatttttagttttttagtattattttggtttagttttatttaaattggttgtttgttttttttatttagttattatataatgtttgatatgtggattttgttttatttattattttaaaattatcgtttttaaaagtttttggtaattttatggtagtaaaatgtattatttttttttatttgaatgttggtaaagattttttttttgattaaattgtagtatggtttttagtagttaaggttatgtttttaggatggttttttttaaaatgtttgtttgagaaagtttattattgttaggagaatgttttgtttattttagttaaaggtaggtaatagggagttggttcgtgaatttttttttaaagtagttattttagaaagttgtaatgataaattttttttttgtttttttgagatgtaaattttttaattatttagaattgttttttaaggatttgaaaaaagtaattttttaaagaggtaatttcgatttttagattttgtgggagggagggtttaattttagaggatttttttttaatttatattataaaagtttgttttttttttaggaaagttttaattaataaatttagatggtttagttatagggattaatttttttattattttttaggggtatattttttttttagtagtatattttagttttttaaaagttttatgttttttgtttttataaatattggggttttttttttattgttattattatgattgaatataattattttttttattttaattagtgtttagttttgttaatttttggtaatgttttattttatattttaaatttatggtgtttgaaattaaaatatttaaagttattgtttgtaaaataaatagaatattagtcgaaggaggttagttttttgttttagaaaataaaagttgaattggttattttttaggttaggtttagaatttaaatatagattttttggttttttttatagttttttttgttttttttttattattttgagtgttttttttttttatttttttgttttttagattttagatttttgaaagtttttagagagaagtttttttttttagaatgttggtgggagttattgtttagggtgggtttttagtttttttttttgatgagtaaaggtttttaattttatttaattatttttttttgattttataagttacgtgtagattttagttatagatttagataatttttttttatataggaggttttaagaaatatttgtttagagaatgatttatttggtgaatataaaattagtttaaggaatttgtgtttattaagagtaatttttgtaatgaattttttttttgtaatgtatgagtattaattttgtaattagtaatataataaatattttatttttataaatttaagagtatgagtatgagatataagttttttttttgttttgatttaaattattttgtattttaaaatttgcggttttaaattaataaaaaattttttaattttatttaaggtgggttaaaaaaaatcgaggtaagatcgttttagttataagtatagtagggttggagatagaaatttgtttttagtggtgttaggtgttagtaagagtttgtaataaaattaaataaaattgtatgatttttttgttttaaggatattgaaatagattagttgttaagtgaaattggtagaagggtttttaaattgtaaataggttagtttaattgtaaatgattatttaagttattgtttataaaataagttttatattagatgggaagaattaggaatgatttttttttgggaagaagatagtaggtgattatttatgaggatttagaaagttagatagagggtgggaaggagtttatatttaggtaaataaaaatagttgttattttttttttggagggtttttttaattatattttatgagaggtaggattaattaggaaaagaaagataggaagaatagggaaattattgtttgagggaaaaaatgtagaattgaagtttgtgagttaattttataatttagggttttttagatatttgagtgttatagttacgatttttgtaatattttttattatattttttattataatatatacgtaatttgtttattttgtttgtttatttgtttggggggagatagggttttgttttattatttaggttggagtgtagtggtacgattttagtttattataatttttattttttgggtttaagcgattttcgtgttttagtttttcgagtggttgggattataggtacgtgttattatatttagttaatttttgtatttttagtagagacggggttttattatgttagttaggttgattttgaatttttgattttaagtgattcgtttatttgggttttttagagtgttgggattataggtataagttattatatttggttagtgtgttttttttaattgtttttaaattgatttatttaaaataaaattagttttgttttaaggaataatatttataaaatttatgatttgagatgtataatttaaaatatagatataaataaatatataagttttttaaatgtttaattgtgtattttttaaaattatgttacgtatttgtagagaaacgagtattatgttggaaaatatagttgttattgaggttaaaggttcgagtgggagttaaatttaggttggggtagtttaatagaaaagatttttttttatagtggtgttttttaaagtggagtttttgggttgtggggtggttttaaaatataggtttttttgtggagagggaggggtaattttttcgttttttgtatttgagagtgttggtgattgatttaattagtaaggtatagtggaaatgagattgtgtgattttttttgggatataatttttgggattttagagttttatgtaagatattggcgtttttttttagattatataaagttgtttgggtttttagtttttagttgtattgagtttagttttttagttatttttattaaggtggtagaatgtagaattacggggaatattagtattttagtagaagaatatagggtagagagattatttagttaagtttgtttgaagtgttgatttacgaaattgtgagatataataaaatagttgtttttttaagttattatattttgggattattggttatgtaatagtagataacgaaaatagattgattatattagaattattaatggagtttgttaaaatgtatatttttgggttttaggtgtaattttttaggaattttgaagttttataatgggatttagtaatttgaattttaatttagttttttggatgtttttggtagatattagagtttgagagatatttttttagagttatttatttatttatttatttatttagtttatcgttatttttttattattattataaatttggttatgtgttgggttttaggtataatttagagattatgttattgtttttgtttttagggatattaaggattaagttgggtatttgatagttaagtattagttgaaggaggagattttgaatttttttttttgtaggagattgaggtattaatgttagtttttttagaattgttataatttgtttaagattttttaaatttagtttaaagtattaataatcggttatggttaagaaattaggagaagattgaatttattgatattttggaaatagttattttagtagaattttgggatttttgaggttgaggttggttgtcggagggtttttgttattttttattataagaaggaagttaaggtttttgtgggtaaggtagaaataattttagttttaattatagatttatttgtttttgaaaatgatatttatgtatatttttttttaagtagaaaagtgattatagatagtttattatagaaaatgagaaaataaagaaaaatattttaaatatataaataaagttttttttaggtatttaattatagtttagtagaacgttaagaggttgtttgagttaggtatatttgggtttgaatttcggttttatgtaagtttttttaggtttggtttttttttttgtgattatattgtttattgtgttaggttgttgtgaggattaagtaagaatatgtgtatatgtgtgtatgttattattattatttttgttaatagttataagtatttttttttagtttgattttttttatatgttagtatttattgttggttatttaatagtgttttgagttttattttatttgtattttttagtattttaatgtttttattagaggtagggttgtgtttagaggaattttaggtggagagatggtggcgatggagtagtagggtaggagtggatggtgataggttagaatttggacgatgagtttagggtttttttttgatacgtttattttttttagaggtttagggaaaatttagagtttagagagtttgatagtttttttgtggttgtttcgttttgatgtgtggttatggtaattgtttttttaagttttttggggtagttttatatgttttgtagtttagtttagtttatataatattgtatataaaatagtaaaatataaattttatgtggtagtagtaaggtaatacgtttattgttgttatataggaggtgttattttatttgtatttttgtttttgggaggaaatcgatttttttattattatgatatttatttagatgttattttttttgtaataagaggaagtgagtagttttttttttttttaaagaatataaagttatggatggttaagtatatagattttgatgagaatagttataggattaaatttttgttttatttattaattattcgttgggtgaaatttttaatatttttaaggttatttttttttttttttttttttttttttttttttttttgagatggagtttcgttttgtcgtttaggttggagtgtagtggtataattttaatttattgtaattttcgttttttaggtttaagtgatttttttgttttagtttttcgagtagttgggattataggcgcgttttattacgtttagttaattttttgtatttttagtagagatagggttttatcgtgttagttaggatggttttgattttttgattttatgatttgttttttttagttttttaaagtgttgggattataggtatgagttatcgcgtttagtttttttttttatttttagatggggatgattatatttattttatggtattattgataattaaatgaagtgatgtataaagtgtgtttattagagtgtttagtatatagtaatattttaatattgttaatatttttagtattggagtgtttagagtagagagaaaattattgtattagtaaatagataaatagttgttataagatagtgataagaaagtattagtagagtatattagaggttatgggtttttttagtaatattgttcggtaagggttcggagttgaaagtgaataatatatagagattgtgaattgtttgtgaggggttgatggtaatttcgatacgaggaagtatattatagtttagatttagttggttatatgtagaggattagtcgaatttaggtaatataagacgatgggaaatatagtttgggttataatagagatttttttaataaaattttttaaattatttgtggtaaaggattagtttttaaaaaatgtgttgaagattaatgtttttttttttttttttttaagttataataaaattattttggtgatgttaaattataattaaagtttttaaatgttgatttataatttttgaatttattttgttgggaattagtggtaattaatattgagttttgagtagtattggtttaagaggttttgtttgattttttggtttttgtgtgtgtttaagattattattgtttttttgttttgtttgttagttgtttattgaataggaagtgggagtttaaattagagtttttttttatatgacgtatagtttgttatttataaatttgtttgtattaattaagaaatgtatatggtttttatttaataatgtgagcgtagatatttttatattgttttagagaattttaggagaagaggtagtagggggagtggtaagagtgtaggtggttaggggttttagggtttttttttaatatattttttttttttttagggttaggtaaaattttatttattgtaataatattataataaataataatgtattataagtataataatataataataatttttttttttaaaaggtagaaatatagatggaaaatatagatggaataatattttttattaatttttgatttaaagaattttttaggaattttattataaataaattttgaaataatatggatttataatagggaagtggttatttatttttttttaatttttgtagaatgttgttttgttatgatttatttttgtttaggtatattttgttatttagatggttttagttttgattttagtttatatttttttttgagtattaattttagattttaattgttaattagatattttaatttggattttttgttgttttttaaatgcggtatgtttgaaataaattttagttttatcgttttatttttttttttaaagagacgtaattttttaaatttgatttttattaaaagtgttattattttattgtgattaatatgttggagtaatatttgattttttttttgaatttattttttataggtgagttgatgtagatgtttattatattttttttttgtttttttgtgttagattgggttaaaattattttatatttatataattattttatttttttaagtagtttcgtaattttttttattttattacgtttttttttaaattattgtatgtattagattcgttttttaaaataatattgtagtgttattaatgttttgtttataaaagtttttattggttttataattttagaaaataagattaaatttttttaataggtttttaagattttttagaatgtagttgtttttacgaatttagttatatttataattattttttaatataaattttttattttaatttaggttatttttttttttgtttttttggtttttgattttttttttttaggagaattttaagttttgttttttaggtgtgttatttaggattagatatagttttagttttgttattaattagttgttttttttagtttatattatgtttttttttttttttgaatatggtagatttttatgttttatgttttgttataatttatattataagttatttgttttatgtaatatattagtgtttagtaatttttttttttttttttggtatttaatttttttttattattattatcgttattattattataaggaatttagggttgtgtatataatagtaaatttaaaaatattttatgaattagattttattaaaaaaagaagatggagaaagaggaaattaaggaaataaaataggaggagaaagagaaaatattgttatgtttttttttcgatgtttgggtatgttgtgtgtttatgttattgtttagatttatagattatttgaattgaaaggattttaaaaattattgggtttaataatataatgttgaatgtgaagatttattaaaaattagaaataatatatttggtttagaaaaaataataaaagaaagatgagtattatttattagttgtgtgatttttagaatgttatttgatttttttgttttttagtttttttatttttgaagtgtgaatgatgtaatatttattgaggagttaaatgagatgatgtaggtaaagtatatggttaatgttttaaatatggtaagtgtttagtatttgttaagaaaaagatttttgtttatgtttcgaaaatatgtaaattaaaattttttgaaggttggttataaataattaatttattgttaataataaattgtgagattatttaatggggtgtttttatggtttgaatatttgtgttattttaaaatttataaattgaaatttaatttttaaagcgatgatattagaaggtggggtttttgggaggtgagtaggttatgagggttttatttagtgaatgagaaattaatgtttttaaaaaagaggttcgagagagttgttttttttttttgttatgtgaggatatatagtgggtgttatttatgaagaatgggtttttattggatattatatttgtcgattttttgattatggattttttagtttttagaattgtgagtaataagtttttgttgtttataaattatttagtttaaggtattttgttatagtagtttaaatggattaagatagttgtttaaattatgtaagtatagttatatttgtatttatttttatgtttattttggattataatataaaacgtatttttaattgtgggttattgttaaataagtttgaaggttattggattattaaagttttttattagtaaaaatggagtagtatgttaaaattttatgtggaatgttaggtgttattttaagagtagttttattttttattttttttggattttggttttttattaacgttttagttttgttaatgttgtttttattgttcgtgtatttgatatgtaattcggattattgttgttatattaattaatgtagagagaatttttttgtatggaggtttaaattttttatatttatggttaggtttagtatgtgtttttttttattagatggaatgtttagaaattttgaggaaagaggagagtttttgattttgaaagatgttttagttggtaattttgttttgtattttgtagt

SEQ ID NO: 584 - DNA, 18855 bp, Artificial Sequence
  chemically treated genomic DNA (Homo sapiens)
attgtaaaatgtaagatagagttattagttgaaatattttttaaaattagaagtttttttttttttttaaggtttttgagtattttatttgatggagaaagatatatgttagatttaattataggtgtggagaatttaggtttttatgtaagggaattttttttatattaattagtatggtaatagtggttcgggttatatgttagatgtacgaataataaagataatattagtaggattgaggcgttgatggaaaattaaggtttagaaaagatggaaggtaaaattgtttttaaagtagtatttagtattttatatgaggttttggtatgttgttttatttttattagtggaggattttaataatttaatggtttttaaatttgtttgatagtgatttatagttagaaatacgttttatattatgatttaaagtagatatagaaataggtatagatgtagttatgtttatatggtttaagtaattgttttaatttatttaggttgttataataaaatattttagattgagtaatttataaataatagaaatttattgtttatagttttggaggttggaaagtttatgattaaggggtcggtagatatggtgtttagtgaaggtttattttttatagatggtatttattgtgtgtttttatatagtagaaggggaaggtagttttttcgggttttttttttaaggatattaattttttatttattaggtggagtttttataatttatttattttttaaaggttttattttttaatattatcgttttggggattaggttttaatttatgaattttggggtgatataaatatttagattatagaaatattttattaaatgattttatagtttattattaataataaattaattatttataattagtttttaagaaattttgatttatatgttttcgaagtatggatagggattttttttttaataggtattaagtatttattatgtttaaggtattggttatgtgttttatttatattattttatttagttttttaataagtgttatattatttatattttaaaaatgaggaaattgaggaatagagaggttaagtgatattttaaaagttatatagttggtaaatgatatttattttttttttattgttttttttgggttagatatgttatttttagtttttaataagtttttatatttagtattatattattggatttagtgatttttaagatttttttagtttaaatagtttataaatttgagtaatagtatgagtatatagtatatttaagtatcgaagagaaaatatagtaatattttttttttttttttttattttgtttttttgattttttttttttttattttttttttttgatagaatttgatttatgaggtatttttaaatttgttattatatgtataattttagattttttgtgatagtggtggcggtgatggtagtaggaggaggttgggtattaaagaagaaaaaggaagttattagatattagtatgttatatgaaatagatggtttatgatgtgaattatgataagatatgaggtatgaagatttgttatgtttagagaaggaaaaaaatatggtgtaagttgggagaggtagttggttggtggtagagttgggattgtgtttagttttgaatgatatatttaaaaggtagaatttagggtttttttggaagaaaagggttaggggttagaaggatagggaggagaatggtttgggttggagtggagagtttatattgggaagtaattgtagatgtggttgaattcgtagggataattatattttagaaggttttagaagtttgttgaggaggtttgattttattttttggggttgtggagttagtgaaggtttttgtgagtagaatattgatagtattatagtgttattttaaaagacgagtttggtatatatagtgatttggaggggagcgtaatggggtagggagggttgcggaattatttaggaagatgaaatgattgtgtaagtgtgagatgattttaatttagtttggtatagaaaagtagaggagaaatatggtagatatttgtattagtttatttatgaaagatgaatttagggagggagttaaatattattttagtatattaattatagtaaagtaatggtatttttggtagaaattagatttaggaagttgcgtttttttgggggaaggggtggagcggtggaattgaagtttattttaggtatgtcgtatttgaaggatagtaggagatttaaattaaaatatttggttgatagttgggatttgaggttggtgtttagagagaggtgtgggttggggttagagttgagattatttggatggtaggatgtgtttaaatagaaataagttatggtaaagtaatattttataagaattaaaggaagatggataattatttttttattgtagatttatattattttaaaatttatttataataaaatttttgaaggattttttggattaaggattaataggaagtgttattttatttatattttttatttatatttttgttttttggagggaaaaattattattatattattatatttatgatatattattatttattataatattattataataaatagagttttatttaattttgagagggagaagggtatgttaaagaggaattttgggatttttaattatttatatttttattattttttttattgtttttttttttgggattttttgagatagtgtgagaatgtttgcgtttatattgttgggtgagaattatatgtattttttaattaatataaataaatttgtggatgataggttgtacgttatatgaaggaaggttttgatttaaatttttattttttgtttaataagtaattagtaaataaaataaaagagtaataataattttaagtatatataaaaattaaaaagttaaataaaattttttaagttaatgttatttagagtttagtattggttgttattagtttttaataaggtaagtttagaaattgtaagttagtatttagaaattttaattgtaatttgatattattaaaatagttttattgtggtttaaaaaaaaaaaaaaagaagtattggtttttaatatattttttgaaaattggttttttgttataaataatttaagaaattttgttgagagaatttttgttgtggtttagattgtattttttatcgttttgtgttgtttgagttcggttgattttttgtatgtggttagttagatttgggttgtgatgtgttttttcgtgtcggggttgttattagttttttataggtaatttatagtttttgtgtgttgtttatttttagtttcgagtttttatcgagtagtattattaaggagatttatggtttttagtgtgttttgttgatatttttttattattattttgtggtagttgtttgtttatttgttggtatagtggttttttttttgttttgaatattttaatattggaaatgttaataatattagaatattattatatgttagatattttggtaggtatattttatatattattttatttaattattaataatgttatgagatagatatgattatttttatttaaaaatgggaagagaggttgggcgcggtggtttatgtttgtaattttagtattttgggaggttgaggggggtagattatgaggttaggagattaagattattttggttaatacggtgaaattttgtttttattaaaaatataaaaaattagttgggcgtggtggaacgcgtttgtagttttagttattcgggaggttgaggtagaagaattatttgaatttgggaggcggaggttgtagtgagttgagattgtgttattatattttagtttgggcgatagagcgaaattttattttaaaaaaaaaaaaaaaaaaaaaaaaaaaagggaagagatagttttggaaatgttaaaaattttatttagcgaataattagtaggtggagtagggatttgattttatggttgtttttattaaagtttatgtgtttggttatttatgattttgtgttttttggaaaaggagggagttgtttatttttttttgttgtagagggagtaatatttggatgggtattataataataagaaaatcgatttttttttaagggtagaaatatagatggaatagtattttttatataatagtagtaaacgtattgttttgttgttgttatatagaatttgtgttttgttattttatgtataatattatatggattaaattagattataggatatgtagaattgttttagaaaatttgaaagaatagttgttatagttatatattaagacggagtagttatagggaggttgttaggttttttgggttttgggttttttttaaatttttgagggagatggacgtgttaagggggagttttggatttatcgtttaaattttggtttgttattatttatttttattttgttgttttatcgttattatttttttatttaggatttttttggatatagttttgtttttgatggggatattagaatgttggggagtatagatgggatggggtttaaggtattattaagtaattaataataaatattggtatataaagggaattagattagaaagaaatatttgtgattattagtaaagataatgataatgatatatatatatgtgtatatatttttatttaatttttataatagtttagtatagtaggtaatgtaattatagaggagaaaattaagtttgggggagtttatatgaagtcgaggtttaaatttaggtgtgtttgatttaagtaattttttaacgttttgttagattgtggttagatgtttgaggggagttttgtttgtgtgtttgaaatgtttttttttatttttttattttttgtaatgaattatttatggttatttttttatttgggggaaaatatatatgaatgttatttttaagggtaaatgaatttgtgattgaggttgaagttgtttttgttttgtttatagagattttggttttttttttataataaaaggtgatagaaatttttcggtagttaattttaattttagagattttaaggttttgttgagatggttatttttaaaatattagtgaatttaatttttttttaattttttggttatgatcgattgttagtgttttggattaagtttgggaggttttgaataaattatagtaattttgagagaattggtattggtattttagttttttatagggaagaagatttagggtttttttttttaattagtgtttgattgttaggtgtttagtttggtttttggtgtttttgagagtagggatagtggtatggtttttgggttatgtttggagtttagtatatggttagatttatagtaatggtaaaaagatgacggtagattggatagatgaatgaatgaatgaatagttttaaaggaatgttttttaaattttagtgtttattagagatatttaggaagttaggttaaaatttagattattgggttttattatgagattttagaatttttggagaattgtatttgaggtttaggaatatgtattttgataagttttattggtgattttgatatagttagtttgttttcgttatttattgttgtataattagtgattttaaaatgtaatgatttaaaaaggtaattattttattatattttataatttcgtgggttagtattttaggtaggtttggttgggtgatttttttgttttgtatttttttgttgaggtgttgatgtttttcgtggttttatattttgttattttggtgaggatggttggaaagttgggtttagtgtaattagggattggggatttaagtaattttatgtggtttaagaggaggcgttaatgttttatatgaggttttggggttttagagattgtgttttagggaaagttatatagttttatttttattgtattttattggttgaattagttattagtatttttagatgtaaaggacggggaaattgtttttttttttttataggaggatttatgttttaaaattattttatagtttaagaattttattttgagaaatattattgtagagaaagattttttttattgaattgttttagtttagatttgatttttattcgagtttttggttttaatgatagttgtgttttttaatatggtattcgtttttttgtaggtacgtgatataattttaggaggtatataattgaatatttaaaaggtttatgtgtttatttatatttgtattttaaattatgtattttagattataggttttatggatattattttttagaataaggttaattttattttaaatgagttagtttagggataattaaaagaaatatattggttaggtgtggtggtttatgtttataattttagtattttgggaggtttaggtgggcgaattatttgaggttaagagtttaagattagtttggttaatatggtgaaatttcgtttttattaaaaatataaaaattagttgggtgtggtggtacgtgtttgtaattttagttattcgggaggttgaggtacgagaatcgtttgaatttaggaggtggagattgtagtgagttgagatcgtgttattgtattttagtttgggtgatagagtaaggttttgtttttttttaaataaataaataaataaaataaatagattacgtatatattataataaaagatgtggtaaaagatattataagaatcgtgattgtggtatttagatgtttgaaaagttttgggttatggaattaatttatagattttagttttgtatttttttttttaggtaataatttttttgttttttttgtttttttttttttagttgattttgttttttatgaagtataattagaaaaattttttaggaggaaagtggtagttatttttatttgtttgggtatagatttttttttattttttgtttgattttttggatttttatggatggttatttgttgttttttttttagggagaggttatttttgattttttttatttgatataggatttattttgtaaatagtgatttaaatagttatttatagttaaattgatttgtttatagtttaaaaatttttttattaattttatttagtaattgatttgttttagtatttttggaatagaaagattatgtagttttgtttggttttattgtaaatttttattagtatttagtattattaaggataggtttttgtttttagttttgttgtatttatgattgagacgattttgtttcgattttttttggtttattttaaatgggattaagaaattttttgttaatttaaagtcgtaaattttgaaatataaagtaatttggattagagtaagaaaaaagtttatattttatgtttatgtttttgaatttataaaaataaaatatttattatgttgttgattataaaattaatatttatgtattgtagaaaaaaaatttattataaaaattatttttggtaaatataagttttttgggttggttttatatttattagataaattattttttgagtaaatattttttgaggttttttatgtgaaagaaaattgtttaagtttgtagttgaggtttatacgtggtttgtggagttagagaggggtaattggatgagattaagagtttttgtttattaaaaggaaaagttgggagtttattttaggtagtgatttttattagtattttagggaggaaagtttttttttgggggtttttaggagtttaaggtttgggaagtagagaggtaaagggagaaggtatttaaggtggtagggaaagagtaagaaaaattgtaaagaaaattagggaatttgtgtttggattttgggtttggtttggagagtggttagtttaatttttattttttagagtaggaaattgatttttttcgattgatgttttgtttattttgtaaataatgattttgaatattttgattttagatattataaatttgaagtgtagaatagaatattgttaaagattaataaagttggatattagttaaagtgggaaggatggttatatttagttataatgatggtaataggaaagaggttttagtgtttatgggaataaaaggtatgagatttttaaaaaattgggatgtgttgttaggggaagggtgtgtttttgaggggtagtaggggggttggtttttgtgattaggttatttgggtttgttaattggagtttttttggaggagaagtaaatttttgtggtgtaaattagaggaaggttttttgaagttaggtttttttttttatagaatttgaaagtcggagttatttttttgaagggttgttttttttagatttttggaagatagttttggatggttagaagatttatattttaaagggatagagaaaggatttattattgtaattttttaaagtaattgttttaagagagggtttacgggttagttttttgttgtttgtttttggttagaataaataggatatttttttggtagtgatgaatttttttaggtaggtattttaaagggggttattttagggatatggttttaattgttagaagttatgttatagtttagttaaggagagagtttttattaatatttaggtggaaaaaaataatgtattttattattatgagattgttagggatttttggaggcgatggttttgggataatgagtgagatagaatttatatgttaaatattatataatgattgaatggaaagggtaagtagttagtttagataaaattagattaaaataatattagaagattaaaagtaaaaaatgagtaggtaaatgttaatttttttttttttttaaagaaaatttgtttaaatttggaatatatgttatgttatttttttaattttaggtgatgataaaggtataatttttgatttttttgtttgattgtaaattttttgtttgtaggatttatgttttttattattttgtgtttttataatttgataaatattgtatagagtaggtattaataaagttttttattggtgatgatatgatgttgtattttgtttttattgaagataatgttttttagtggtatttttgtagataaattatggaagtttaggaaggatgatagtattttttggtgggtgttaagttgtttgaataatggaatttggtaagtgttaaacggttaggtagatgtaaaggtggagagttaatttttttggtcgtgtatttttttttttagtattaatgatttgggttaagatatagagagtaagtttaattaattgttaggtttttgagtttaggttaggttattatattttttgtgatttgtacgtatatatttagatggtttgaagtaattgaagatatataaaagaagtgaaaatagttttaattgatgatattttattattgtgatttgtttttgttttattttaacgaatgtattttgtaattttttttatttttaagaaggttttttgtaattttttttatttttaagaatgtattttgttgagattcgttttttgtttataaaatattgtttttaattttatcgtttattttaaaatttgtaagaattaatgataattttattattttttgttgattttttttttagatttagttcgtttgtatttaggtgaaataaatagttttgttgtttatataatgtttgtttggtggtttttttatatggattcgagtgatattaatgtgtttatggaggagggttgataatagaatgaaattttaaaatagttttacgtattggaatttaggatgaaataagaaagtgataagtagtaggttttgatttttttttagtttgattcgggtggtaaattgttttaaaatttaggaagttagttatggaataaaatttagtattttttttataaatatgtaaaaatgttttaagggttttaatatttttttttatttacgttttaagattagttttttatggtatattgaatggtacgtattttgtaatatagtataaatgttagtaaagttttatttaattatgttgtatgtatgttgtagaatgaaatagttttagatagtgtaatattttgaggtatattatttttaatttgtgtgtttaggtttaagtaaagtaggaattaggttttttttttaatttaatttttttgatagttaaagaatgtgttaggaataatgaaaattgttgtttattagttgaaaaaatagttttttttgttatttttatttttaaagtatatgtttattgtagtttgggtacggtggtttatatttgtaattttttgggaggtgaaggtaggagttaggagtttaaaattagtttgggtaatatggcggaattttatttttataaaaattagtcgggtatggttcgtatttgtagttttagttatttgggaggttgaggtgagaggattcgttgagtttgggagacggaggttgtagtgagtcgagatggtattattgtattttagtttgcgtgatagaataagattttgttttaaaaaaaaaaaatatatatatatatatatatgtatatatatatatatatatatgtttatatatatatatatatatatatatatatatatatatatatatatatatatatatatgtttattgtaaaaaatatattggaggttaggtacggtgtttacgtttgtaattttagtattttgggaggttaaggcgggcggattacgaggttaagagatcgagattattttggttaatatcgtgaaattttaattttattaaaaataaaaaagattatttgggcgtgttgacgcgtgtttgtagttttagttgtttaggaggtttaggtaggagtatcgtttgaatttgggaggtggaggttgtagtgagtcgagatcgtgttattgtattttagtttgggatagagcgagatttcgttttaaaaaaaaaaaaaaaaaaaaaaaaaaaaaaattggaaaatttagaaaataaaaatagttataatttttttttattaatttttatttttaaaaaattagttataatatgttgacgggttttttttttgtttttgttttatttgttgatattatttgattttgtttatattgtggagggagagtttattttttagggttttgttgtaaaggttaatggatttagtaatttataagaaaataattatattttatatttgtttaattgttttaatttattaaagtatattgatatgtattattttatttggtgattatattagataggttatttattaggatattaaaattagtcgggagagaggggattttgttttatattttatggttggggaggtttagagttaggatttgaggtttttaaatttcgtatttagagatttgttttttataataatttttatttttttatttaattaaagtttatatatttatgtatagaaatttcgtttgagatttaggatttttattttttgtggtttatttttgcgttatagagtatatttgtatttaatgtgttttttgagttattagtttgggaattttgttattattatatgtatagcggtagtttgtttattatgtattagtgagtttttttcgtcgtttgagtagttgggtttggtttttggtagtaggtatttggggtatgtagttgtttttttagttgttttgttaatagaagaaatttattttttattatttttttgagtgtttgttttagtcgttttgtatgtatttattgttgtgtttataataaattagcgggtttttgttggaagtttggacgttttaatggagagttttttagtaagtggtgtttttggtttttttttttttgtttaatttttgttaaatttttttattatgaaaagtagttttatatttgttaaggtttttaattttttttttaaaaaatttatttttggttagacgtggtggtttatgtttgtaattttagtattttgggaggttaaggtaggcggattataaagttaggagatagagattattttggttaatatagtgaaatttcgtttttattaaaaatataaaaattagttgattgtggtggcgcgtgttcgtagttttagttatttgggaggttgaggtaggagaattatttgtatttgggaggcggaggttgtagtgagtcgagattgtgttattgtattttaattcgggtaatagagtaagattttgttttaaaaaaaaaaaaaaaaaaatttatttttttggtttttttatttatataatttttttgttttttttaattttagttttttatgtaagtttgtaatattaggtaggtttaatagttagatgaaatttaggatttttttggaaaggatgttagaaaatgagatttagagtggttgtaggaggttatagagaggtagtaagagagaaaaggagattttgtaaagagaaattaggtggaagaagggttataggaaatttaggaatttttgaatggggtattttagtaaaaaatgaatgaaaagttaatgttatatgaattagggtgttgcgaatattaatatatttgaaaattgatttttgaaatatgtttttttaatatttggaagttgatattttttttgtatgatatgtttgttagttttatttttaaatattaaagattatttatataattaaaatgtttttttatataaaatttttatagttttgtttgaaaatttgtggttaatttattttttgtatagttaaagcggttaattgtataaattattatttttttattgtaagttttttaatagtttaatttagaattattatttatgttaaggttttaatattatttgtttttggattttgtttgttttttttttatttatttgagattagtgaagagtttatatagaagttagaaaaataataagaataattgttgtttaaggtgagtggattagtgagtgaattaatttaggtggtttaaatgtttttatcgtttttttgtttgggttttgattatattttatttagtgtgatgtttgttatttttggatagagttgttttaatagtgaatatatttttatttagtatttttttttttaagaattttattaggattattttttggaaaaatgtggttaaggttatatttgggtgtttgtggtaagttggttagttattttcgtttattatagatgttagttgttttagtacgtttagatgtataggtaagaattaagtaattaaattatttttttgtattaaagtagttaaaatttttttgttgaatttagtgatattttgtttaaattggttaagaatagaattgagtggtttagtattaaattttttaattagtgttttgtttattatttttaaataatatattttataggagtgaaaagtaaaaaataaaaaatttattttattttttggtgttaattagttttaatataattgtatttagtttttatttatttcgttttttttaattagttgttttttgattttaaatttgttgtttttttagtgggaagattattttttttatatgtggaagaaaatataggttttttgggtttttaagaagttgtttataaagtttttgtttatttataaagtaagatcgatgttgttttatttgagtttatttttaattttgaatttttttttgcgggttagttttatgaggaacgttttgcgggtggtttttatttttttttttaaaatgaagacgattaaattttgaaatttgatgttttgaggagaggaggttattaaggtattcgtttgtcggggttttttttttcgagggtttaagtgggacgttcgtggtggatttatgggaagaggttgttgttgtttttggttggtttatttggtggtgtttttagaagggagggagattgttatttttttatacgaagggttttgatgttattttattagtagattttgaagttaggttagggttttataggtgttgttttggtaatagttttttgttaaagtgtgatggggaatttttatttttgtttagtttatttgtttaatatggagattataatgaagatagttaattaatttttgtttttatacgtataattttattagttttttagagtaatttcgtgaggaaggtagggaagtattattgtttgtatgttatttatttttaaatgtattgaggtttttttgtggtttttatttattgattttttttaaattttttaatttatttgtatttttttttttttgtagataattattatattgtattggatgtttgttatttgtatgggtgttatattttgtttgtggttgttttgattttatataaatggtattgttatattttttattttgttaattatttttttattttatttggaattatgttttttagattcgtattttaattgttttgttgtttttaattgttttatagtattttatggtgggtattattatttgtttatttatataggtatattttataagtaagagaattaaggtttagttatttaagattatagaataaggggttaagttatattttgaatttagttttttggattttaaatgttgtatgtatatattagttttttaagtggattaaggttgtttagagagtagtttgttataaattttaaaataggttttttttagtgggatggtatgatttttagatgataattattgttataaggagatatttttataattttatgtgtaaaattaaatttgttttttattaatatattttatagattttattttttgagtagttattatacggttaaggtaagtatttattagttttagttgataggatttttataatattattgttaggtggttttattttttttatttggttaaataatttgtttaaggttatagagttattgaatttttataattgagaaatgattgagttaggatttggatttagatttgtttgattttaaaagattatttttaattattaaggagtttttttttgtattgttttttttaataattaatttgagttttgtttattttttgtttttttttttttttttggagatggagtttcgtttttattgtttaggttagagtgtagtgatataattttagtttattgtaatttttattttttgggtttaagcgattttgttattttagttttttgaatagttgggattataggcgtacgttattacgtttggttaatttttgtatttttagtagagatggggttttattatgttggttaggttggttttgaatttttgattttaggtgatcggtttatttcggttttttagagtgttgggattataggtgtgagttattatggttggtcgtttgtgttatattatttgagatttttgttatttttaaaatacgtgagtattttataatcgtattaggggaagagttatgtgatagttgttttaaggtatgggtaaagtattttgtgttgtttaagaaagtaaaattagaaatttttaggtggaaattgtagagtaatagattttagtttttcgtaagtaagatttgtttagtaatttagttgtttaaaaatatatagagagtagttttatatagttgtgtgttataagttatgaaaagtatttaaatagatgttggataattgtttattgagttgtaatagaagggaatttagatatttggtaagggtttataatgtagttttgaaattttcggatgttatgattgtttgttagagattaattggaagatgagagtttattttgatttttattattatgtgtttggttattgaagagttgaatgttttatgttagaatgtagttttagttattaaatggtgttgtagtagggagttaagtaaatgattttagtaagagtttgggattgttgtgttcgtttttaaggtatagttatttaatagtaaaggtgtattatttaagtagtaaagggaatggggaggtagtattgagatgtggttaatagtttaggtttcgttaggttgtttataaaaattttgtttttattgttttgaagttttaaagtaagttgtttaatttttttaagttttagttttattttatttgtaaaatgaggattgagatagtttatataatttgttgggtagagtgtttgatataaaggtagtatttttaataaatgttagttcgtagtaatttatgttttgtttttagagatattttagtttaatttgaaatcggatatatatgttttgtgaaattattaaattattaaaatattatattaaataatgttatattttaatttgttttgagttattggtattgaaaatattattaataaaaattttaaatgtattgatgtttgtttggttattaggttattattttttagttgtaaatttattttttttttgatggattttatgaggttgaggttgggattgagtaaatttttttttttatttgttagttgattttatgttaggttttgttaatggtgatattagagggagattgaaagtttagataagaggaaagaggtgattttttttgtttgtttgttgttataaaggttagggttttcgtagtaatggttttttatttagatagtagtgattggttttagtttttagttttttttttttttttttttttttttttgtataattagatttagttttattgtattttttagaggtattaatattatttaggtgatatttttttaaaagtttgagttttagttttgtagaggtttttttatgaaattttatggtattagggacgataggtagtatttttttattaaagatttgtgttttagttttatgggagttttgttttaaatttttagtttttaataattttagttttatttttttgttgttttagtttagtggtgtagtgtgttttttgtagtttttttttttgagttattttaatgttttttttttgtttttttagtaattaatgtttgttaaattaattttttgtggtgaagggaggtgtgaaataaggtttgagagtatagatgttttatcgtttttttaggaattaaattaaatcgtgtttatgaagtgttttgaaaataataaaatattatatagagtttttttatgttttttggtattgttgttaatagtaggaattgatttttttttattatattatgattttttgaagttttttgtattagatgttgagtattttttttgatttattagattggttaataatttttaaattttagtgttttaataaaagtttatttgtttatgttatttggtggagaattttgttttatttaagattttttaatatgaataaatagaatataggtgttaggagttagattatttgaatttaaaatttaatttttttttgttttattttttttatttttgtaatgggggttagaatgatttttattttataggtggttatgaggattaaagtattttaaagattattggtatgtaagttttaagaattgtttattgttattgtaatagtgtaggtttttttttgttttttttttttttttttgtgtttttatatattttgtaggtaattttgttataattttttttaatggttttttgttttttttagatttttttaaaagtggtgttagttcgtttaggaagagttgatataggaggattatttgagtttagtagatcggggttgtaaagagttttgtttatgttattgttttttagtttgggtaatagagtgagattttgttttaaaaaagaaaataaaataagataaaaaaataaaatagatttaagattttaatgagattagaggggtgttttgtaatgatttatgggaatattggttttatgaagtgttttaggtaaaataaaaattttgtagtgaattaagtgtagggaaattagagaaattttatataatgtgtgttagaatattaaaggtttgtaataaattgtgttcgtttattgtatttttaatatgtttattttttttttgtttgttttgtagaatatttatagtatttttttgaatgtaattggaagtattggtgttttaggagttatataagtttgaattatttgttatttattagatgtatgagtttgggttatttttttattttatggggggttcgtagtttttaatatgtaaaatagtagttatagtgttaatttttttatattgtaagtgatgaataagatagtatgataattgtttgtttggtttatatgggagttgggttattgttttgtttttttttttatgttgttatttttatgatgttggtagatgtgattaatgtttttgtttgtttaggtgatgatggttatgaggaaataaagaatatagttgtttattggtttttatgttgatgtttttaggtagttatttttttttttagttcgggattgtttttaaattttttttattttgggtaatatttagtttttatatgattatttttagagatttttattgagtataagtgtatggggtaggaaataatggggaggattttaggttttttatggtttagtggagaagtagttttttttttattagtaaatattatttttatttttaggagttttgttgttattttttgtgtacgttggaggaagttagtttgagagagaaaatttttgttttcggtatttttatttttttttatattaaatattttgtattttttattcgttttaaggtgtagatttgggatttgtgttatttttaaatgtgcgggtagggttttgttttggtttggttttttatcgagtattagttttttttgttgtttgaatagttgtgtttggtttttggtagtaagtgttttttggagtttagaattgttttgttagg

SEQ ID NO: 585 - DNA, 5572 bp, Artificial Sequence
  chemically treated genomic DNA (Homo sapiens)
gagtttaagttattgttttagagaagtaagttttatgttttggtagtttatatgtggtgttgggtatgtgggtgtatagaaattaagaattgaggtttgggaatttatgtttagattttagaggatgaatggaaatttttagatgtttaagtagaggtgtattataggagtagaattattatggagaatttttattagggtagtgtagaagggaaatgtgggatatgagtttttatatagagtttttattggggtattgtttagtggagttgtgagaagagggttattattttttagtttttagaatggtagatttagggatagtttgtttcgtgtaattggaaaagttatatatatttaacgttagtttgtgaaagtagttaggagggggtttgaattttgtaaaattataggggtagagttgtttaagattatggtaatttattttttgtattagtatgatttggatgtgagatatggagttaaaggagataattttggagttttaagatttgattgatttgttggattttagatttgtatggtatttgtagtttttttattttggttaattttttttatttggaatggttgtatttatttaatatttataattttattatatttaggaagtaattaatttgttagtgattttatagagtcgtaggtagaagggatttgttttgttttagatgaaattttggattgtggatttttgagttaatgttgaaatgagttaagatttgggggattgttagtatggtatgattggttttgaagtgtgaggatatgagatttgggagggattagggatggaatgatatggtttggttgtgtttttatttaaattttattttgaattatagtttttatgatttttatgtattgtgggagggatttagtgggaggtaattgaattatgggggtaggttttttttgtgttgtatttgtgatagtgaataagttttataagatttgatgattttataaaggggagtttttttatataagtttttttgtttgttattatgtaagatatgattttattttttattcgtttttaggcgtgattgtgaggtatttttagtatgtggaagtgtgagttaattaagttttttttttttataaattatttagttttaggtatgtttttattaatagtatgagaatagatgaatatatattgtaagtttttttttggtttgtagttgttatttttttttatgtttttttatatggtttttattttgtttttttttgtatttaaattttttttttttataaagttattagttatattggattggggtttattttagtgattttattttaaattgattaattaggtcgtggagatacgtgaaggttggtgcggagttcgtttttgtaagtatggttgttttgggatggattttttttgttttttttttgcggcgggtttgggtgtagtggattcgtagttgtagtatttttattgaggtagagatttaaaagtagcgtttttagtagttggtgtattagatgattgaattttgttgggagaagtgtatggataagtttgggttaaagttggatagtcgggttgaggtttgttttgtgaattgtattgagcgttttattgatataagttagtttattttgaattgattgtaatagatttagaaatttaagttagtttttttagaaagtttttttgattgattttagtattatttttttggaaaaggaaggtagtttaataaatgaagagttgttgatgggatgattgaagaaatagttatgagaggattggtttttattttttgttatttttgggatattttgttatttgagaatgaataaagattaattttttgtgtgtgaagtttaagggttatatgtttgtttgtattttttaatgttaattttgtgaaaataattgataggtgaatggaaaattttatttagatgtatattattgtatacgggattatgttttttttaaagttttattaattgttttttattattttgatagtgggattatatatataaaaattttttatttgtgtggagttatttcgattttaagggagatttttgtgttttttagaaagggtagaagtgggggaagaataatttagtatttttatttagtgtttgattattaatgttggagaaaaatatttgtaagagtgtttatatagtatattttagtttttttgatgattttttttttttatatgatgatttgtttaaatatttatattaagtatagttttaaggtaaggtaggtagtttgagagtttagaggtttttagttttaaaggaatttagttagtgaatataatttttattattagattgttataaggaagaaattaatttattttgtatattagggtataaaaaatttaatgatgtgtttaaataagttataaagatttaggttaattataagttaatagtagttttaggtagaggtgtatgtttaatgttaattagtgtagattttatttattgtatttttttgattattgaaataaaagttatataagatttaaaaaaattgattaattttgtaaagattttatatttaaataatgttatattttgaagttttaaaggttgggattttaatatattttttggagggatataatttaatttataatattaagtaattgtataatttagttattttaataaattgagtgttgtttaatttattatatgataaaattgggtatttgtaggagtatgttattattaagcgaaaattgtatttatatgataaaggagataagtttattaggtttataaggtataagaaatttagattagtagaaaatttagattttatgatgtttgtttttattgatttaatgttttttttttagtgtatatttatagttttataaggagttttttataattaggtaatagatgagggaaaggagttaatgttatgtaaagtaagttggtattagtaataagtagatggttgttgtattagagttttttttagggatgttttgaaatatagtagaaagggaaattttattgataaatagaattttgagtagaatatttgtttttttattttgtaagaaaaaagagatggtttaatgtaagatttatattgatttattagtggtggttaatgtgttggttagttgttattttaaggatttggaaaaaataagattgaaagattggtgatatagaggttaaggtgggggaggtatgtgagagagttttttgaaatgggtatagggtgtgaagatatttgcgttttatggagtgttttttagagaataaattgatttgtttcgtagatgttagttagttttttgttagtttttttggggtttgttgaatgtataatgagtgttatggtgttggtatggagatgaagtataggtttaattttttagattttttttatcgaggttgatgtggtttattaatgttgagtgagtaaaatgttgagagtgaagggtagtattgagttttttgtggtattatttttcgtagttcgtgttaaatggtttttttttatagtattagtttatagggtttagtaatattattgatttattttttttagtagttggaagagggaggaggagagttagttttagtttttggagttgggggtgagtgaggatattgatgtattataagtaattagtgggtaagggggaaaagatgattgagtttaaaagtaatgtttggattggaaataaaagatggaaaattgtattaatttataattatgtggtaatgttttatcggattttgtatttttaattttttatttttattgatagagaggttttgttttttagttgttgtgaataagttgaagaggttttatttttttatttgtaagagtggaagtaattatagggggttttaaaggtaaatgtttatttgtgtattttatcgtgaaagtgttaagggtttagattttattttttttgttttattttatttttagtatttagaagggaggttggtatattgtaattatttaaatatttgtggatgattggaataaatgggaggatgtaggaatgaatgaacgaatgaataattttttagggaataatagagagttgggggagggagaagttatatttgattttttatttttttttaaaatttttgaaaagattatgagaggtcgtatagagtagttattaagattttgaatttttaatttaggatttataattttttagttgaatggtttggttaagttatttattttttgtgtatagtttttttttttgtaaaataaatatagtaaatgtttagagtagtatttgggaaaaagttaagttttatataagtgttattgttattatttttgttattttgatgagtgtgtaagtttgtaagataatcgggaaattttttagggagggtgaatttagatatttagtttttaagggttatttaagagggaataattattttttttttttgttttttatattgttttagattttttattgttttttaatataatttttattggtaagagacggagttttgggttttagttttagttgtttgcggtgggttgtgtgagtttgttaaagttttttgttttttttgggtttcggttttttcgtttgtttacgtgaggttggaggagttgaacgtcgacgttatttttagttaagagggagtagggttttcgagtcgtcggtttagggtttgcgtattcgaggtcgcgcgttttttttttttttttacggttttttcgggtttcgtattttgcgtttcggttgtcgtttagcgttttatatcgtttttagggggttttcgcgggtttttttcggtcgggatgttagtgtttcgcgttacgcgcgtttgttttcgcgtcgtttgttttgtagtttgttcgcggcgtttttatatttagcgggttcggcgtttattaatgtttaattcggggtcgaaatttgttagcggcgagtgattttatcgttcggagtagcggtgtaggacgcgcgttttcgtcgttcgcggtgatttttgtttgcgttttttttttgaacgtttattttcgaggagacgtcgacgatgaaggtgagtgtcgcgttacgtacgttttcggggcgagttgtggggattttttcgttaaattttttaaatggtttaaaagttggcgaaatcggattagggattttttttaggcggaagttttaaggttattttttgataggtgaagggacgttttagagttttcgtttagttttcggattttggtttttgttaggattttggcgtcgagttttgaatgtttcggagagttatttatagaacgtacgttcgaattcgggtaggggtagagaaattaacgttaatgtgttttgaaggtataagtttaagggtattcgttttagagaattttaattggcgtattttagacgttatttttatttttagttcgcggttttttttttttaacgtatttttatttgtaaattttgttgtttttggagtagtttcgatttttttacggaaattggggttatacgtttttttttaattggatttgatttgttcggtttgtaga

SEQ ID NO: 586 - DNA, 5572 bp, Artificial Sequence
  chemically treated genomic DNA (Homo sapiens)
tttgtaagtcgagtagattaagtttaattagagggaagcgtgtggttttagttttcgtaggagggtcggggttgttttagaggtagtaggatttgtaggtgggagtgcgttagaagagggagatcgcgggttgggggtgggggtggcgtttggagtgcgttagttggagttttttaaggcgggtgtttttgaatttgtgtttttagagtatattagcgttggtttttttatttttgttcgggttcgggcgtgcgttttgtgagtggtttttcgggatatttaaagttcgacgttagggttttagtagaagttagggttcgaaagttaagcgagagttttgggacgtttttttatttgttagagggtggttttggggttttcgtttaaggggagtttttggttcggtttcgttagtttttgggttatttggggagtttggcgaagaggtttttatagttcgtttcggggacgtacgtggcgcggtatttatttttatcgtcggcgttttttcggaagtgagcgtttagagaaggagcgtaggtagaagttatcgcgggcggcggagacgcgcgttttgtatcgttgtttcgggcggtggagttattcgtcgttggtaagtttcggtttcgagttaaatattagtgagcgtcgagttcgttgggtataaaggcgtcgcgggtaggttgtagggtaggcggcgcgggagtaggcgcgcgtggcgcggggtattggtatttcggtcggggggagttcgcgagggttttttgagggcggtgtagggcgttgggcggtagtcggggcgtagagtgcggggttcggaggagtcgtgggggaggggaaagggcgcgcggtttcggatgcgtagattttgggtcggcgattcggggattttgtttttttttagttaaaaatgacgtcggcgtttagtttttttaattttacgtggataggcgagggaatcgagatttagagagggtaggggattttggtaaatttatatagtttatcgtaggtaattggaattgaaatttaggatttcgttttttgttagtgaaagttatgttaggaagtagtgaggggtttaaagtagtatgaaaggtaaagagaaaaggtgattgtttttttttgaatggtttttggaagttgagtatttggatttattttttttagggaatttttcgattgttttgtaggtttatatatttattaagatgataaaaataatgatagtaatatttatgtggaatttgatttttttttaggtgttgttttaagtatttattgtgtttgttttataggaaggaagattgtatatagagaataaataatttggttaagttatttagttaggaagttgtagattttaaattaagagtttaaggttttaatggttattttatgcggttttttatagtttttttaagggttttggagaagaataaaagattaggtatggttttttttttttttagttttttattgttttttaaaggattatttattcgtttatttatttttatatttttttatttattttagttatttatagatgtttgagtggttataatgtgttagttttttttttaggtattggagataaagtgggataagagaggtgaggtttggatttttggtatttttacgataaaatatataggtaaatatttgtttttagggttttttgtgattatttttatttttgtagataagaggataaggtttttttagtttgtttatagtagttgaaaagtaaagtttttttgttagtagaggtaaaagattaagaatgtagagttcgatggggtattattatatgattatgaattaatgtaattttttattttttatttttaatttaggtattgtttttgaatttagttatttttttttttttgtttattagttgtttgtgatatattagtatttttatttatttttaattttagaggttgaaattaatttttttttttttttttttaattgttgaggaagatgagttaatggtgttattggattttgtgaattgatgttgtgaagagaggttatttaatacggattacggggaatggtgttatagggggtttagtgttgttttttatttttagtattttgtttatttagtattggtaagttatattagtttcggtgaaggaagtttggagagttaagtttgtgttttatttttatgttagtattatggtatttattgtatatttagtaagttttaaggaagttggtaggaggttggttgatatttacgggataggttaatttgttttttggagggtattttatgagacgtaaatatttttatattttgtgtttattttaagagatttttttatatgttttttttattttgatttttgtgttattagttttttaattttgttttttttaaatttttaaggtagtagttggttaatatattagttattattgatgagttagtgtagattttatattgggttatttttttttttttgtaaaatagaaaagtagatgttttgtttaaagttttgtttgttagtaagatttttttttttgttgtgttttaggatatttttgggagggattttgatgtagtagttatttatttattgttagtgttagtttattttgtataatattgattttttttttttatttgttgtttagttgtaggaaattttttgtgaagttataggtgtgtattgagggagagatattgagttaatgggagtaggtattatagagtttaagttttttgttagtttgagttttttgtgttttgtggatttggtgggtttattttttttattatatagatataattttcgtttaataatagtatgtttttgtaaatgtttaattttattatgtggtagattaggtaatatttagtttattagggtagttaggttgtgtagttatttgatgttatggattgaattgtgtttttttaaaagatatattagaattttaatttttaggattttagagtgtgatattatttgaatatagggtttttatagagttaattaatttttttgaattttatatagtttttattttagtgattaaaagaatgtagtaaatggaatttatattaattaatattaggtatgtatttttatttgaaattgttgttagtttatgattggtttaaatttttataatttatttaggtatattattgaattttttgtattttgatatatagggtaagttaattttttttttgtggtagtttagtaataagaattatgtttattggttagatttttttaaaattaaagatttttagatttttaggttgtttattttattttgagattatatttaatatggatatttaagtaaattattatataggaaagggagattattaagaaaattgaagtgtattgtataaatatttttatagatatttttttttagtattgataattaaatattagataaggatattaaattattttttttttatttttgttttttttgaaaaatataaggattttttttgaaatcgaaatgattttatataaatgagagatttttatgtatgtggttttattattaaaataataggaagtagttaatggggttttgagaaaagtatagtttcgtgtatagtaatatgtatttaaatagagttttttatttatttgttaattatttttataagattagtattaaaaaatataagtaaatatatgatttttaagttttatatataaaaaattggtttttgtttatttttagatgataggatgttttaaaagtaataaaagatgggagttagtttttttatagttgtttttttaattattttattaatagttttttatttattgaattattttttttttttaaagaggtaatgttgagattagttagaaaggttttttgagaaaattggtttggatttttgggtttgttgtagttaatttaagatgaattggtttgtattaatgaagcgtttaatgtagtttataaaataggttttagttcgattgtttaattttggtttaggtttgtttatgtattttttttaataaagtttagttatttggtgtattagttgttggaagcgttgtttttgagtttttattttaatgaaaatgttgtaattgcgggtttattgtatttaaattcgtcgtagaggaagagtaggaggaatttattttaggataattatgtttgtagagacgaatttcgtattaatttttacgtgtttttacgatttagttaattaatttaaaatgaggttattagggtgggttttaatttaatatgattgataattttataaaaaggagagatttggatatagaaagagatagagtgaaaattatgtgaagaaatataggaaaagatggtagttataagttaaggagaagtttgtagtgtgtatttatttgtttttatgttgttaataaagatatatttgagattgggtaatttataaaggaaagaaatttaattgatttatatttttatatgttggggatgttttataattacgtttgaaggcgaatgaggagtaaagttatgttttatatggtggtaggtaagagagtttgtgtaggggaatttttttttataaaattattagattttgtgagatttatttattattataagtatagtataggaaagatttatttttatgatttaattattttttattaggttttttttataatatatgggaattatgggagttataatttaagatgagatttgggtggggatatagttaaattatattattttatttttggttttttttaaattttatgtttttatattttaaaattaattatgttatgttaatagttttttaagttttaatttattttagtattgatttaaaagtttatagtttaaagttttatttgagataaagtaagttttttttgtttacgattttgtaaaattattagtaagttagttattttttagatataatggggttataggtgttgggtaaatataattattttaaatgggagaaattggttaaaatgaaggggttataggtgttatgtaaatttgaaatttagtaggttagttaaattttaaagttttaaaattattttttttgattttatgttttatatttaagttatgttaatgtaagaggtgggttgttatggttttgggtagttttgtttttgtagttttgtagggtttaggtttttttttggttgtttttataggttggcgttgagtatatgtggtttttttagttatacggaataagttgtttttggatttattattttgggggttggaggatggtggttttttttttatagttttattaggtagtgttttagtggagattttgtgtgggggtttatattttatattttttttttgtattgttttagtagaggttttttatgatggttttgtttttatagtatatttttgtttgggtatttgggagtttttatttattttttgaaatttaggtataggtttttaaattttaatttttgatttttgtgtatttatatgtttaatattatatgtaagttgttaaggtatggggtttgtttttttgaagtaatggtttgagttt

SEQ ID NO: 587 - DNA, 13584 bp, Artificial Sequence
  chemically treated genomic DNA (Homo sapiens)
tttatgttttattgaagttagttatagttttgttaatgatggatgtgaaatgtatatggttgtatttatttttttttgattattagtgaatttgaatatatttttatatgttaattggtattttaggttttttgtgaattttgttttttgtttattgatttgtaggagtttttgatattttttggatattaattttttttaagatttaattgggtaaatattttgtttagtttagagtttgtttttatttttgttgtggtgttttttatgttttaattttaataaagatggatttgttagtcgttttttttatgatatgtatatttatgtgatttgttgaagaaatatttttattttaaggttataatagtatatttttttttttaaaagtttaaaattttattttttttatttaggtttttggttaattgaaaaaatgtgtgtgtgattgttgtgaaatagagatttaaattttatttgttttatatggatagttagttgttttagtattatttattgaatagtttattttttttttaatgttacgtaatttttattatatattaagttttaatatatgtttttaggttttttgttttgttttattggtatatttattttttatagtataaatatataattgttataattattatagtttgataataagtttttatatttgtaaaatgtttttttatttttttttttttaaagttgttaataaatgttgtatgtttttattaatacgtgggagttaaaaaagtggattttatagagagagaaagtagaaagatggttatttataggttgggaaaagtagtagggagtggggatggagagttgttgattaatggatataaacgtgtagttagatggaagggataagttttagtgttttataatatagtagggtggttgtagttaataataaattattgtatagtttaaaatagttagaagagaaaatttggaatgtttttaaaatagagaaatgataaatgtttgaggtgatagatattattattattttgatttgattattatatattgtatgtatatattaaaatattatatatattttataaatatatataattattatgtattaattttaaaaattgttttgacgttttgattttttttggttttttgtttttttatataagttttaggttaagtttgtttagttttatgaaaaaaaaaaaagaaaagtttttttattgtaatagtatttatgtaatagattaatttgaagaaaatatttatatgatattgaatttttatatttatgaagatttatggttttatatttttttttttttttttttttttttttttttttgtttttgagacggagtttcgttttgtcgtttaggttggagtggagaggtgcgatttcggtttattgtaagtttcgtttttcgggtttacgttatttttttgttttagttttttgtttagttgggattataggcgtttgttattattacgttcggttaattttttgtattttttagtagagattgggttttatcgtgttagttaggatggtttcgattttttgatttcgtggtttgtttatttcggtttgttaatatgttgggattataggcgtgagttatcgtattcggttatattttttttaggttttgtttttgttttttaataatgttttttaattatttttataaagtttattattatatatttttagataagatttattttagttaggtatagtggtttgcgtttgtaattttagtattttgggaggtcgaggtagtaggatagtttgaggttaggagttggagattagtttagataatatagaaaaaatttatttttataaaataaaattaaaattaaaaaatttatttttgtaattttagtattttgggaggttgaggcgggtagattacgagattaagagtttaagattagtttgattaatatggtgaaatttttatttttattaaaaatataaaaattagttaggcgtggtggtgcgtgtttgtaattttagttatttaggaggttgaggtaggagaatcgtttgaatttaggaggtagaggttgtagtgggttgagatcgagttattgtattttagtttgggtaatagagtgagattttattttaaaataaataaataaattaaattagttaggtgtggtggtatgtgtttgtagtttaagttatttgggaggttgaggtaggaggattatttgagtttaggagtttaaggtttcggaaagttatgattgagttattatattttagttttagtgatagaattagattttgttttttaaaaataaaaaataaaaaggatttatttttattaatttttgtagtttttgttgttattattaatgatatttttttttttattatatttattatatggttattattagtatataggaaggttatatattatgtaatatatatcgtgtaataatttgtttttgtttagtttgtatttattaattttgtaatatttttttatttgttttaaaataaattatttttatgttgattaataattttgagtttttatttttaagtgtaatattttttagtttttttattaattatatttaaatataaaatttaattagtgtatagtggttttgaataaatattttgtatatttgttaaaattataaaaagtagtattatatagtaaagatatgataaagttaggttttttggattttagttggttttaataaaagttaataaaaattaaaaattgagattttattataagtgaaaatttaatttatttatttgtaaaataggaataaaaatattaagttatttatggttgttatgaggattaaatgggataaatttaataaaatatattgtaaagttatagtttatattaaatattaattaaagttagttaatgttgataaaagtatgataagtggtattatagtttatttagttacgtagttagtataggtgtgagttagatttaaaaatataggttagattaatttttaataaacgttaatgatttgtttatatttttttggaattgttttatagtaaatataatttattgattgaattgttattgaattattatttattgagttattgttttgtggtagatttattttaggtattgggtatatagtagtgaattcgttaaagtttttgtttgtgtggggtttttattttaatgagaaagttaaatattagttaagtaaataattgtgtatttttaaattatgatgttatgttttaaaaagtatatgtaaattaattaagggatttaaaaaaatattttgagagaatgttataagaggggttaattgagattaggaagttaaagtggttttttttgagaaagtgatgttgaagttaagtaatagttaaatcgagagagagagagaagtgtatttaagtagagaaaatgatgtttgtaaagagtgggtaaatttgggattataggaggttattatggtgggagtggagaaaataaaagtaagagtagagttagatgaggttggagagttgtgtagggggagattatgtaaagattttggaggtttgttttttttttgtgtaattattagttttataaagaggattagtgtgaaaagattattttgattaatgagtggtaaagagatggggagggttgcgagaggaagtaagaagtgtagtaaaggtaagagtgaagatgaagaaaagtgatggttttgggatgtattttggaggtatgtttaatagggtttaaggatggattggttgcgggtggggagaaggtttgtaagaagaagtgttagagatggtttttaggtttttgatatgagtaaaggggaatattttttattgaaatggggaagattagagatggagtagatttgggaggaaagattaagaggttttaatttcgatatgtgtcgtgtttgagatgtttatgaggtatttaagtaaagatgtggaataggtagttaaatatgtggatttagagagttggggttagaaatttgaatgttgttgggagttataggatttttatttagggtaagagggtagtaagagaggagaaggaaatttagaatagaattttaggaaatgttaaagaaagagttagaggagaaattggtaaaaaggatgaggtgaaaaataagtgtgttaaaaatttttttttagtattttaagaagagaagattttagttcggtatgatggttgaggtttttaattttagttatttaggaggttaaagtaggaggattattttaggttaggagtttgagattagttcgggtaatatagtaatattttatttttaaaattaattaattagttaaataatttttaaaataaaaagaggagtttatgaaagtgtagttagtaatgttaaatgtttttaagtaagatgagagttgaaagtatttattgtgtttagtaatatagggtttattgtttttaggaagagttgtggtgggggtagaaattggaatgtagatatggtttgtggttgggagttgggtgagtgtttttaatgagggtttttattatattaggagttaatttatatattatatttttgtagtttatgatagattttatggagttatttagttaaaaaatattattattaaatttttatttaaataggttggtgaaatgttaaggagataatttttgagaagattttttttttttttaagtatacgtgagtatttgttgtgtaatttttgtaaattaatgaaattacgtatatataagtgtattaaattatttattggtggtttaattttataaggaatttgaggaagtaatttttattattatttttgttgattaaagttttaaaggttaagattatattgtagtttttttattgttgtaaaagttaatgagagttaattattaaagttgatagaaaggtaatttgtttattgttttatatagtttatatatagatatttttatgtatatggatgtatatagagtttgtagatttgagtggatggatattgttttttagaattagaatttagaattttattttgaaaatgtattattgttgtagaagttttttatagagtatgtgttaggtaggaattaaatttatgattgttatatttaaattggttttttgttttttgaaaatggtattttttttgattaaagtttatttaggagttattatgtttttgagtttattttatgtgtgtgaatattttgaatgaatttattaataagatatgtatgtatgtttggagcgttagtaatgtagaataaatatttaagtagattttaataagtaaatggttgtaggtattattaagttttaaatagtttttttaaagatattagtgtttttgttttaattatttagataatttttttaattttttatttaaatttgattttatagatagattgtttgttttgagggttggtaaaaaaaaaaaaaaaaaaagtaagttttaaggaaagagtttttttaggagagagaattatttattagaaaggatttagaaaggttatttggttttagttaggtatagggatatgtatttatagttttagttatttaagaggttaaagtaggaggatagtttagtttaagagtttgaggttagtttaggtaatatggtaagattttgttttttaaaaaaaaagggagggggtaggggatatatggtttagaagtgagagatttatttgttagatattttagaaagtttaagattaagggaaatacggagagaagaaaaggtaatgagagtaagaaggatagagattggaaagagaagagagatggggagaaaatggttattggaaagtagtagaatgttttatgttataagtagtataatataatataatatattagtaatgtatgggtatttattttatatattattaattttattaagataaaatttattttattttttaaaatgttaggaaaagattatataattttttttatatatgtaagtgaggaataatttattaaattattggattaaataatttttttttttgaagtaagttagttatttggaaaaattgtgttatgaaatttgattgtataaagattatttttttttttttttttttttttgagacggatttttattttgtcgtttaggttggagtgtagtggtataatttttgtttattgtaatttttgttttttaggtttaagtgattattttgttttagttttttaagtagttgatattataggtacgttttattgtgtttggtatttttttttttttttttttgtatttttagtagagacggggtttcgttatgttggttaggttggtttcgaatttttgattttaggtgatttttttattttagttttttaaagtgttaggattataggtatgtgttattttattcggttaaggattatttttaatgaaaatttaggaagtaattaatttgattttagaaataagaaaaatggggtaatataatatatattttgttttttttttttggataagggaataagtaagtatataaagaaatgaataaatgtttaatattttttaaatagtttatattcgattaagaaataaaatcgtttagaaaatgagaatgaatattttttaattataagaataaatatgtaataatatagtttggtgtttttttataataaaggtttttgattttttaaagagaagagaagaggtttttttagtttttgtgttattttgttgagaagtaaggggaagaataaagtaagttattttaaggagatttgtttttaggttattaggtttatgttttgtgttgtggatattgagtgtaggagtgtgaggtttttatgtttaaaagtaaggattttgatggtgttttattttgtttttttattttgttttttttgggggtaggggttgagatttttgatattgaatatgtagtagagaagaagacgtagtggagagagttagttatttattagatgtggttttttattttggttttgggaagttgagaaagttatttatttttttttatttttatttttttatttgtaaattagcgataatatagtttattttgtttgtttttatttatagtaatatttaaggaagaaaagtgaaagtgtttagaaaattttaaagttttatagaaatggttagggatttttttttgtttgttgtgagtttattgggtgtgaaattttttgttatggtgtattttaatatttttttaatggtttagtttatgggttaataaagttttttgttttagtgtttggaatttttaataattttttatatgatttgtttattgtttattgttttgttattatttttgttaaatttatttgttttttaaagtttaatataagatttatagtttttttataaaatttttttaattttaatttatatttatatttttttttttaatttattatttgtattaattattttgggtattttttttgtgtatgtaaattttggagtttaggtttacgttatttatatattttttgtttatagtttagtttattttaataaatttttttgtatatttattatgttataggatttaataaaagagggaaaaatggttaagatttgggttttgtttttgggaaatttagttttaaagggaatagaaatataaataaataatgtatgatatggaatagatatatatataaggtatttataagaaggaaatgattaattttatttagggattttatgaaggttttatattatttttttattttttataattgtgttaggaattgagtttttgataaataataggttgatatatgtttgttgaaggaatgaagaaatgaattaatggttagttgagttgtgttttgtttgtttgtttgttttagagatagggtttttttatattggttaggttggttttgaatttttggttttaagtaatttttttattttagttttttaacgtgttaaaattataggtatgagttattgtatttagttgtgttgagtatttttaagaatgaattggaatttattaggtattggagaagaagaatataaaggaaattatgtgtatagagatacggaattgttaaatattatagcgtgttaggaatttgttgtaattgtgaaggaggagtgaagaagtttgtgagatagattagagttaaaatatgaaggattttgtatgttattttaggaagttcggatagttagattattttaaaattatgttaaaataaattgggataaaaatggaaaattgttatttttaaagataagtttagagtaaatataaagttatagaaaagttggtagtattaatattttttaataggttttagttgatttttgtggattagttgtaaattttattaatagttaatatttaatttatttttgagattgttatttatgaatttaaggttaagaagtttttttttgtatattttgtttttagttttaagaatagttttagaaggaaaataatggttttttttttttgttttaaggaaattgaagttttgggtcgggtgtttacgtttgtaattttagtattttgggaggttaaggtaggtagattatttgaggttaggagttcgagattagtttggttaatatggcgaaattttatttttattaaaaatataaaaatttagttgggtatggtaacgggtgtttgtagttttagttattcgggaggttgaagtaagagaattatttgaatttagaaggtggagtttgtagtgaaatgaaatcgcgttattgtattttagtttttattttgggcgatagagtaagattttgttttaaaaaaagaaaagaaaagaaaagaaaattgatggtttgaattattggtttatagtaaatatagttaagatatggtaaggtaaggatttgaaatttggtgtgtttagttgttaaagttttatttttttttgttgtatttttcgattaatttaggtttgatttttttttttagtattttcggtaatgtagtaatagaattgatgaaaaatagtagtaataattattgtttattttagtttttgattttttttgagtttttttaattaattttagtgttgagattttttttttttatttattattttagtttttttttattttgatgttattatttttttgtttttatttagttttacgttaattagaatgtggagttttttgtgagtttgatttttgatttttttggttgtcgatggagatttttttgaaggtgtttattggagtaattattttgtttgtttttttattttttatttatttttttaagtatagttattaggacgttgttgtattttttattgtttaaggattaatttatgaaatagggttggtttatttttggttttgtattgattggtttagagatattttgagatttatgaggtgagttgtgtttttagtagattttaggtatagtgtggtatttttagtgatgtttttatcgaaggttttttttagtttgaatagttatgaaggggtgatgttgttaggagttgttttgtttaagagtggaggtatttaatgtgattgcggaggggttgggaagtgttttgtatttttgtttgtttgttggttttaaatgatcgttaattaaagataaattttagtatcgtttattagtattttggtttaaattagttgttttttagtaaaaagggtagatttttgaaagattaaaatatagaatagataaatattgagtggaaaggttagggttaaaagatattttttagtagagcggggtaggtagagtggaggttttcgtaattggaggttagtttgtaggttggaaatgggtggaatttgaagtggtggggaggtatgtatatgataatttttagaaatattaaaaagttattaatatatgggaatagttaaattgagaaattgaattttagaaattaattttaggattaaatttttgtttaaaaagaaaaaaaaaaagtagagaataataacgtgtatgattaagttatagtattaagatatgtaggtatatgaatgtttttatgtgtgtgtttatgtatgtaatatatatattataaaggttaaaaaaataataaaaagtacgtcgtagggaagtaaataaaagtggaaatatatataaataaggtttgggattttataattagtaagaggaagggattttgtgaatgaattttaatttttaaatttattgatattttaaggaatttagagatttatgaagatagaatatgaaaaggtttttatattaatatgggcgtaatatttgaaattggaattgtgattttaggaattagaaaaaagtgttttttaagaatttttggtaaaaatgtaatttgtttaggtgaaaaaagagtttaaataatttttttttaatttttaattaaagatgagtcgagatttcgttattatattttagtttgggcgatagagtaagatttcgttttaaaaaaaaaaggttttgtttaagaattttagaaatgatgatatggagaatgttattaatttatgattatttggaatatttttttagtagaggtattattggggtagttgatttagaggtttatattgtatgttatatatggaggtatagtttttggaagcggggatgggtgtaaggggaaaatagaaaggttggaatgtggtttttaagatttttttttaaagtttggaaagatttttttttttttttttattttttgagacggagtttcgttttgttatttaggttggagtgtaggggtatgattttagtttattgtaatttttgtttttcgggtttaagtaatttttttgttttagtttttcgagtaatttagattataggtgttcgttattacgtttggttaatttttgtatttttagtagagataagtttttattgtgttggttaggttggttttgaatttttgattttaagtgatttttttgttttagttttttaaagtgttgggattataggcgtaagttatcgcgtttggtcggaaagattttttaagtttttttgatttttattttgagtagggtttttgtaggtagtgtttgggtatgaggaggaggtttttattggtaggatagttagagtttaggtttttgatttagttggaggtataagaaagtttattaaagagatagttatagttatttttagagaaggaaattgattagaaatgaagttatattttttttattattgttatcggtaaaaaaaattaaaataaaaaaaatataatagttagaagaataaaagtatttttaagattttttttggggaagataattaataaatttttgtgaattttttgaggaaagtatgagtaaagtaagtaaagagtagaatttttttttttttttttggttatagtagtatttgatagaagtataaatgtatagtgttgaagttttttttattttaaggttggttaggttggtttttttaaaggattaaagttgtttttataagatattttagatattttttgtgagaaatttaagatgttagaagtgattgattatggattagattttaattattattgttttaattatgttgttggtaattagttaaaaaaagataaaaatttatgttttgtatagtaatgtataagttatttttattttgtgagtaagtttttttgataatgggaagtattgtttagttagtgggatttgatttttgaagtgtgggtggagagatggaagagggaatggaaataaaagagaaaataagtatttgggagtggtaggggaggagaggtttagaaagaatagtaaaggaggatttaaatgttataatcgaggttttggtggtgtatttattagtaatttgggaggttgaggttgaaggattgtttaagtttaggagtttgaggttagtttgggtaatatatgaaagatttttgtttttattgaaatattttaaaaattagtagggtatggtgggttatatttgtagttttagttatttaggagataggaggatcgtttgagtttaggagttaagaggttatagtgagttatgattgtattattgtattttattttaagcgatagtgagattttgtttttaataataataataataataataataataataagggagttataattgagtttaaaggaatttaaattttggagattaagttagagatgtggggtagaagtagtatattgtggttaaaagtgagtatagaggattttagaggaaattagaaaatgggatgggagagaaaaatgagtgattaaagagaggttaagtggggttagtagtagaggttagtatttgatttttggttataatttgagttttgtaaatatgttgaaaattttataaggtatatgagggtacggtgtaataagatattatttagtgtgagataatttaattaattattgtgattgaagttgaggaataaaatttgggtattatgagtagtaatatagaataagattagagggaaaaaatgttagtagttagttggaatgtttttcgattatgtttatattgaataatagagaagttgtatgatatagaaaagagagtaaagaagtttgaaaatgtaggtattatttttgttatgttaataagttgtatgttttaagaaaaagtatttttaatttagtgtgggtttggagtgtgtgtgattattttattatttgtaagaataaaataataataataaaataataagggtaattgttttaaagaattgtgaaggttaatttggtaatgtgtatttaaatattttgttaaattgattttttaagtataatagaaataggattgagataagaattaaaaatttaaatattttgtgtaaaaaatgttaataattaaaataataattattatttagtaaatgtttatagtgtgttggatgtaaattagatgttttggaaattttatttaatttttataattatttgaaatttgaatatttttatttttattatataggtaaggtttagagaggttaaggaatttgtttaggattatttttttaaaaagattttattatttataaatgaagtaaataaataatatttagtttgttttatagtttttttaattataaattgtaaaattttaatttttagaaataataaggaaataattgaaataggtaatatttttgaattttataattttttaattttataaggtaaaaaaaataaattttaaaattttgttgggtaaattggaatagtttggattggagttggggtaataaaaaaattttaaatttaatttgttttaatatttaaatgttttaattttggaaatatttttgggaaaaaaagttgatgagaatattttgttttgtaagtaaaaaattgattaattgatttataaattgagttaattttgttattttttggtaaattaaaaaataaagtttttgtttatttatttaaaagagttacgtttagtttattggaataaaatatcgttgtcgtaaaatataatttaggttttttaattttgttttttttgattttaaaaggtggtaatatttagttcggagtttatttatttgtaaattgtattatattatttttgagttatttaagaagtaagt

SEQ ID NO: 588 - DNA, 13584 bp, Artificial Sequence
  chemically treated genomic DNA (Homo sapiens)
gtttgttttttaaataatttagagataatgtgatgtaatttatagatgagtgagtttcgaattgaatgttattattttttaagattaaaaaaggtaggattaagggatttagattgtgttttgcgatagcgatgttttattttagtgagttggacgtggtttttttaggtaagtaaataagagttttattttttaatttgttaaaaagtaataaaattgatttagtttatgaattaattagttaattttttatttataaggtaagatatttttattaatttttttttttagaaatatttttaaagttaaggtatttaagtgttgggataggttagatttaaagtttttttattgttttaattttagtttagattgttttaatttatttaatagaattttaaaatttgttttttttattttgtaaaattaaaaaattgtgaaatttaaaggtattgtttattttagttatttttttattgtttttgggagttagagttttataatttatagttaaggaaattatgaaataaattaaatattatttgtttattttatttgtgagtaataaggtttttttaaaggaatgattttgggtaagttttttaatttttttgagttttgtttgtataatggggataaagatatttaagttttaggtgattgtgaagattaaataaggtttttaaagtatttggtttatatttaatatattataggtatttattaaatggtagttattattttgattattagtattttttatataaaatgtttaagtttttaatttttattttaattttgtttttattatgtttaaaagattaatttgataaaatgtttaaatgtatattattaagttagtttttataattttttgaggtagttatttttattattttattattattattttatttttataaatgataaaataattatatatattttaaatttatattaaattggaaatatttttttttgggatatatagtttgttaatatggtagaaatggtatttgtatttttagatttttttgtttttttttttatgttatgtagtttttttattgtttaatataaatataatcgaagaatattttaattaattgttagtattttttttttttaattttgttttgtattattatttataatgtttaagttttgttttttagttttaattatagtgattaattgaattattttatattagatagtattttgttatatcgtgtttttatatattttatgggatttttagtatgtttgtagagtttaagttataattaggaattagatgttggtttttattgttggttttatttgatttttttttgattatttattttttttttttattttattttttagttttttttaaagttttttgtatttatttttgattataatatattgtttttgttttatatttttggtttgatttttagaatttgagtttttttgagtttagttatgatttttttattattattattattattattattattattagagataggattttattgtcgtttggggtagagtgtagtggtgtaattatagtttattatggttttttaatttttaggtttaagcggtttttttgttttttgagtagttgggattataggtgtggtttattatgttttgttaatttttaaaatattttagtagaggtagggattttttatatgttgtttaggttggttttaaatttttaggtttaagtaattttttaattttagttttttaagttgttgataggtgtattattagggtttcggttatgatatttagatttttttttgttattttttttgggtttttttttttttgttatttttaagtgtttgtttttttttttgtttttatttttttttttatttttttatttatattttaggggttaaattttattaattagatagtattttttattgttagaagaatttgtttataaagtggaggtgatttgtgtattgttgtgtagagtatggatttttgtttttttttggttgattattaataatatggttggggtaataataattaagatttaatttatggttaattatttttgatattttggattttttataaagggtatttggaatattttataagaatagttttaattttttgaaggaattaatttagttaattttaggatgaagaagattttagtattgtgtatttgtatttttgttagatgttgttatggttaggaaaaaaaaaaaagattttgttttttgtttgttttatttatgttttttttaaggagtttatagaaatttattagttgttttttttaaaaaagattttgaaggtatttttatttttttggttgttgtattttttttattttaattttttttgtcgatgatagtgatgggagaaatataattttatttttaattagtttttttttttgaggatggttatggttgtttttttagtgggtttttttatatttttagttggattaagagtttgaattttggttgttttgttagtaaaagttttttttttatatttaagtattgtttgtaagggttttgtttagggtaggaattaggggagtttaagaaattttttcggttaggcgcggtggtttacgtttgtaattttagtattttgggaggttgaagtaggaggattatttgaggttaggggtttaagattaatttggttaatatagtgaaaatttgtttttattaaaaatataaaaattagttaggcgtggtggcgggtatttgtaatttgagttattcgggaggttgagataggagaattgtttgaattcgggaggtagaggttgtagtgagttgagattatgtttttgtattttagtttgggtgatagagcgagatttcgttttaaaaaataaagaaaagaaaagaaatttttttagattttagagagaaattttgagggttatattttagtttttttgttttttttttgtatttattttcgtttttaaaagttatgtttttatgtgtaatatataatgtgggtttttgaattaattattttaatggtgtttttgttgaagagatgttttagatagttataaattaatgatattttttatgttattatttttgagatttttgagtaggattttttttttttgagacggagttttgttttgtcgtttaggttggagtgtagtggcgagatttcggtttatttttaattaggaattaaaaagagattgtttaaattttttttttatttgaataagttatatttttgttagaaatttttggaaaatatttttttttggtttttggaattataattttaattttaaatattacgtttatattaatgtaaaagtttttttatgttttatttttatggatttttgagttttttagggtgttagtggatttggggattgaaatttatttatagagttttttttttttattaattatagaattttaagttttgtttgtatatatttttatttttatttgtttttttacgacgtgttttttattatttttttggtttttatgatatatatattatatatatagatatatatatgaagatatttatatatttatatattttggtgttgtggtttagttatatacgttgttgttttttgttttttttttttttttttgagtagaaatttaattttgggattaatttttgaagtttagttttttagtttaattatttttatgtattaataattttttgatatttttagggattgttatgtatatatttttttattattttaagttttatttatttttaatttgtagattggtttttagttacgagaatttttattttgtttgtttcgttttgttgagaagtgttttttggttttgatttttttatttagtgtttatttattttgtgttttagttttttagaggtttgttttttttgttgggaaataattaatttgaattaagatgttgatgagcggtgttaggatttgtttttaattagcggttatttgaaattagtagataagtaagggtgtagaatattttttagttttttcgtagttatattagatgtttttatttttggataaggtagtttttagtagtattatttttttatagttgtttaagttgaggaaggttttcgatagagatattattgaaaatgttatattgtgtttgaaatttgttgaaaatataatttattttatggattttaaaatatttttgagttagttagtgtaaaattagaggtaagttagttttattttatgaattagtttttggataatgggaaatatagtagcgttttgataattatatttgggggagtgggtgagagatgggggaataagtagaataattgttttagtgagtatttttagagggatttttatcggtagttagaggaattagaaattaagtttataaaaagttttatattttggttagcgtgaggttggatagaagtagggagatgatggtattagaatgggagagggttggagtggtgaatggaggggaggggttttagtattgaggttgattaagagagtttagaaggggttaaaggttgaggtgggtaataattgttattattattttttattaattttattattatattgtcgaagatgttgaagaaggaagttaaatttaaattaatcgggaggtataatagaaaagagtgagattttggtaattaagtatattaggttttaaatttttgttttgttatattttaattatgtttgttataagttagtgatttaagttattaatttttttttttttttttttttttttttgagatagagttttgttttgtcgtttagggtggaggttggagtgtagtggcgcgattttattttattgtaaattttattttttgggtttaagtgatttttttgttttagtttttcgagtagttgggattataggtattcgttattatgtttagttaagtttttatatttttagtagagatggagtttcgttatgttggttaggttggtttcgaatttttggttttaagtggtttgtttgttttggttttttaaaatgttgggattataggcgtgagtattcggtttaaggttttaatttttttaaagtaaaaggaggagattattattttttttttagggttgtttttaaaattgaaagtagggtatataaagggagattttttagttttaagtttataggtagtagttttagaagtgagttaaatattgattgttggtggaatttataattggtttataaaagttagttggaatttgttggaaaatgttagtgttgttaatttttttatgattttatgtttattttgagtttatttttagaagtagtagttttttatttttattttagtttgttttaatatagttttaaaataatttagttattcgagttttttagaatgatatataaggttttttatgttttggttttggtttattttataagtttttttattttttttttataattgtagtaggtttttaatacgttatgatatttaatagtttcgtatttttgtatatatgattttttttgtgttttttttttttaatatttggtagattttaatttatttttaaaaatatttagtatagttgggtgtagtggtttatgtttgtaattttggtacgttgggagattgaagtggggagattgtttgaggttaggagtttaagattagtttggttaatataaagaaattttgtttttaaaataaataaataaataaaatataatttagttgattattgatttatttttttatttttttaataaatatgtattagtttattatttgttaggaatttagtttttaatatagttgtagaagataagaaaatgatgtaaagtttttatggaatttttagatagagttgattattttttttttgtaagtattttgtatatatgtttattttatgttatatattatttgtttatgtttttgttttttttaagattgagttttttaagggtaaggtttaaattttaattattttttttttttttgttaggttttatgatatagtaagtatataagaaagtttgttgaaataaattgaattatgagtaaaagatatataaatgacgtagatttaaattttaaagtttatatatataggagaagtgtttaaaataattggtgtagataataaattggaagaagggatgtaaatgtgggttggagttaggaaggttttgtgaaggaattgtgagttttgtgttagattttaaagaatagataggtttggtaggggtgatgataaagtagtgggtaataagtaaattatgtgaaaggttattgagagttttaaatattgaaatagaaggttttgttggtttataggttaaattattagagaaatgttgggatgtattatagtaagggattttatatttagtaggtttatagtaggtaaaagagaatttttggttatttttgtaaggttttgagattttttgagtatttttattttttttttttgagtattattgtggatggaggtagataagataggttgtattgtcgttaatttatagatgaagaaatggagatgagagaagataaatgatttttttaattttttagagttaggatgagaagttatatttagtgaataattgattttttttattacgtttttttttttgttatatatttaatgttaggggttttagtttttatttttaagagagataaggtaaaagaataaggtgaggtattattagggtttttgtttttgagtatgaaagttttatatttttatatttaatatttataatataaaatatgagtttggtggtttggggataaatttttttgaggtgatttgttttatttttttttttgttttttaataaagtgatatagaggttagaggagtttttttttttttttttggagaattaaagatttttattgtagagaagtattagattgtgttattatatatttatttttgtaattgaaaaatatttatttttattttttgaacgattttgttttttagtcgaatatgagttgtttaggaggtattaaatatttgtttatttttttatatatttatttatttttttatttagagggagaaggtaaagtatgtattgtgttattttattttttttgtttttgaaattaaattagttgttttttaaatttttattaggaataatttttggtcggatggggtggtatatgtttgtaattttagtattttgggagattgaggtgggaggattatttgaggttaggagttcgagattagtttggttaatatggcgaaatttcgtttttattgaaaatataaaaaaaaaaaaaaaaaaatgttaggtatagtggagcgtgtttgtagtattagttatttggggggttgaggtaggataattatttgaatttgggaggtagaggttgtagtgagtagagattgtgttattgtattttagtttgggcgatagagtgagaattcgttttagaaaaaaaaaaaaaaaaaggaatgatttttatgtagttaaattttatgatatagtttttttaaatgattaatttattttagaaaagagaattatttagtttaataatttgataaattgttttttatttgtatatataaagaaagttgtataatttttttttgatattttaaagaataaaatagattttattttgatagagttagtaatgtatgggataagtatttatatattattaatgtattatattatattatattatttgtggtatagggtattttgttattttttagtgattattttttttttattttttttttttttttagtttttattttttttatttttattgttttttttttttttcgtgttttttttagttttggattttttaggatgtttagtagataaattttttatttttagattatatgttttttattttttttttttttttttaagagataaggttttgttatgttgtttaggttgattttaaatttttgggttaagttatttttttgttttagttttttgagtagttaggattatagatatatatttttatgtttggttgggattagatggtttttttgaattttttttagtaggtgatttttttttttggagaaattttttttttaaagtttgttttttttttttttttttttgttaatttttagagtagataatttatttataaagttagatttgagtggagaattaaaggaattatttgaataattaaaataagaatattaatatttttgaaaaggttatttaagatttaatgatgtttataattatttatttgttaaagtttatttaaatatttattttatattgttagcgttttagatatatatgtatattttattagtggatttatttaaaatatttatatatatggaataaatttaagaatataataatttttaaataggttttgattagaaaaaatattatttttaaggaatagaaaattagtttgaatataataattataaatttggtttttatttgatatatattttgtgaggagtttttgtaatagtggtatatttttaagataaagttttaagttttagttttaagaggtagtgtttatttatttaggtttataggttttgtgtgtatttatatgtatagggatgtttatatataggttatgtaagatagtggataaattatttttttgttagttttaataattaatttttattaatttttataataatgaaaagattgtaatgtggttttgatttttgagattttgattagtagaagtgatgatgaagattgtttttttaagttttttgtgagattaaattattagtgggtggtttaatgtatttgtgtgtacgtaattttattggtttgtagagattgtatagtagatgtttacgtgtatttaaaaaaaaaaagaatttttttaagggttatttttttgatattttattaatttgtttagatgagagtttagtggtggtgttttttggttggatgattttatggaatttgttatgggttgtagaagtgtggtgtataggttaatttttggtatgataaaggtttttattaggaatatttatttaatttttagttataggttatatttgtattttaatttttgtttttattatagttttttttaagagtaataaattttatgttgttaaatataatgaatatttttaatttttattttatttaaaagtatttggtattgttgattatatttttatgaatttttttttttattttaaaaattatttaattaattagttaattttagagatggggtattgttgtgttgttcgggttggttttaaatttttggtttgaagtgatttttttgttttaattttttgagtagttgggattagaggttttagttattatgtcgggttaaaattttttttttttgaaatgttaaaaaaaaatttttaatatatttgttttttattttattttttttgttaattttttttttaattttttttttggtattttttaagattttgttttgaatttttttttttttttttgttatttttttattttaaataagagttttatggtttttagtaatatttagatttttaattttagttttttaggtttatatatttaattgtttattttatatttttgtttggatgttttataggtattttaaatacgatatatatcgagattaagattttttgatttttttttttaaatttgttttatttttagttttttttattttagtaaagaatatttttttttatttatgttagagatttgggaattatttttgatatttttttttgtagattttttttttattcgtagttaatttatttttaaattttattgagtatgtttttaaaatatattttaaagttattatttttttttatttttatttttatttttgttgtattttttgttttttttcgtagttttttttatttttttattatttattaattagaatgatttttttatattagttttttttgtggggttgatgattatatagagggaaaataggtttttaaagtttttgtatgatttttttttgtataattttttaattttatttgattttgtttttatttttgttttttttatttttattatggtggttttttgtagttttaaatttgtttattttttgtagatattattttttttgtttaaatgtatttttttttttttttcggtttggttgttatttagttttaatattatttttttaaggagaattattttgattttttaattttaattagttttttttgtggtatttttttagagtatttttttaagttttttggttaatttgtatgtattttttaaaatatagtattataatttaaaaatatataattatttatttggttaatgtttggtttttttattagaatgaaagttttatataggtagggattttggcgaatttattgttgtatgtttagtatttagaatgaatttattatagaataatgatttaataaatagtggtttaatgatagtttaattaatgaattatgtttgttataagataattttaaaagaatgtggataggttattagcgtttgttagaaattaatttaatttgtgtttttaaatttggtttatatttgtgttaattgcgtaattgaatgagttgtggtgttatttattatgtttttattaatattagttaattttaattagtgtttagtatgggttgtaattttgtaatgtgttttattgggtttattttatttaatttttataataattatagatagtttagtatttttatttttattttataaatgaatagattgagtttttatttgtggtgaaattttaatttttaatttttattggtttttattgaagttagttagaatttagaaagtttaattttgttatgtttttattgtataatattgttttttataattttaatagatgtatagaatatttatttagaattattatatattgattaaattttgtatttagatgtggttgatggaagaattggaaaatattgtatttaaaggtagaggtttagaattattgattagtataaaaatgatttattttagaataaataagagagtattgtaagattgatggatataagttgaataaaggtaaattattatacgatatatattatatagtgtatagtttttttatatattaataataattatgtagtaaatgtaataaaaagaaagatattattggtaatagtaataaaagttataaagattagtagaaataaattttttttgttttttatttttaagagataaggtttggttttgttattaaggttggagtatagtggtttaattatagtttttcgaaattttgaatttttgggtttaagtgatttttttgttttagttttttaagtagtttagattataggtatatgttattatatttggttaatttaatttatttatttgttttgagatggagttttattttgttgtttaggttggggtgtagtggttcgattttagtttattgtaatttttgttttttgggtttaagcgatttttttgttttagttttttgagtagttgggattataggtacgtattattacgtttggttaatttttgtatttttagtagaaatgggggttttattatgttggttaggttggttttgaatttttgatttcgtgatttgttcgttttagttttttaaagtgttgggattataggagtaaattttttaattttaattttattttgtagagatgggttttttttatgttgtttaggttggtttttaatttttggttttaagttattttgttatttcgattttttaaagtgttgggattataggcgtaagttattgtgtttagttggagtaaattttatttaaagatatataatgatgaattttatagagataattagaaaatattattaaaggataaaaataaaatttaagaaaaatatagtcgggtgcggtggtttacgtttgtaattttagtatgttggtaggtcgaggtgggtagattacgagattaggagatcgagattattttggttaatacggtgaaatttagtttttattaaaaaatataaaaaattagtcgggcgtggtggtggtaggcgtttgtagttttagttaagtaggaggttgaggtaggagaatggcgtgaattcgggaggcggagtttgtagtgagtcgagatcgtatttttttattttagtttgggcgatagagcgagatttcgttttaaaaataaaaaaaaaaaaagaaaaagaaaaaaagaaaaatatgaagttataaatttttatgagtgtgaaagtttaatattatatagatgttttttttaaattaatttattatataaatgttattataatgaaaaagtttttttttttttttttttatagaattggataaatttggtttaaaatttgtatggaagaataaagggttaagaaaagttaagacgttaagataatttttgaaattgatgtataataattgtatatatttatgggatatatgtgatattttgatatatgtatataatgtgtaatgattaaattagggtaataatgatatttattattttaaatatttattatttttttgttttgggaatattttaaatttttttttttagttattttgaattatataataatttattgttaattatagttattttattgtgttatgaaatattagaatttattttttttatttaattgtacgtttgtatttattaattaatagttttttatttttattttttgttattttttttagtttgtgggtagttatttttttattttttttttttatgagatttatttttttggtttttacgtattagtgagaatatgtaatatttgttgataattttgaagaagaaaaaatggggaaatattttgtagatataaagatttattattaagttatagtaattatggtagttatatgtttgtgttgtgggaaataaatatattaatggaataggatagaaagtttagaaatatgtattgaaatttgatatataatagaggttacgtggtattagagaaaagatggattatttaataaatggtgttgagataattggttatttatgtagaataaataaaatttagatttttattttatagtaattatatatatatttttttaattgattaaaggtttaaatagaaaaggtaaaattttaaatttttagaagaaaaagtatgttgttataattttggaataaaagtatttttttaataagttatataaatgtgtatattataaaggaaacgattgataaatttatttttattaaaattaaaatatggaagatattataataaaagtgaagataagttttagattgaataaggtatttgtttagttaagttttagaaaagattaatatttagaagatattaagaatttttataaattaataaataaaaggtaaaatttatagaaaatttgaagtgttaattaatatatgaaaatatgtttaagtttattagtaattagggaaaagtaagtataattatatatattttatatttattattagtagggttgtaattagttttagtggagtatgaa

SEQ ID NO: 589 - DNA, 11555 bp, Artificial Sequence
  chemically treated genomic DNA (Homo sapiens)
tgtttagtttgatgtttatatggtgagagttagttaggttgtttttgtttgtgagaggtgaaagttttaagtagataaggtgttgaagatacgatagaaattaggattgatattaggtgttaaaagatagttttgtattggtcgggtgcggtggtttacgtttgtaattttagtattttgggaggtcgaggtaggtagataatgaggttaggagatcgagattattttgattaatacggtgaaatttcgtttttattaaaaatataaaaaaattagttggatatggtggcgggtatttgtagttttggttattcgggaggttgaggtaggagaatggcgtgaatttaggaggcggagtttgtagtgagtcgagatagttttattgtattttagttcgggtgatagagtaagattttattttaataataaaaaaatttttaaataagtaaatagataaaaagatagttttgtattaaggtatttataggggttataggtatttaggtatttgttatgttttttttttttttttttatggtgtaaatatattacgtttgtattagtaataaaaagtaacgagaataattaataataaataatagattagaaaattaaatgtgtgaggttttttttagaatttgggtatagggatttttttttattttgtagaagtaattagtattttagagaatgaatgtttatttttaattttatttgatttgtagtgtttatatttgttatttatattgtatttataattttaaatgttagattagtgtttgtaattttagtattttgggaggttaaggtaggagtattttttgaggttaggagtgtgagattagtttgggtaatatagtgagatttttatttttataaaatatttttaaaaattagttaggtatcgtggtatatgtttgtatttttagttatttaggaggttgaggtggtaggattatttgaggttaggagttgaggttgtagtgagttatgattgtgttattgtattttagtttgggtggtaaagtgggattttgtttttattaaaaaaaaattaaattttagtttatatttttttttttttaggaagttttttataaacgttttagttatatatatgtgtatatgtttttgaatattaattgtagtggatacggtggagtgttatttagatttttttgtaggattatagtttttatttttaattattgggagtgttggtaattgatagtttttggtaattgtttattgttgaggagagatgttttttttaaggtttcgttgttttttttgggatagtagaagtttgtgatatttatgagaggggattaaaggttttattttgttgtttttatttaggtaattggtagggtgttttgtggggttatttgatgttttttttgtgatttttttttttggtttgttttgtttttttatttttttgtatattttgattttgagagtatttttttgtatattttttgtaggttgattttttttttagagtttatttttagggatttgtattagtttgttttggttgttatgataaaattttatagattgggtggattgaataatagaaatttgtttttttatagttttggaggttgggacgttttagattaaggtgttaatagggttgattttgtttaaggtttttttttatggttagtagatggtcgtttttttgttgtatttttatttggtttttttttttgtgcgcgtatttttgatgtttttttttatgtttaaagttttttttataaggattttagttagattgggttagggtttattttaagcgttttattttaatataattaattttttaaaggttttgtattttaatatagttatattttgaggtattgggggttaggattttaatatatatattttgtgggttgggggaagagtatagtgtagattgtaataggatttaatatgtagtatttatggtatttttggggtgttttatttttttattatttgttaatttggtagtttatgttagtaggtgttttttaagtgggaaggggttttttttttagttgtattaatagaatttttgatttagtttagtaaatatttgttgaatacgtattgtttataaattagagttaagagttgggaaagaataagatagtatggtttttatttgtttattttaagaataagaggaggaatgagtaagatatgttgtaatttttgtgatgtttatattttagtgaaaaaaagagatttttaaataggtgttttttgtagtattggggtgtgttttagtgttgtaggattttgaggagggtgggtgatggtttaggtaggaggatatgggtggattttaagataggaggattttaggtaagatttattttgaaggatgtatagggattggaaaagtagagggaagggaagtgaatagaagagttttttaaattttttttttattaaagtagggataataattagataagattaagtatgttttaggtagtatggttatagatagggataataattaaaagttttcgagggttgttttgaggataaatgagatagtatatttaaaaaatttagtaaattattaaattttttataagtatatgatgttattattagtagtagggagtggggggagaagaagagagcgatggttaggatgggggtagtaagtgtgttttatacgttttaggtttttgatattgttttgtatagtgttttatgtttagtaggtttaataaatgtcgattgagtaaatgaatgttagaagtagttttaggtatttgattaatatatatatgtaggtttttcgttgtgggttttaaatgggaagagggtttagttggttttgtagaatatagtattaatatgatatatgttttattattttagaataggaagatttgttgcgtggtggtattttatgttattttatatggaattaggtattttgttttttttcgaggttttagagtgatggtggttggtaggatatgatttatatttttttattaaagttggaagagtgggtgtgttagatagggatgagagtgtagagattgggtagatttttttttattattttttttgatttattgttggaggtgtgttttgtttattgattggatatggtattatatttattttaaatggtattaattggtggtttttaatttgtagtagtaaagtatttggaagttatgtgttttgtatgaaacgttttggaatgttgataagtttaattttattttgtaaaagaggaagatttttgttagttgaaaagttaattatattatttatgtattatgttttagttataattaaaatttcggttgttaagtttattaatttttgatgttttttaagtttgtttttgagtttttttggttttttttttttgtgaatatgcgatattagttttttagagttttacgtagaaattttagtattatttttaattttttatttttttgtttgttttatatttatttttgttttatatttatttaaggattaaggattatgaaattgatttgtagtttagtttttaattttgaataggtttttttattttcgtttttattattttcgtttagatgattataatttttaatttaaattatagttaaaatattatttttttttgagtttttttttatattatatattttttagaatattagtttaatagggttatgtttttgggtttaattttttagggattttttagttgataagatataatttggtttgtaaatgtttttgtagtttaattatttttaatattattgttatattttatatttttggttaaatagaattgtttgttgtttgatgatttgatattatgttatattgtttgtttggaatatttttttattttttttatttagtaggttaagttttttttttattttattttagatgatatttattttaggaagttttttttttttgtgggatgagatgtttattttgtagggtttttattttttgtattttgttaaattttattattttttatttggatttttgttatagttttttagttggtgtttcgtttttattttgggtttttttttttcgttttttatagtgttgttagaattatttatttaaaaggcgaattcgattatgtggtttttgttgtttttaggattatgtataaatttttagtatgatttttaaggttttttatgattttgtttattgtaatttttttagatttaatttttgttaggtttttttgtattagttatttagaatttttttgaggttttttatttgttgtttatttttttatttttgtgttttgtatatattgtttttaatgtttagattttttgttgatttttagttttttatttggttaatttttatatattttttagttgtttgtttgttgaatattattttttttagaaagttttttttgaatatttgaattaggttatgtatttttttttttgttttattttttattttttattatttttagatgtaattgtttgattaattggttgttgttttttttagaatgtgagttatagaattatgtatattttgtttttgtttatatttttagaattatatagaataatgtttaataaatatttatagaattaagaatgaatgaatatttatttttgtttcgatgattagaaggtagtaagtttggttaattgaagtgtgtggtgtatgggtcgtgtttaagaagtgtttgttgaatgaataaataaatgatggattagttttgtttaagtttattttattatgtatttttaaaaaattgtgtttgtttatttgttttattagttgtaaaaatttgttagtaaaagagtggtagaaggtttaatatttttagaaaatttttagtcgtaaattttaaaatttcgagttggaaaatttttattattaaatgttaggagttggttttttttttggagatttttgtaagaggtttttttattgatattttgtgtttattttttttggttagagtttggttatttagtggttttatcgttttgatggatttattgaatttgttttggtatgatgatgatttggagaggtagaattggagtcggttttttaacgggttagacgggaaggcggatagattttattataattattatgttatattgtttattttgtttatcgttgttatcgttttcggtaacgtgttggtgtgtatggttgtgtttcgcgagaaggcgttgtagattattattaattatttgatcgttagtttcgtagtggtcgattttttcgtcgttatattggttatgttttgggttgtttatttggaggtaggtgggttttttgtttgttttagtattttttttagtagggttttgtattggatattggggattttagttttttattggtttttattaatgagttttttggtgtttttttaggtggttttttttttattttgggtttattttttttttttacgaaatgggtagattgtttttttaataattttaattattatttgtaaagtgtttattaagtgttgggttttacgtagggattttaaatatagtatttttttatataatttttatagtagtttagaggttggtattattgttattattttgtagttgataaattaggtggttagagatgttaagtaattgttgtagtattatacggttggtaagtttaagttggaattttggttttagagttagttttttaggttatattggaaataggagtaatcggtaaggatttttaaggaggggtatgtttatgtttttaggtttttgaaatttttatttttatttttttattttagaaatgggtttgttgttttatgttttttatatttttttttttttttatagtttattttggggttttgtttaggatttgtaggtagaggttgttatggattgtgttgtagtttttttgttaggaagaattgtgtagttatttattttttggtttagttttgtattttaaaatggggagtaggtagtatagtttagatattgtgtttggtgtattgttgatatagatttagtgaatatttttggtaattttgggagtttatgttattttttttattttataaaataggaaataggtcgagtacggtggtttacgtttgtaattttagtattttgggaggtcgaggtaggtagattacgaggttaggagtttaagattagtttggttaatatggtgaaattttatttttattaaaaatgtaataattagttaggtgtggtggtatatgtttgtaattttagatatttgggaggttgaggtaggagaattgtttgaatttgggaggtagaggttgtagtgagttgagattatattattgtattttagtttgggcgatagagtaagattttgttttaaaaaaaaaataaaattaaattaaaataaaaataaaataggaaatagaagttttggagaagttgtttttttttatttaggttatagggagaaatgttgatggagaaattttaaagtagatattattttttaggaagatatttttagagttagcgagtagatgtgggagtatttagggattatcggtgggtataagttggattttgtttttttttttgtttagttttttaggatggtatgtttaggatttaagtaatttgggagtttaggtgtatgggaaggtatgggattaggtatttaggaaagtgtcggtgttttgtttattgaatcgttattttttttttttgagtaggagaggaattgattagtgtttttgaggttatttttgtttgagagggaaggggttgttgaaagaaaatgagaaagttttgtaggtttaaataggggagaaatttagatgaggacgtttaggtgaggaggcgagattggtggaaagtggtatatttttttgtttttgggtttttaaggggttcgtgcgtttattgtttttattattatttcgggtttaagggagttttgatttattattttttggttttttttattatagttaatgtaggttgtaatttttaaaatgatttgattggatattaaggaagaattaaaaggaaatataaatataaaattatataaaaatatttagttgatataggttaggagtttaattttttttggatttatgtttatgagggsttttagattttgtttatgtttttttaatttttacgtttgattttttttttttttttttttttaaaggagggttttaggttttagattatagggraaaatggtagagtaaataaattttttgtgttttagtttttttatttggaaaatgtagataataatagtattatatattatagtattgttgaggatcgaattagttgatgtatgaaaagtgattagaatgatatatggtttatagtgagtattgtgtaaatgttagttatggcgatgatgataaagatgaagatgataatagatatttagtattgttttatatagggaggattttgttttttttatttatcgtttttttgggataaagaggaaggagagagtattttttatgttcgttttaggtaagtaggtattttttttttagaggaacgtgtgttttatttagggttttgggtatggtttttgttagtttttagattttttgtttttatttaggtatttgggtagggataaatttatatatgggttatagggggtttttaggaatttgtaagtttttcgaatagattttttaaatatgtttgtttattttattttaaaggtgaagttgagtgtgttaggggaggagggtgtagaagttatttttagagggtagggsttagatttttttatagtattttattaaattagagttgggtattgagttttgtttaatggatattattttagcgatttgttgtttttagagaacgttttaggtgacgttttattttgttttgatgttttattagcgtatttttataattacgtattgttttttttttaatatatgtttttgttatttagattttttttttttgttttatttttagtaatgttatgttaatatttgtttggtttaggattaagtgtgcgttatttattttgttaagtgtatgaaaagtacgttggttttggagtgagaggattaggtttaatttttagttttatttttttttatttagatgttattggaagagtttttgatgtttatatgtgttattttatgttagttttataattttttaaggagcggttttttgtgtgtatttattttttagatgaggagattgagaagatgaataaatattttagagttatttatttatttagttagtattgattgagtatttcgaggttttattttaatttttgtgtaatgggttaaggtattgatttgttggggatgtagaggttgatagggtttttatagtgtagtttgttgtcggtgatagtggagtagtttttataggaggtgtggggtataaggtttagtatgagggtgttagggaagatttttagggagaaatgatgttttcggaaaaattatgtaggagagggagggagatatttgtatttttaagaaagttatttagtagggagagggagtagttgbttggaggtatggaggagaggtggttatgttatttgtttttgaggtttattgtttgtattttaagatataagtattaagtgtttggaatagtgtttgatatatggtaagtttttagtattattatagttattaggatttagttgagttagtttagggtttgtattgtaggttttagttttatgtgagtaagagtattaaggaatgatgtttggatgtttgggggtgtgaagaaaagagttttgggttcgattagggaatttggggttatttttttttttgttattaaattattaagtgattttgttttgtttttttttttgattttttttagttttgtttatttttgaaataattattttttttttttatattttatgtttattaagtatttgttatttaattatttttttttttgataagttagatggtyttttttagggtagtttagtagagagtatgggatgtgatgttttagattttagttttgttgtatatttgttaggtgaatttggttacgttatatggtttttttgggttttagtttttttatttatgagtgggataagtaagttttttttgtaaaagttttaagaataatatatgagataaagtgtaatgtttatagtagatgttttatggatagtggttattaatgtatttttttgagtttttaagttagtagttttaattattttttaaggtagttttttttgggattatagaggaaatttttttgttattttgggttttagataggttagtgtaaggagagatttaagatgtttatgaaggtaggattgtgtttgaattgtttataattgtgtttaggagtttaggatagaggttggaatatagtaatttgtttaataagtgtttgtaggaaagaagggatggtagaaaggagggaaggagaggaggaagatagggaggaaggttttgatattttaatttagatttttagtggtttttaagtattggttttaggaggggttttaaagtgggatgtaaattaggtagtgttggttttttgtttagtggtattttaaaggtatattttgtttatgttaggaaagttttttacgtatttttttgtttttattcgtaaaatgggtatttagttgttagtttttgttaatttggttagcgtagtagtatagggagttgggagagaggttttggtacggggtttttatgtgagtttttaggaagatagtgtcgtatgagaggtttgttgtgttttggggtaagttgttgtttttgttatataggatgatagtagttgtattgtttattattgagtttaaatgttagtatttggttggatgtttaggagtagaagagagggtagtgattagaatgagtaaggttataattagttttgttgttaagttatacggtgatacgaagtttgttttatttcgggttgcgggagggggtttttacgtttttttttgtttttattggtagaagttaaaggtgtatttttttgttttgattttatttttagggaattggggttgttttaagtttttagagcgttagggatagttgtcgtgagtgtgtgtttgcgtaatttgttatgagtgtgtgtttgtgtgtgaatgggtgttacgtggggaggggggagggcggtgcgtttatgtgtgtgtgtgtgtgtgtgtgtgtgtgtgtgtttgtgtgtatgtgtgtatgagaaacgtgtttttgttaggagttagattttttattttttattttattaaggatatagtttattatagtaattttttcgtttattttagtttattcgggcgtttttcgagtattagtttagatttgttttttttcgttttttgggtataagaaggagtagaaattttttttttgttttatggcgagtttttatttttattattatttttaatagattattttggggtttcgattttgttatgtattgggttaattattgaagggtttgtttggtttagttagagtttgggttagagtaggattaggaattgagtttataggttttggggaaattattgtattttttggaggtttggtttttttattggtttttagtttttttacgggtattttaaaattttatttggaatttaatttatagaggtatggttgagtgataatatagggaagttagtgttattgggaagagtttaacgtgatatataatgtttttagaaattagatgtttagttcgttatgtggggtgtagggggaagtagtaggtttgggttaagagttagaattaggggtgagggaaagtttaggttatagttttgttggggtttttataggaagtgtaaggtagggtagattaagtaatttagggttggttagttttaatattttggtaggttttgggttataggggtgatttttagttgtttttttggtatttgagataatttgggataggggaaatattgttttggtgtgtgtgtgaattagagaaacggggtggttggtttgtatttgagaggtatttttttaagttagttattttttgtttttaggaattaattagttttgggacggtaagtttttttttgggtttgtgaggtttttaagtgttagaatattaggattagagaagatagaaaaatatagttaatataggtgtttttgtgatgaatgggtgttaaatatataaatatagaatttaagaaaatatatggggttaataaaggttgtagagattaaggtttaaagttgaggtttttcgtataagttggttgttttttttttagtatagtaattggtaataagtggttttatgtatttgggagaagataagtgagggstaagggttttagatatttatgggtattattttttatattttagttggatgtttataagatttgtagttgttttttgagtttgtggttttatcggttttaggagtattaggttataggatttaagttaattttttatttttgttgtttatttattatgttgttttgtttttagg

SEQ ID NO: 590 - DNA, 11555 bp, Artificial Sequence
  chemically treated genomic DNA (Homo sapiens)
tttggggataaagtaatataatggatggatagtaggagtgggagattagtttaggttttgtagtttggtatttttggagtcgatgaggttatagatttaggaggtagttgtaagttttgtgggtatttagttggggtgtggggagtgatgtttatgggtgtttgaggtttttgstttttatttatttttttttagatatataagattatttattgttaattattgtgttagaagaaagatagttaatttatacggagggttttaattttaaattttaatttttgtaatttttgttaattttatgtgtttttttagattttgtatttgtgtatttggtatttatttattatagagatatttatattgattatatttttttattttttttgattttgatattttggtatttgggagttttatagatttagagagagatttatcgttttagagttagttaatttttgaagatagaaaatgattgatttggaaggatgttttttaaatgtaagttagttatttcgtttttttaatttatatatatattaagataatattttttttgttttaaattattttaggtattagagagataattagagattatttttgtagtttaaagtttgttaggatgttgagattagttaattttaggttgtttaatttgttttgttttgtattttttgtgggagttttaatagggttgtagtttgggtttttttttatttttgattttgatttttgatttaagtttgttgtttttttttgtattttatatggcgggttgagtatttggtttttagggatattgtgtattacgttaaattttttttaatggtattggtttttttgtgttattatttagttatatttttgtaaattagattttaggtaaaattttagaatgttcgtgaggaaattgagaattaatgaggaaattaagtttttaaaaagtgtagtgatttttttaaggtttgtgggtttagtttttagttttgttttggtttaggttttggttgagttaggtaagttttttagtggttggtttagtatatggtagagtcggggttttaaaatgatttgttaagaataatggtgaagatgaagattcgttatgaaatagagaagaaatttttgtttttttttatatttagagaacgaaagaaggtagatttgggttagtgttcgaggaacgttcgagtgggttggggtaggcggaggggttgttgtgatgagttgtgtttttggtaggatgggaaatgaagagtttagtttttggtaggagtacgttttttatatatatatgtatataggtatatatatatatatatatatatatatatatatgaacgtatcgtttttttttttttttacgtaatatttatttatatataggtatatatttatggtagattacgtaggtatatatttacggtagttgtttttagcgttttggaagtttggagtagttttagttttttgaggatggagttaggatagggagatgtatttttggtttttattaataggagtagagaggagcgtgaaagttttttttcgtaattcggagtagggtagatttcgtgttatcgtgtagtttggtagtagggttaattataattttgtttattttgattattgtttttttttttgtttttaggtatttaattaaatgttggtatttaagtttaatgatgggtaatgtagttgttgttattttgtgtggtagaaatagtagtttgttttagaatatagtaagttttttatgcggtattgtttttttgggagtttatatgggggtttcgtattagggttttttttttagttttttgtgttgttgcgttgattaggttggtaggagttaatagttggatgtttattttgcgggtggaggtaggagggtacgtaaagggtttttttggtataaatagagtgtgtttttagggtattattgggtagaaaattagtattatttgatttatattttattttgaagttttttttgggattagtatttgggagttattggggatttaggttgagatattagggtttttttttttgtttttttttttttttttttttttttttgttatttttttttttttataaatatttattgagtaaattattgtgttttagtttttattttaggtttttggatatagttgtgagtaatttagatatagttttgtttttatggatattttaaatttttttttgtattggtttatttggagtttagaataataaagagattttttttgtggttttaggggaagttgttttggagagtagttagggttgttaatttaaagatttaagaaaatgtattggtggttattgtttataagatatttattgtgggtattgtattttattttatgtattgtttttaaaatttttataagaagggtttgtttattttatttataggtgagggaattgaagtttagagaggttatgtaacgtggttaagtttatttggtaggtgtgtagtagagttggaatttgaaatattatattttatgttttttattaagttgttttggaaggrattatttagtttattaagagaggagataattaggtgataagtatttggtaagtatgaaatgtgaaaaggaaagatgattattttaagggtggataaaattagggagggttagagaagaaaatagaataagattatttggtgatttagtagtagaggaaggagtggttttaggttttttagtcgaatttaaggtttttttttttatatttttaggtatttaggtattattttttaatgtttttgtttatataaagttgagatttgtagtataggttttgagttggtttagttaagttttaataattgtaataatattaaggatttattatgtgttaggtattgttttaaatatttgatgtttatattttagaatgtagatagtaagttttagaggtaaatgatataattattttttttttatatttttagvtagttattttttttttttgttgggtggtttttttgagaatgtaagtgttttttttttttttttgtataattttttcgaaagtattatttttttttgaaagttttttttgatatttttatgttgggttttatgttttatattttttatggggattgttttattgttatcggtagtagattgtattgtaggggttttgttaatttttgtatttttagtaggttagtgttttagtttattgtataaggattggggtaagatttcggagtgtttagttagtgttgattgagtgaatgaataattttgagatatttgtttatttttttaatttttttatttagaaaataaatgtatataggaagtcgttttttaaagggttgtgaggttgatatggaatggtatatgtggatattaggaatttttttaatagtatttagatggaaaggaatggagttgggaattgaatttggtttttttattttaaaattagcgtgttttttatatatttagtaagataaataacgtatatttagttttaagttagatagatgttggtatggtattgttggaaatggaataggaggaaaaaatttggatgataagagtatgtattagagaggggatagtgcgtggttgtgagggtgcgttgataggatattagggtagggtgagacgttatttgggacgttttttagggataataaatcgttgagataatgtttattaaataaggtttagtgtttagttttagtttgatgagatgttgtggggaagtttgasttttgttttttgagaatggtttttgtattttttttttttgatatatttagttttatttttaaaataaggtgaataagtatgtttaaaggatttgttcgaaagatttatagatttttgggaattttttatagtttatgtatggatttgtttttatttaagtgtttgggtagggatagggggtttggaagttaatagaagttatgtttagagttttgggtagaatatacgtttttttgggaagagggtatttatttgtttggggcgaatatagggagtatttttttttttttttttattttaagggggcggtgaataggaaagatagagttttttttatgtggagtagtgttggatgtttattgttatttttatttttattattatcgttatggttgatatttatatagtgtttattgtgagttatgtattattttaattattttttatatattaattaattcgatttttaataatgttatgatgtatgatattattattatttgtattttttagatgaggaaattgaggtatagagagtttgtttgttttattattttyttttatggtttgagatttaggatttttttttggaagagggaagaaggaggggattaagcgtaagaattaagaaggtatggatagagtttagggstttttataaatatggatttagggggaattggatttttggtttgtgttaattgaatatttttatgtggttttgtatttgtgtttttttttggtttttttttaatatttagttaggttattttggaagttgtagtttgtattggttgtagtaaaggaagttaaggggtgatggattagagtttttttgggttcggggtggtggtgagaatagtaagcgtacgagttttttgggggtttagggatagggaggtgtgttattttttattagtttcgtttttttatttgagcgtttttatttagattttttttttgtttaaatttataaagtttttttatttttttttaataatttttttttttttaggtagggatggttttagaggtattggttaattttttttttgtttagggaaggaaggtaacggtttagtgggtagagtatcggtatttttttaaatgtttgattttatgtttttttatgtatttagatttttagattgtttgagttttggatatgttattttagaaagttgggtagagaaaggggtaggatttagtttgtgtttatcgatgatttttaaatgtttttatatttgttcgttggttttgaaggtgtttttttggagaataatatttgttttgggatttttttattagtatttttttttgtgatttgggtgaagaaaggtaatttttttaaagtttttattttttattttgtttttgttttaatttaattttattttttttttgagatagagttttgttttgtcgtttaggttggagtgtaatggtatgattttagtttattgtaatttttgttttttagatttaagtaatttttttgttttagttttttaagtatttgggattataggtatatgttattatatttggttaattgttgtatttttaatagagatggggttttattatgttggttaggttggttttgaatttttggtttcgtgatttgtttgtttcggttttttaaagtgttaggattataggcgtgagttatcgtgttcggtttgttttttattttgtaaagtgagaagagtagtatggatttttagggttattaagagtatttattgggtttgtgttagtaatgtattaggtatagtgtttagattgtgttgtttattttttattttgaggtgtagagttgggttaagaaatgagtgattatataattttttttaataaaagggttatagtatagtttatggtagtttttatttgtaggttttggatagggttttaggataagttgtgggaaggagaggggatatggggagtataaagtagtagatttatttttgaagtggggagatgggagtgaaggttttaggggtttgggagtataaatatgtttttttttggggatttttgtcggttatttttatttttaatatgatttaaggaattaattttgaggttagaattttagtttggatttgttagtcgtgtgatgttgtagtagttatttaatatttttgattatttggtttattaattgtaaaatggtggtaataatgttagtttttaagttgttgtgagggttatataggaaaatgttatatttaaagtttttacgtgaggtttagtatttagtaagtattttataaatggtagttgggattattaaggaaataatttatttatttcgtaaggagaaaaagtaagtttagagtgaaggaaaaattatttggggaagtattaggaaatttattggtaaaagttagtggggagttagagtttttagtgtttagtgtagggttttgttggagaaagtgttggagtaagtagggggtttatttatttttaggtagataatttagggtatgattagtgtggcgacgaggaggtcggttattgcgaggttgacgattaggtagttggtggtggtttgtagcgttttttcgcgggatatagttatgtatattagtacgttgtcgaagacgatgatagcgatgagtagggtgagtagtgtggtatagtagttgtagtggggtttgttcgttttttcgtttgattcgttgaagggtcggttttagttttgtttttttagattattattatattaggatagatttagtggatttattagggcggtggagttattgggtggttaggttttggttaggaaaaatggatataaggtgttagtgagagggttttttgtagaggtttttaggaagaagattaatttttggtatttaataatgagaattttttaattcgggattttaaggtttacggttaagaattttttaaaaatgttgggttttttgttatttttttgttagtaagtttttatagttggtaggataaatgagtaaatataattttttaaaaatgtataataagatgagtttgaatagagttgatttattatttatttatttatttaataaatattttttaagtacgatttatgtattatatattttagttaattaggtttgttattttttagttatcgaaatagaaatgggtatttatttatttttgattttataaatatttattaagtattgttttatatagttttagaaatataggtaggaataaaatatatatggttttgtagtttatattttaggagaaataatagttaattaattaagtaattatatttaagggtgatagggagtaggaaatggaatagggagagagatatataatttagtttaggtatttagggaaggttttttagaggaagtgatgtttaatagatagataattgaaggatgtgtaggaattagttaggtaaagaattaggagttagtagaaggtttagatattggaagtagtatatgtaaagtatagaggtagagaggtagatagtaggtggagggttttaaagagattttggatagttgatgtagagggatttggtaagggttgagtttggggaggttgtaataggtaagattatagagggttttaaaagttatgttaggagtttatatatgattttaagggtagtaggaattatatgatcggattcgttttttgaataggtgattttgatagtattgtggagaacggagaggaggggtttagagtggaagcgggatattaattgggaggttgtagtaggaatttaggtaagagatgatgaggtttggtaggatgtagggagtgaaagttttgtagaatgggtattttattttatagaagggaaagattttttgaagtgggtattatttgggatgaagtagaaggaggatttagtttgttaaatgagaggggtggggggatgttttagatagataatatgatatggtattaaattattaaatagtaaataattttgtttggttaaaaatgtagggtatggtagtaatgttgaggataattaaattgtagggatatttataggttagattgtgttttgttagttggagagtttttgagaggttgggtttagagatatgattttattggattggtgttttagaaagtgtatggtgtagaagagagtttagaggagagtgatgttttggttgtaatttaggttagaaattgtggttatttgaacgaagatagtggaaacgaggatggagagatttgtttagaattaggagttaaattgtaagttaattttatggtttttggtttttggataggtgtggggtaaaagtgggtatgggataagtagggagataaggagttgagggtaatgttaggatttttgcgtggggttttgggaggttggtgtcgtatatttatagagaaaagggattagaggggtttaggagtagatttgggaggtattaggagttgatgaatttgatagtcggagttttggttgtgattgaagtataatgtatggataatatagttggttttttagttaataaaagttttttttttttatagaatagaattaaatttattagtattttaaggcgttttatataaagtatatgatttttaggtattttgttattgtaaattgaaaattattaattgatgttatttgggatgaatgtggtgttatgtttaattaatgaatagggtatatttttagtaatgggttagagaggatggtggaagagggtttgtttaatttttatatttttatttttgtttgatatatttatttttttagttttagtagaagaatatggattatgttttattaattattattattttggagtttcggggaaaagtaaagtgtttaattttatgtggggtgatatggaatgttattacgtagtaaatttttttgttttaaggtaatgaagtatatgttatattgatgttgtattttgtaaaattaattgagttttttttttatttggagtttatagcgggaggtttgtatgtatgtattgattaggtgtttggggttgtttttgatatttatttatttaatcggtatttattgaatttgttgggtataaagtattgtgtaaagtagtgttaggggtttgaggcgtgtgaggtatatttattgtttttattttgattatcgttttttttttttttttttattttttgttgttgatgatagtattatatatttgtaaagggtttgatagtttgttaagttttttggatatattgttttatttatttttaaaataattttcggaggtttttaattattatttttgtttatggttatattatttggaatatgtttgattttgtttaattattatttttattttaataagaaagggatttggaaaatttttttgtttattttttttttttttgtttttttagtttttatgtattttttaaagtgagttttgtttagaatttttttgttttagaatttatttatatttttttgtttgagttattatttattttttttagggttttgtagtattgaaatatattttagtgttgtaggagatatttgtttaggagttttttttttttattggggtgtagatattataagagttataatatgttttgtttatttttttttttgtttttggaatgaataaataaaaattatattattttgtttttttttaatttttgattttggtttgtgggtagtacgtatttaatagatgtttgttgaattgaattaaaggttttgttagtgtaattgggaagaaaatttttttttatttgaaaggtatttgttaatataggttattagattaataagtgatgaaaaagtaaggtattttaagggtgttataggtgttgtatgttgggttttgttatagtttgtattatgttttttttttaatttataaaatgtatatgttgaagttttaatttttagtattttagaatgtgattgtattaggatatagggtttttaaagagttgattatgttaaaatgagacgtttagggtgggttttaatttaatttgattggagtttttataagaggagttttggatataaaaagagatattagggatgcgcgtataagaggagagattaagtgggaatgtagtaagaaggcggttatttgttagttatggagagaggttttaagtaaaattagttttgttgatattttgatttgggacgttttagtttttagaattatgaggaaatagatttttgttgtttaatttatttaatttgtggaattttgttatagtagttagagtagattaatataggtttttagaagtagattttgaagaggaaattagtttgtaggaaatgtataggggaatgtttttaggattaagatgtgtaaagaagtgaggaagtaggataggttagagggagaagttataagaaaggtattaggtgattttatagggtattttgttagttgtttaaatgagggtaatagggtagggtttttaatttttttttatagatgttataagtttttgttgttttagggaaagtagcgaggttttgaaagaggtatttttttttagtagtgggtaattgttaaaaattgttagttgttaatatttttagtagttggggatgagggttgtggttttgtagggggatttgggtggtattttatcgtgtttattatagttgatgtttaggagtatatgtatatgtgtgtggttggggcgtttgtggagaattttttggaggagggaggatgtaaattgggatttaatttttttttaatagagatagaattttattttgttatttaggttggagtgtagtggtataattatagtttattgtagttttaatttttggttttaagtgattttattattttagttttttgagtagttggaaatataggtatgtgttacgatgtttggttaatttttaaaaatgttttgtagagatgggggttttattatgttgtttaggttggttttatatttttggttttaagagatatttttgttttggttttttaaagtgttgggattataggtattagtttagtatttaaaattatgagtataatgtagatggtaaatgtgagtattgtaggttaggtggggttgagggtgagtatttattttttggagtgttggttatttttgtagggtaagggagagtttttgtatttaagttttgagaaaggttttatatatttgattttttaatttattatttattattggttgttttcgttgttttttgttgttaatataaacgtagtatatttatattataggaaaaaaaagggaaaatatggtaaatgtttaaatatttgtaatttttataagtattttggtatagggttatttttttgtttgtttgtttgtttgggggtttttttgttattgagatggagttttgttttgttattcgggttggagtgtagtggggttatttcggtttattgtaagtttcgttttttggatttacgttatttttttgttttagtttttcgagtagttaggattataggtgttcgttattatgtttagttaatttttttgtatttttagtagagacggggttttatcgtgttagttaggatggtttcgattttttgattttattatttgtttgtttcggttttttagagtgttgggattataggcgtgagttatcgtattcggttagtatagggttattttttaatatttggtgttagttttggtttttatcgtgtttttagtattttatttatttggggtttttattttttataagtaggggtagtttagttggtttttattatgtaaatattaagttgagta

SEQ ID NO: 591 - DNA, 16373 bp, Artificial Sequence
  chemically treated genomic DNA (Homo sapiens)
attatttattggtttgtgattttagtaagatatttaatttttttgtgatttattttttttatttagaaaatttgataggataatagtgtttattttttttattaggttgttgtgaggttgaatgatgataatgtttataaattttagttataattattaattttattaggtaatatagtaagttcgaattatagtttagattagaaaagttttggcgattggtggttaggagtcgtttgagtaaaagattagatgtagtaatagttagagatttgtgaaatgagtgaagatgtggttatggaattttgttattgaagcgttttgttttgggttgagtaaaatttattttaattcgggaatgatagttttgtgggtttttttttattttgagataggattttgttttgttatttaggttggagtgtagtggtataattatagtttattgtagtttttaatttttggatttaagtaatttttttgttttagtttttcgagtagttgggaatataggtatatggtattatacgtagttaatttttttttttttttatttttgtaaagatggagttttattatgttgtttaggttgattttaaatttttggttttaagtgatttttttattttagttttttaaagtgttgggattataggaatgagtttttaagtagggttgggaatgattaacgttaatttttatgttgttataagtattaaaatgtatgtaaagtatttatatttgttatatagtagtagtttagatgtagttgtttttatttttatttgtttttttatagaaagagaataaataattaaaattttgtaagttttaatgaggtgttaaggaggaattttacgaatgttttaggaagattgttatttagtattgagggattgaatattagtaaagtaggataaatgttataattgatggggatttgataattttttgtttttttgtttttttaaataggttatgtatttattttaagagatgttagaataaattataaagattaagataaattaatattttgtaaggtatttaaaagtttattaaaatgtgtaagtagtgttatatgtaatgaattttaaaagattgacgttaagagtaattttttatttttttgttttttttatttttttattttttatttatttttaatttttaatattgtttgttggatttttttttttgttaagaggtttgatagttatttaaaaatagtatagttgaatgttagtggttaattatataaagggaaatttttaattttgaaaattaattttgagtttgatgttggaattatagttgtatggatttttgattttatatttattttttttatatttgattttagattttttatagtagaaggtgggttaaatcgtgattgtttaggtagtttttgatgagttgtggatgtgggagatgaaagtaaaaatgagtgagatgttagattattttttgttttttagttaattgttttaattttttttttgtttagattttgtaagtatgaatgttattatgaatatcgttttgaatgtttaagtatgttattatgaatgttgatatgatgatattaagaatgtttttatgaatgtttaagtatgaatgttattatgaatgttagttattatttttaagtttattagatattttataattgtagtttatttaattttttatttatttttattttttttttaataataaaagtaattatatttttagtgttatgtgttagatattatgttagagtgatgattttttatggggagagtaatttgtattttcgttttaggatatgtggtaatgtttagaagtattttttattgttttaatttgtggggaggggtatgttattggtatttagtgggtatatgtaaaggatgttgttaaattttttataatgtataggataatttttttaataaagaattatttagtttaaattgttagtagtgttaaattttatgtatataattttatttagtttttataataattttatggaatggatatgattatttttattttgttgatgaggaaattagtttattattgtaaattatttagagagtgattgagttaatgaattttttaggttttttgtttttttttatttgagattcgttttttatttgttagtatatttaatagaggggaaaagaaagaagaaagtttagtttagttttgtgttatataagtaattttggtttgaaaaaaaaaaaaaaaatttaagtagggaggaagttgaaataattagttgagggatagagagtaatttagtattttatttatttttgtttttattttttatatttataatttattagaaattatttgaataattacggtttaatttatttgttgttataaaggatttaagattagatgtggaaaaaataaatatgaaattagaaatttatgtaattgtgattttaatattaggtttagaattgatttttagagttgagggttttttttcgtataattagttattggtatttagttatattatttttaggtagttgttaaattttttggtagagtaaaaagtttagtaaaagagtaataagtattttaaggttttatgttttttttttacgtggtaggtgagaggaggttaagatattatttattagttgtagattttagaaaagagggattttggttattgtgttttaaagtggtttagttgtgaaagggaagatatttgggttttagtttgttttaaaagtgggaatatttttgaataattagaaagtattgtatttttttaaaagtttttggtagtagcggtgttatttttagggtagcggttgtttttttttgaataatgagaaaattataattattattaagaattattattatgttttaaaatatattgagtgtaaatagtgtgttaagataaaggataatttttttaaataattttttaaatttattttaagtttgttatttttttttaagtatttgtttattttaatttttttatattttaggttgaaatattttaaagtgaggtataaaatgatagttatgattaggtcggttttttaattaagggagagttatagatatttggtttgagggtaaattttggttattaagttagtttttatttttgttaaggtttgaagagagagtttttataaaggtttatatgtattatgtttaaatattttaaagttgtaattaataagttattgagtaaaatgttttatttttttattttgataaatatattttcgtaataatatggaaggttaagtttgaatttaagatttttggattttttaaaattttatataaaatgtgattatataggagaagttgggtttttatttttaatttgttttagggattttggtttttttttttttaattttaggttatatagaatttatttgtttgagttttaattgaaagttattatttggttttaggaattttatatatttatggtatagtttttcgttagagtgagagatttagaatgagattcgtgatgttttggaaataggttttgagtagttgggtagagaattttttgagtgtggtttagatagggttgtaaatttagtggattttttttttggtattgtgggaggttataatattattttatagaggttagaggtataattagtagagggtgttttagtttttttgggttgttattataaaatattataaattgagtagtttataaataatagatatttatttttgatagttttgaaggttgggaagtttaagattaaggtattagaagatttagtgtttggtgagggtttgttttttggtttatagatggttgtttttttattatgtttttttatggtgaaagagattagttagttttttgggttttttttataaaagtattaattttatttatgagggttttgtttttataatttaattattttttaaagatttttattttttaatattattatattgggaattaggatttttatatatgaatttagggagatataaatatcgagattatagtagaagattagagtggatttttttatagtattttttttagagtttggggtaagagttatttttgtttgggttttagggttattttttaagttataggttttatgtttttttttagtttttagaattgtgagataataaatttttgttttttataaattatttagatttaggtgttttgttatagtaatttaaaatggattaagatagatgggttttattatttttatattttatatgggaagaatttggagtttagagaggtaaagtaatatgtataaggttttagagttaggaagtagtagagttgggattgtaattttgtaatagttttttattttatttagagtttaagtatggtatttttaatagttttgtataatttgtttattttatatttttttattttatttttgttttatttggttttagttttattagatttttttttatgatttttatgtgttagttttttttgttggttcgtgttgtttttattgtttagattgttattatatttgataattgtatggtttgttttttgattttttttaggttaagatttaattgttgatttttttatgaggagtttttgattatatttagatatttatttatatacgtataatttttattcgttatttatttgtttttttgatttgtttttaatatacgtattattattgaatatattatattttttatttattttgtttattatttgtttttttttttagaatgggagttttaaagggaaggaattaagattttatttgttttgtttattgttttatttttaatttttataatagtgtttattatatagaaaatgtttaataaatatttgttgatgtaataaataaaaaaatgtaattaagtaattaagttttaaagagtttgattttattaatattgttttttgtttttttataggaagttttttggtattacgtatttttttttgggttatggtatttttgagttagttgagtggttatttgaattatatttgtggggtagagaattttataggtgttagttaggttcgtttatatgtttattatgtttttttttattgcgcgtttattttggttatcgttttcggtaatggtttggtgtgtatggttgtgttgaaggagcgggttttgtagattattattaattatttagtagtgagtttggttgtggtagatttgttggtggttattttggtgatgttttgggtggtatatttggaggtgagtagattttaggtgtatgttgtttttatgattgtgttagtatttgttttttttgagttttggtttttggggtttaaaagattttttagatagttaggaattgaggaaggaaggagagtttttattttttttgtaatgagagagttaaagttttggaaaatagttattattttgttttttatttatattagaattaaggagttgagaatgattttgtttatgggtttttagtgtttaggtgattggatttgagtgacgggattttttttaatatggtttagagtttattttttgtgttagatatgttttaatgatatggtgggttgggtgaagtagtttagaagatttttttattagtgtttaatgtatatgagggtgagggtgtgtaggagggatgtgaggttaggaggaaaaaggaattatagaaaaaaaaaattagtgaatgtaagggaagatagaaagaatgattagcgaatagattagatttttttcgatggtttagtttttttttgttttttttttttgggtattagttttttatagattttgttattaaaggaatagataaaatttttaaatgtatattttttatgtgtttatgaatagtatagagtttttgttagagagatagtgtagtagattttggtgaatttttttggggagaaatatttattaaatttgaaagtatttttaattgggagtgtaaaatagagttagggggtggttaagataaaatatttatttgttaataaagaaattagggtgattatatttgtttaagaaatagatatttttattaggaaaatatgtaattatttaagatatgtttttttaaaaaaatttgagtatattattaatattttttttttgtattgtgtgttattttaaagaggtatttaatgaaggattaaaatgatgttatgattaagagaaattaagatttattaaattaatattttagttaatattgatagtaaaagtgatagttaattaagtatgatatattacgggagagtaaaaattttgtatatagattgtttgtgttaatatttttgttaaagatggttgggaattaaaattagatttatgattttaagggggagatataaagagagaaaaaaagaaaatagagaaataaaaggaaaagaagaaaaataattaggttgtgtagatttaaaggttaagggaatatttgaggaaaaaatatgtatttattttttttagttaggataattttagttgggagggtgaagggttttataattattttgatttttttgttaatttaattagtttgagttaattttgaagttagagattagatttttattttttattttttgtagtttaaatatattatttggtataaaatatatgttaattgttataatatttgatatatgaatgatgaaatgaattttttttgtaatgtatgtattatatgggttatttttgttaatattatttgtttttttatttattgttatatttagattttttggggagaggatttttggggacgagttatttgttattttatatttaataataatgagtttgaaaaaatttcgaagtatgtgatatttttgtttaagaatgaggcgttttaggtgtaattagttaatatgaattggttaataatttatagtattgttattatttttttaaaatgtttttgtttatttttatgtgttttaaggaatgttaagttttttagaaggatgaatggtaggaagaaatgtaggtagtggatttttattttaatgagtatttttattttttttaagataaaattaggtttttggtgtttgtaataaagttatttaggggtatttgttggttatgtatttgtgattatttttaggattttggttggattatattggaaaatatttgtatgtattggtttaggagatagatattgtgatttttttatattagaaatttatggtattttttttagttatattttttgatatattggtgtttttattttattattgagtatagaagggtaggtgagattatagaaaatgataggaaattttgttaaaggttttaaagaaattattgtagtagtatatataggtttttttttatgagaatagttttgatgaagtttttggtttttttttataaaaattataatattatgttttttgtttaataggttattttatgtaggtatttagtgattaagattataatttttatatttgattttaattaaaaggttgagaagtaataagagtatgatttttaaaatttatatttatataaggaagatttaggggagtagagacgtttttttattggttttaggatttttttttggttttattaatttgttttaagatttagttagcgagttggtaagattaaaaaaggttttaaagttagtgaagaatatagaggattaagtttttttattttatattagtttatattttttttaattttaaatgtttttttatttttttttagaggtaaatgaggtattttaatgaaagaaaagagtattttgagtttttaaaatatgggttatgaatatataaatttatgttttttaagaagaagtaaagtattatttttattaatttgttttaatgatagtatagtttgagtagttattttattaattatttaattatatttaagagttttttttggaaaagaaaagggtgtaatgttgattatcgagattgttgtaggtttgagggtttttaggaagataagatgtatatgagaagaatattattttgggatttaaaagatttattagatttatagtcgtatgtgttttgatttgaatatatttatttttttcgaaggaaaattggtttattttgttagatattagtatttatgaggtaggaatgttttggttgtaaatattggaaattttgattagttgtggtttaattgtatttaatgttttttaaataattagaattttggaggaaaagaattattgtgttggtttagttgttttatggtgttattatagattagatttttttattttttttttttattatttttggtaagttggtttagttttttattttgttatagtttttagtattatggtagtatttaaaaataggatgggtagggatagtaggaaatgagagagagagagagagagagagtatgtattttttttgtagtagtttaaagtatgtttttaagaggttttatataagtttaattggttagaatttagttatgaggttatttttagttgtaaaggaagttaaaaaagaaaaaatgaaaacgtgtgttttatttataaaagatgtaggggtggggaattgttttgacgtaggtaataaagtattatattttttttattggaatttattgggatgaatgttattttaatatagtgttatgttgtgagaaaaagatttagaatttggagttagaagatatggatttaagtgtataaaatggaggtgataataatattttttattttgagttgatgttagatttagttgttattaattgatagagtattttgataattaaaatttttgatttataaatattttatttaagatatttttaattataagtttaaaatagtttaattttaattggtttaaatgaaaaaatagaatgtattggttgttatattaggaattttataaagttttttggtagggtgggttgtaggtatagttttattagggtattagttttatttttttatagtttttttagttttgtttttttttatatattgattttatttgtaggtaataggttaagttataggttttatatgtttatattatattatttatagtaagagagaaaattttttttttagaatttttagtagaagtattaagatgtgttttgattggattggtttgtggtatatgagttttagtttgaaaaattgatttaatataggttatatgttttttttttggatattgtttagcgattttatagatttatagtggtatttagggattatttattgaaaagatagaagaggatagttagtaagtgggaattatagttagtttttattggtattatttttatttttaagatatataggagtttttatttgggtatatataagggggtttatagggattagttattgacgtgttttagtattttttgtttttaagtttggtagataagtttaggataaaaattaagtaggtgattttatagaagattatattttagagggtttttggtttggttatttgtttaatttagtttgtagtatttttttaatttttttgtattattttaaatagttttgttttagatttttttttaagattttaattttttgttttatcgtttgtattttagagttttttttttaagtataaattttttattttgttttatttagtgaagtattttttgtgatgtttaaaatatttttattaggatagaaaggtagtataagcggttaggggaatatttggaatattaaatttagattatttgggttttagtgtagataggaggaaaaatttgaggattaagaaaggtagttaagtaagatagaataggatgagtttaggtaaggaaacgtattatagaaaaagcgatcgaggtcggattgtgatgaaagaaaagaatagtaaaattttgggaagggaagaatttttgagttttgtaatgatattgattattaaaaataaagaagtgggtttttttaaaggaaagttttattatagtttaaaaaattttaaatgataatttaagatttttttattggaaaataaagataggagatttttacgatttcgttattaaattttggattttgataaaagttatagaatattaaagttggaagggtttggagattatttttgttattatttttatagtgtgatttaattataggaaatttttggttatattttattgatatggtttttttgaggatgagttttggagttttatatttaaatgagtttttttatattttttatgtatttaaattttgagtagttttgagttaaacgtttattagggggtgtgttaatttattttgtgtagttataatagaatatatgaggttgtataatttataaagaacggatttattttttatagttttggaggtttggaagtttaagattaagaggtttttatttgggaagggttttcgtgttgttattttatggtggaaggtgggagggtagaagagaggtaaaaggggaatgaatttgtttttttataaggaatttatttttataaaaataatattaatttatttatgagggtagagtttttaaggataattatttttcgttagattttattttttaatattgttgtattggggattgagtttttaatatatgttttttgggggatataatttatagtataagggaaggagagattgtttgttaaaaatataaattgttggtcgggtacggtggtttacgtttgtaatttttatattttgggaggtcgaggtgggtggattatttgaggttaggagtttgagattagtttggttaatacggtaaaatttcgtttttattgaaaatataaaaattagttaggtatagtggtaggtatttgtaattttagatatttgggaggttaaggtagaagaatcgtttgaattcgggaggtagaggttgtagtgagtcgagattgtgttattgtattttagttagggtaatagagattttgttttaaaaaaaaaaaaaaaaaaaatataaattgttgggtttatttcgggtttattaaattagtatttttagggtagttttggaagtttagagtaagttttaggttttatttttattttatgtgatttgtgtaattagttagttatttgttacgatatttgggaattaataagttataaattttttattttatagatggagaaatgaagatgtagagaagtgaaaaatttttatttattattttgttttgttttatagtaatttttttattaagaaatattttaaatgtggtaaataaaaatggattgaagaggttaattagagaagtatttttatttttgttttttagatatttttaaataattaaaaatttatttttttagagttggagtttttaatttggggagtttattaatttggatgtaaataaaattatttttttattttttttgagatgaaatttagaattttttttaattttaaatgtaggtattaatttatagtagaagaaatttttagtgttattagtagaaattatagattttttttttaatttttttaatttttttttttttttttttgaaatggagttttattttgttgtttaggttggagtgtagtggcgtaattttagtttattgtaatttttatttttcgggtttaagcgatttttttgttttagttttttaattttgtttaattttttaatttttttttttgtatattgatgatatttatatttttaaattatattatgattgttgcggatattttgaaatattatttatatttattatttttttgaaattataggaattttggatttgtaattttagtgttttgagatatttttttgtttatttaatttttgtattgttatagggagttatttatatttattagtaagtaagagtaatattatttggttgttgtataattttaaagtgagttatttattagaatgtaggagaaagaattatgtttttaaaaagttttaagttaatttgattttttttatttttttttttttttttttttttttttttttttgaaattgaggttcgttttattatttaggttggagtgtaggggggaaatttcggtttattgtaattttcgtttttcgggtttaagtaattttcgtgttttaattttttaagtaggtaggataataggcgtttattattatatttagttaatttttgtatttttagtagagatagggttttattacgttggttaggttggtttcgaatttttgattttaagttatttatttgttttttaaagtgttgggattataggtgggagttattatattaggtttttttttatttttatttgttttaattttaaaaattattttgttttttataattttttaatattttgtatttattttatttttggtgtttattatattgttttatagttgttttttaagtatttatttttcgggtttttagtttatttatatttatttatatattatttttggtaataggtatatattgtattttgagattttgggaataaaaataggtttgttttaatatattcgtttaagtaaagtattagatatattttgggtatttattagattatggttataggggtaatggatggatatatattaatttttttattttttatgatattagaatagagttaaattgtatatatttttgaagaggtaagttattatattttgagaggtaggaagagtaatggtaatataaaggggttaaaattttagttttttttataagttatgtgtttttaggtaaattatttaatttttttaggtttttatttggtaaattatttaatttttttaggtttttatttttttatttataagttaaaaattatatttatttttttaggttgtgatgagaaaatgtgtgagaattattagtatatttttggtatttagatgtattttattgattttttattatttgttgtttgatatggaggatgttaatagaaaaaaaaaaatttattataagttttattaattagagatttattttaatgagtaagttttagggaaggttaagtgatggtattttagtgggaattattttaattagttaattagattgttttttttttgatttttagttgaaattaaggagagaatgagaatttttatggtagaattaggagataagaaaagaggatagttagaatgggatgataggttattgggggtttggaagttagagaatagtttgagggttttgttttttgggggttaagtaggaggggtattaaataaaattgtttgtgtatttttattaattttaaaggtagtatttattattgttttttgtattattttttgaattttgggatagaggtaattaggagagtgtttttttttttagaaaggagatgatatggtttgttatataaaaatttttgaggaatatttggttttttttttttttttagtatttatttatttttattttttttttaataattatttttttttatttaatatttttttatagtagggtgtgtaataatttatattttaatgttttgtttttttgtattagttttgtgattttggataaagtgtttattttttttaagtttttagattttttttttgtaatgaagataataattttttgttatagaattataatcggtaatagaggttacgtatgtaaagtgttttgtagaatattaggtatttagtaagcgtttaataaatgttagttattattatgatagattatgttagaggttatttattattttagaatatatttttatggttgggttttgttttgggagttgggggtgtagtagtaaataagtaaatttttttgtttttgttggtgttggttaagtaataataattttattttttattaagtaaatgtataatttgtttttaaaaagttttaagaatatatataataaaaataaatttagtttttaaagtttgaagttttaaagttatagaaatttttggaatgggttatgtgggttggtaatatatgtatagtgaatttttaataaatgttaatttttattaataatattaggatattatgatgatttttagtattttattgatgaatgttttatttttttagttattttgtaaattttttaaggataggttttgtagtatattttgtaaaattttttaatatatatgatatatattgttgtaaattaagtattaagagttttataagtatttgttttataagtgtatgaatgaatgaatatttagtaaatattgaagtttgttgttattttaattatttttttttatttattttagtttaaaatataaataaatatgtgtttataattatgttaaaaagtgtttttttatttaatttaaaatattaattgtagagtagatataatattgaaataaaatttagtatataaaattagtttttgtaagacgtttttatagtatgtaattgttttatgtaatgaagaaaatttttttttatttttttggtttttttaaattattgtgttattatgattttttagatcggaatttttatgttttaattttttaaaagttttttatttttagaatttttataaatttatatttagtttttatttatatagagttaattggttaaattaaaagagagatagtaaatttataattggatttgatttttttattagttttaatttttattgttgtttttaaataaaaaattattggttagggttttttaaaatagtttggagatgattaagtataggaataaaatgagatgtaaaaaaagaaataaatttaatgggaagaagttattagggatagggaaggaaagacggttttttaggattttattttattgggataaaatagaaatgaatattaaagtgatttggttatataagaagatttttggatgagaaaatttagatgaaggaatagtattatttttatgtatagttatttggttagtatttgtttttttattgggaagttattttagaggttattgtattattttttatttttttttttttttaaatggttattgggtttgtttaggagcggtattgtgaatatttagttatagttagaggtataaagtttggtaggttttttttcgagaattagggtttttaagaatgatagtttatttttttaggaaagaagttggtaattgtataaagtttcgcggtttatgagtggtttttggtggatattttaaaagtgttaatttttttgatatatttttttgatttaattagggtatgtaaaggttttaaaaataaatagaaatatattagagtataaatgatattatataaatttttgattgtaagtattatttagaggatgttatggagtttgaaatatatgtatagatagatgtatgaggttgaaattatttttatgaattttgagtagtggagagaatttagtttttttttttatttttggtttttgggatgtgggtggggagggagagtgttgaaggtagttatattggtatagatttattttatatagatttttataaatgttgttttagaatgtttttaagttttataagttgaagttagatagatttttattttggaggtaaattttatgaaaaatgtgtttttagtttattttttgagtgtatgatgagttttttattgggtgaaggattttagagagatagttttggtataatgtatatatcgggtagttatcgaagtttttttattattagttgagtatttatgaggaagttattatttaattataaggagtattagttgttttttgagtttgaattttaatagtgatttttaaattttggtatgtataggagtgtttatttaaaaatgaagattttagtttagtttggtggcgtatgtttgtatttttaattatttgggaggttgaggtaggagaattatttgaattggggaggtggaggttgtggtgagtcgagatcgtattattgtattttaatttgggtaataagagtaaaattttattttaaaaaataaaataaatttaaaaaaaataaaaaagaagatttatagattaaagagttaaagattttgatttagtaggtataggaaggatttagaaatttatatttttaataaatattttattgtggattatattttgagaattattggattaattgatttggaagattatttttagtattagtattttaatattttgtgaatttgttttttttttaggtaattagttttggatagtttggtatttttttgatgtttatttgttttgtgggaataacggtatatagggagtaggagtgttaatatttatattaggtagtaaagtaaagaaaatagggttaattgggttgtcgtttttttattggggtaaatattaatatttttgtttttgatatttagg

SEQ ID NO: 592 - DNA, 16373 bp, Artificial Sequence
  chemically treated genomic DNA (Homo sapiens)
tttgggtattagagataaggatgttagtgtttattttagtgaaggaacgataatttagttggttttattttttttgttttgttgtttagtgtagatgttggtatttttattttttgtgtatcgttgtttttatagggtagatggatattaagggagtgttaggttatttaaaattggttgtttaaagaaaggataagtttatagaatgttagaatgttaatgttggaagtgattttttaagttagttagtttagtgatttttaaagtgtggtttatagtggggtgtttattaaagatgtagatttttgaattttttttatatttattgagttagaatttttggttttttggtttgtaaatttttttttttattttttttaaatttattttattttttgagatggagttttgtttttgttgtttaggttggagtgtaatggtgcgatttcggtttattataatttttatttttttagtttaagtgatttttttgttttagttttttaagtagttgggaatataggtatgcgttattaagttgggttaaaatttttatttttaaataaatatttttatatatattaaggtttgagaattattgttgaaatttaaatttaggaggtaattaatgttttttgtggttaagtgataatttttttatagatgtttagttggtggtaaaaggatttcggtgattattcgatgtgtatattgtgttaaaattgtttttttgaagttttttatttagtagagagtttattatgtatttaagaaataagttaagaatatattttttataaaatttatttttaaagtaaaaatttatttggttttagtttgtaaagtttggaaatattttgaaataatatttatgggaatttatgtaaaataagtttgtgttaatgtgattgtttttaatattttttttttttatttatattttaaaaattaaaagtggggaaaagggttggattttttttattatttagaatttatgaggatggttttaattttatgtatttatttatatatgtattttaagttttataatattttttgagtaatgtttatagttaggaatttatataatattatttatattttagtatatttttatttatttttgaaatttttatatattttaattgaattaggaagatgtgttagggagattgatatttttaaaatgtttattaaaggttatttatggatcgcgaggttttgtgtagttattagttttttttttgggggggtgggttgttatttttggggattttagttttcggggagaaatttgttaggttttgtgtttttggttgtagttgagtatttataatatcgtttttgaataggtttaatggttatttaagaggaagaaagagtgaaaaatggtatagtagtttttgaagtagttttttaataagaaaatagatattgattaaatgattgtgtataaagatagtgttatttttttatttggatttttttatttaaggatttttttatatgattaggttattttagtgtttatttttgttttattttaataaaataaggttttaaaaggtcgtttttttttttttgtttttgataatttttttttattggatttatttttttttttgtattttattttatttttgtgtttggttatttttagattgttttgagaaattttgattaatgattttttgtttaaaagtaataatgaaaattaaaattagtgaagaagttaaatttagttatggatttattgttttttttttagtttgattaattggttttatataaataaaggttgaatatgaatttataggaattttgagaataaaaagtttttaaaagattgagatataagaatttcgatttaaagagttataataatataatgatttaggggaattaagagaataaaagaaggttttttttattatataggatagttgtatattgtaaaagcgttttgtaaaagttgattttgtatattaaattttattttaatattatatttattttgtagttaatgttttaaattgggtaaaaaaatattttttggtataattgtgagtatatgtttgtttgtgttttgggttagagtaggtgagaaaggatagttaggataatagtaaattttagtgtttgttggatatttatttatttatgtatttgtagagtaaatatttgtgaagtttttagtatttggtttgtagtagtgtatgttatgtgtgttgagaggttttataaaatgtattatagggtttatttttaaagaatttataagataattggagaagtaaggtatttattaataaaatattagagattattatgatattttaatattgttaataggaattaatatttattgagaatttattgtatatgtgttattaatttatatgatttattttaggaatttttataattttgaaattttagattttgaaaattgaatttgtttttattgtatgtgtttttaaagttttttgaagataagttatatatttatttgataggggatggagttattgttatttaattaatattaataggagtaggaagatttatttgtttgttgttgtatttttagtttttagagtagggtttaattatgaaaatatattttgaaataataaatgatttttgatataatttgttataataatagttaatatttattgaacgtttattaagtgtttggtgttttgtaaagtattttatatacgtggtttttattgtcgattataattttatgatagaggattattatttttattgtagaggaagaatttaaaagtttagaaagaataagtattttgtttaaggttatagggttagtatagggagatagagtattggaatgtaggttgttatatattttgttatagggaagtgttaggtgaggagggatagttgttggaaaagggatggaagtgggtagatattaggggaaagaagaaaattaggtgttttttagggatttttgtgtgatagattatattattttttttttagggaaagagatatttttttgattgtttttattttagggtttaaagaatagtgtaagagatagtggtaagtgttgtttttggggttggtgaaagtatatagatagttttatttaatattttttttgtttagtttttaaaggataaagtttttaagttgttttttggtttttaggtttttaatggtttgttattttattttggttattttttttttttgttttttgattttgttatgaaaatttttattttttttttgattttagttaagagttaagaagaaaataatttgattagttgattaaaataatttttattaaggtgttattatttagttttttttggagtttatttattaaaatgagtttttaattggtgggatttgtaatgaatttttttttttttattgatattttttatattaagtaataaatagtaagggattaataaagtgtatttaggtgttaagaatatgttggtaatttttatatatttttttattataatttgaagaggtaaatgtgatttttaatttataggtaaagaaatggagatttggaagggttgagtaatttgttaaatggagatttggaagggttgagtaatttgtttaaggatatatagtttgtaaaaggagttaggattttgatttttttatattattattattttttttgttttttaaagtatagtggtttgtttttttagagatgtgtataatttaattttattttaatattataggaggtagaagagttggtgtgtgtttatttattatttttatagttatggtttaatgagtgtttaagatatgtttgatattttgtttgggcgggtgtattgaaataaatttgtttttgtttttaggattttagaatataatgtgtgtttattattagaagtgatgtgtgaatgggtatgggtgaattgagggttcgggagataagtatttaaaaaatagttatgaggtaatgtgataggtattaaaggtgagataggtataaagtgttggaagattatgaaaggtaaaatgatttttgaaattaaaatagataaaagtgaaaaaaggtttggtgtggtggtttttatttgtaattttagtattttgggaggtaggtggataatttgaggttaggagttcgagattagtttggttaacgtggtgaaattttgtttttattaaaaatataaaaattagttgggtgtggtggtgggcgtttgttattttatttatttgggaagttgaggtacgagaattgtttgaattcgggaggcggaggttatagtgagtcgaaattttttttttgtattttagtttgggtgatagagcgagttttagttttaaaaaaaaaaaaaaaaaaaaaaaaaaaaaaaagtgaaaaaaattaaattgatttgaggttttttagagatatgatttttttttttgtattttaatgaataatttattttagaattatatagtaattaggtggtgttatttttatttgttaatgaatgtaagtaattttttgtggtaatatagaagttgagtaagtaggaaagtgttttaaggtattgaaattgtaggtttaaaatttttataattttaaagaaatgatgagtataagtgatgttttaagatgttcgtaataattataatgtggtttgaaaatataaatattattagtgtgtaggaaggagggttaaaaagttaaataaaattgggaggttgaggtaggagaatcgtttgaattcggaaggtggaggttgtagtgagttgagattgcgttattgtattttagtttgggtaatagagtgagattttattttaaaagaaaaaaaaagaaagttaaaaaagttaagaaaaaaatttgtgatttttattggtgatattaaagattttttttgttgtgggttgatatttatatttggaattaaaggaaattttaaattttattttagggaaaataaaggagtagttttatttatatttaagttgatgaattttttagattaagaattttaattttaaagggatgaatttttagttatttggaaatatttaagaggtaaagatagaagtatttttttaattagtttttttagtttatttttgtttgttatatttggagtattttttggtgggagggttgttgtggggtaaaatagaataataaataaggattttttatttttttgtatttttatttttttatttatgaaatagggggtttgtagtttattggtttttaaatgtcgtagtagatgattagttggttgtataagttatataaggtgggagtggggtttggggtttattttagatttttagggttgttttggaaatgttggtttggtagattcgaggtagatttaatagtttgtattttttttttttttttttttgagatagagtttttgttgttttagttggagtgtagtggtataatttcggtttattgtaatttttgtttttcgggtttaagcgatttttttgttttagttttttaagtatttgggattataggtatttgttattatgtttggttaatttttgtatttttagtagagacggggttttatcgtgttggttaggttggttttaaatttttgattttaggtggtttatttatttcggttttttaaagtgtggggattataggcgtgagttatcgtattcggttaatagtttgtatttttaataagtagttttttttttttttatgttataaattgtgttttttaaaaggtatgtgttggaaatttaatttttagtgtaatagtgttgggagatggggtttaacgagaggtgattatttttgaggattttgtttttatgagtggattaatgttgtttttgtgagagtgggttttttataaaaggataagtttattttttttttgttttttttttgtttttttattttttattatgggatgatagtacgaaggttttttttagatggaggttttttgattttagatttttaagtttttagaattgtaagaaataaattcgttttttgtaaattatatagttttatgtattttgttgtagttgtataaaatggattaatatattttttaatgaacgtttagtttagagttgtttaaagtttaggtgtataagaagtatggaggagtttatttggatatgagattttaagatttatttttagagaaattatgttagtagaatatggttaggaattttttgtggttggattatattgtggaaatgatggtaaaaataatttttaagtttttttagttttaatattttatgatttttattaaaatttagagtttggtgacgagatcgtgagaattttttgtttttgttttttagtagggaggttttaaattattatttggggttttttgagttgtggtaaaatttttttttaaaaaaatttatttttttatttttaataattaatattattataaaatttaaagatttttttttttttaaaattttgttattttttttttttattatagttcgatttcgatcgttttttttgtggtgcgtttttttgtttgaatttattttattttattttgtttgattattttttttaatttttaagtttttttttttgtttatattgggatttaagtagtttgagtttagtattttaaatgtttttttggtcgtttatattgtttttttattttgataaaagtgttttaaatattataaaaggtgttttattgagtggaataaaatgagaagtttgtgtttggagaggaagttttggagtgtagacggtaaagtaggaaattaaaattttgagaggaaatttgagatagaattatttgggatggtatagaaaagttgagaaaatgttgtaaattgaattaagtagatagttaagttagaagttttttgaaatataattttttgtgaggttatttgtttggtttttgttttgaatttatttgttaggtttgaggatagagaatattgaagtacgttagtgattggtttttgtgggtttttttatatatgtttaagtgaaggtttttgtgtgttttaaagatgagaatgatattaatgaaagttgattgtggtttttatttattgattatttttttttatttttttaataaatagtttttagatgttattgtgaatttatgagatcgttgggtagtatttaaagaagaaatatataatttatgttaaattaattttttaagttggaatttatgtgttataagttagtttaattagagtatattttgatatttttattagaaattttaagaaaaggatttttttttttgttgtgaatggtgtggtgtggatatgtgagatttatagtttagtttgttgtttgtaggtaaggttagtatatggaaaaaggtagagttgagagaattgtagggaaatggagttggtgttttgatggaattgtgtttgtagtttattttattagaggattttataaagtttttggtatgatagttaatgtattttgtttttttatttaagttaattggagttaagttgttttaaatttataattaaaagtgttttaagtgagatatttatagattaaaagttttggttattaaaatattttattagttgatgatagttgagtttaatattagtttagggtggaaaatgttgttgttatttttattttatgtatttaaatttatgttttttgattttaagttttgagttttttttttatagtatgatattgtgttgaaatgatatttattttagtgaattttaataaaggaaatgtgatattttattgtttacgttagagtaattttttatttttatattttttataaataaaatatacgtttttatttttttttttttggttttttttgtagttaaaggtggttttatgattaagttttggttaattaagtttatgtgaaattttttagaaatatgttttaagttattatagggaaagtgtatgtttttttttttttttttttttttattttttgttgtttttatttattttatttttgaatattgttatggtgttgggggttatggtaagataaagaattaagttagtttgttaaggatggtgaagaggaaggatggaaaagtttggtttgtgatgatattatggggtagttgaattaatataataattttttttttttagaattttggttatttgaaaaatattaaatgtagttaaattataattaattaaggtttttaatatttatagttaaaatatttttattttataaatattggtgtttggtaaaatgagttaattttttttcgaagaaggtggatgtgtttaaattaaagtatatgcggttatgaatttggtgaattttttggattttaaagtggtgttttttttatgtatattttatttttttgggggtttttaagtttatagtagtttcggtggttaatattgtattttttttttttttaaagggagtttttaggtataattaagtaattagtagagtagttatttaaattgtattattattaggataagttagtgagaataatattttgtttttttttgaggaatatggatttatgtatttatagtttatattttaagggtttaaagtgttttttttttttattaaggtgttttatttgtttttaaggaaagataggaaaatatttgagattaagaaaagtatagattgatgtaagatggagagatttggttttttgtattttttattggttttagggttttttttggttttattaattcgttgattgggttttgaagtaaattggtaagattaaaaagaggttttaaagttagtgaggagacgtttttgtttttttgaattttttttgtgtgaatatagattttaaaaattatgtttttattgttttttagttttttggttaagattaaatgtaaaaattatgattttgattattgaatatttatatgaaataatttgttggatagagggtatagtattatggtttttatggggagaaattaaaaattttattagagttgtttttatggaagaaaatttatatgtattattatagtgatttttttaaggtttttggtaagattttttgttattttttatagttttatttgtttttttatgtttagtagtagaataggagtattagtatattagaaggtatggttagaaggggtgttatggatttttagtgtggaaaagttataatgtttattttttaaattagtatatatagatgttttttagtatggtttaattagagttttagaaataattataaatatatagttaataaatgtttttgagtggttttgttatagatattaaaagtttggttttattttagagggaataaaaatgtttattagagtgaaggtttattgtttatatttttttttgttatttatttttttggaggatttaatattttttggaatatatagaaatggataaaaatattttaggaagatgatgatagtgttatgagttattgattaatttatattggttggttgtatttaaagcgttttatttttgaatagaaatattatatgtttcgaaatttttttaggtttattattgttggatgtaaaataataaatagttcgtttttaaaagttttttttttaaaaagtttgagtgtaataatagatagagaggtagatggtattagtaggaatagtttatataatgtatatattatagagaagatttattttattatttatatattaaatgttatagtagttagtatgtattttgtgttaggtagtatgtttaggttataggagatgaagagtaaagatttagtttttgattttaaggttgatttagattaattgggttgatagaaaaattaagataattataagattttttatttttttaattaggattattttaattgggaagaataaatgtatattttttttttaagtatttttttagtttttagatttatatagtttagttgtttttttttttttttttttatttttttgttttttttttttttttttttatgttttttttttgagattataagtttaattttagtttttagttatttttaataaaggtattagtataggtagtttatgtataaggtttttgttttttcgtgatatgttatatttaattaattgttatttttattattaatattaattgagatattaatttgatgaattttaattttttttaattatagtattattttgattttttattggatatttttttaaaatgatatatagtgtagaggagaaatattaatagtatatttaggtttttttaaaaaaatatattttaagtaattgtatgtttttttggtaagaatatttgttttttgaatagatatggttattttgatttttttgttagtaaatgggtgttttgttttgattattttttggttttgttttgtatttttaattgaaaatatttttaaatttaataaatgtttttttttaaaagaatttattaggatttgttgtattatttttttggtaaaggttttgtattatttatggatatatggaaaatatatatttgagggttttgtttgtttttttggtagtagagtttatggagaattggtatttaggaggaaagagtaaagagggattgagttatcgaaagaagtttgatttgttcgttggttattttttttatttttttttatatttattaattttttttttttataatttttttttttttttggttttatattttttttgtatatttttatttttatatatattaaatattggtgaagaggttttttggattgttttatttagtttattatgttattgagatatgtttggtatagagaataaattttaggttatattaggaagagtttcgttatttaaatttagttatttgaatattggagatttatgaatagaattatttttagttttttggttttgatgtggatgagggataggatggtgattgttttttagagttttaatttttttattatagggagaatgagagttttttttttttttttagtttttgattgtttggggagttttttgagttttaaaggttagaatttagggaagataagtattagtatagttatagagataatatgtatttgaagtttatttatttttaggtatattatttagggtattattaaggtggttattagtaagtttgttatagttaggtttattattaagtagttggtggtagtttgtagggttcgtttttttagtatagttatgtatattaggttattgtcgaagacgatggttaggatgagcgcgtagtaggagagggtatagtaggtatgtgggcgggtttggttggtatttgtggagttttttgttttataggtgtagtttaggtggttatttagttggtttagagatgttatagtttagagggaggtgcgtgatgttaaggggttttttgtgaggagatagaaaataatattaataaaattagattttttggggtttggttgtttagttatatttttttatttattgtattagtaaatatttattgagtattttttatatagtaggtattgttgtgagagttggagatagagtaatgaataaaatagataaaattttaattttttttttttgaagtttttattttagaggagaagatagataataaataagataaataaaagatgtggtgtgtttaataatgatacgtatattggagataaattagagaggtaggtaagtaacgggtgaagattgtgcgtatgtgagtgagtatttgagtataattaggaattttttatggagaaattagtaattgagttttgatttggaggagattaggaagtagattatgtagttattagatgtgatagtagtttgagtagtgagaataatacgggttagtaggaagggttagtatatagaagttataggagggagtttggtgaggttggagttaagtgaggtaggagtagaataggagggtgtgaggtagatagattgtgtagggttattgaaagtattatgtttggattttgagtgagatgggaagttgttgtaggattataattttagttttgttgttttttaattttgggattttatgtatattattttatttttttgagttttagattttttttatgtaaaatgtgggaataatgaaatttatttattttagtttattttgggttgttataatagaatatttgagtttgggtaatttataaagagtagaaatttgttgttttatagttttgaaggttaggggaagatataaggtttgtgatttagggagtaattttgaaatttaagtaaaagtgatttttgttttaagttttagaggaggtgttatagaggagtttattttggttttttgttgtggtttcggtgtttgtgtttttttaaatttatatgtagaaattttaatttttaatatgatggtattaggaggtgggggtttttgagaggtgattaggttatgaggatagagtttttatgaataagattagtgtttttataaaagagatttagagagttagttaattttttttattatgggaagatatagtgaaaagatagttatttatgaattagaaagtaggtttttattagatattgaattttttggtgttttgattttggattttttagtttttagaattgttaaaaatagatatttgttgtttataaattatttagtttatggtattttgtgatagtagtttaaaaggattaaggtattttttattggttatgtttttaatttttatagaatgatgttgtaattttttatagtgttaaggagaaggtttattaagtttataattttgtttagattatatttagggaattttttatttaattgtttagagtttgtttttaagatattacgggttttattttaaattttttattttgacgggagattgtgttataaatgtgtagggtttttggggttaagtggtggtttttagttagagtttagataaatagattttatgtagtttgaggttgggagagaagaggttagggtttttgaagtagattaggggtgggggtttagttttttttgtatgattatattttgtatggaattttgaaaggtttaggaattttaaatttaaatttggttttttatgttgttacgaaggtgtatttgttaaggtgggaggatgaaatattttatttaatggtttgttggttataattttaaaatatttaagtatggtatatatagatttttatgggaattttttttttaggttttggtaaaagtagaggttgatttggtggttagaatttgtttttaagttaggtatttgtagtttttttttgattaggagatcggtttaattatggttgttattttgtattttattttgaaatgttttagtttgaaatatgaaagagttaaaatgaataaatatttgggaaagggtgataaatttggaatgaatttagagaattgtttaaaaaaattgttttttattttggtatattgtttgtatttaatgtattttaaaatataataataatttttgataataattataatttttttattatttagaggagggtagtcgttattttggagatagtatcgttgttgttaagagtttttggaaaaatataatgttttttgattgtttaaggatatttttatttttaaggtaggttgaggtttaaatgtttttttttttataattgggttattttggaatatagtggttagaattttttttttttggggtttgtaattggtgaataatgttttagtttttttttatttgttacgtaagagggaggtataaaattttaggatatttgttatttttttgttggattttttattttgttaagaggtttgatagttatttaaaaatagtatagttgaatgttagtggttaattatacgaagggaaatttttaattttgaaaattaattttgagtttgatgttggaattatagttgtatggatttttgattttatatttattttttttatatttgattttagattttttatagtagtaggtgggttaaatcgtgattgtttaggtagtttttgatgagttgtggatgtgggagatgaaagtaaagatgagtgagatgttagattattttttattttttagttaattgttttaattttttttttgtttagatttttttttttttttttaaattagagttgtttatataatatagaattgagttgggtttttttttttttttttttttttgttagatatgttaatagataggaaacgggttttaggtaagaagaagtaaagagtttagagaatttattaatttaattattttttaagtaatttataatgataggttggtttttttattagtaaaatggagataattatatttattttataaggttattatgaagattaaatgagattatatatatgaagtttggtattattgataatttgggttgaataattttttgttgaggaggttgttttgtgtattgtggggggtttaatagtattttttatatatatttattagatgttagtagtatatttttttttataagttgggataataaaaaatgtttttagatattgttatatattttggagcgggggtgtaaattgttttttttatgaagaattattattttagtataatgtttggtatatagtattagaaatatagttgtttttattgttaagaggaaagtgggaataggtgaagagttaaataagttgtaattgtaaagtatttagtgaatttggaaatgatgattgatatttatggtggtatttatgtttaaatatttatgaagatatttttaatgttattatgttaatatttatgatgatatgtttaaatatttaggacgatatttatgatggtatttatgtttataaaatttaagtagggaggaagttgaaataattagttgagagatagagagtaatttagtattttatttatttttgtttttattttttatatttataatttattagaaattatttgaataattacggtttaatttattttttgttataaaggatttaagattagatgtggaaaaaataaatatgaaattagaaatttatgtaattgtgattttaatattaggtttagaattgatttttagagttgagggtttttttttgtataattagttattggtatttagttatattatttttaggtagttgttaaattttttggtagaggaaaaagtttagtaaatagtgttaggagttaaaagtggataggaggtaaaagaatagagaaggtagagaaatagaagattatttttggcgttagttttttaagatttattatatataatattatttatatattttaatgagtttttaaatgttttataaagtattgatttattttggtttttatagtttgttttggtattttttagagtgagtgtataatttatttaaaaaggtaggggaatagagagttgttaggtttttattagttatgatatttgttttgttttgttgatgtttaattttttagtgttgaataatagtttttttgaaatattcgtggggtttttttttagtattttattaagatttatagagttttaattatttgttttttttttgtaagaaaataaatgaagatgaagataattatatttgggttattattgtgtggtaagtatgagtattttatatgtattttaatatttatagtagtatggaagttgacgttagttatttttagttttgtttgggggtttatttttgtaattttagtattttgggaggttgagatggaaggattatttgaggttaggagtttgagattagtttgggtaatatagtgagattttatttttgtaaaaataaaagaaaagaaaaattagttgcgtgtgatgttatgtgtttgtatttttagttattcgaaagattgaggtaggaagattgtttgagtttaggagttagaggttgtagtgaattataattgtgttattgtattttagtttgggtgatagagtaagattttgttttaaagtaaaaaaaaatttataaaattgttattttcgagttgagatggattttatttaatttagaataaaacgttttagtaatagggttttatgattatatttttatttattttatagatttttggttgttgttatatttaattttttatttagacgatttttgattattagtcgttagagtttttttggtttgggttgtaattcggatttgttatattgtttgataaaattaataattatagttaaaatttataagtattattattatttaattttataataatttgatgaagaaggtaagtattattattttattaagttttttagataaaaaaggtgagttatagagaggttaaatattttgttgagattataaattagtaaatgat

SEQ ID NO: 593 - DNA, 7029 bp, Artificial Sequence
  chemically treated genomic DNA (Homo sapiens)
  unsure 6681, 6705: n is a or g or c or t
tagaggtggtgggtgggagtgttggagcggggtagtggtttaggttttgggtgttttattggtttggtttggaaggtgattatgtattaaggattaaagaagtgaagtttaaagtagaattttatggagtttttagtttaaattttttttattgtttgtttttttttagttagtgtaaggttttaggttttatagtaggattttaatattgtatttttttaaagattttggttatttttattttaggtttgttagtttcgagttttatggagggcgtgagttggcggggttacgggtagtttttggatatttatgggtgatattaagggttgagttagttatttttgttttttttgtgtttaagagttttaagtattagattggtttgagttttaaggtttgggggtgtaaggggttggaggttgtgggatttaaagattttattgaatttttattttagatattgtatttagtgtttttatttaggtttgaatttatttatatattttacggttttgtttttattttgtgttttttttgtaagtttttatgttttttaaattggtaattggggggtttgtttttatatttttgttagtgttattttttggtgggtagttattatttttgggttttttgttgttttcgtttttttattatgggggttcggaaggtagagttcgttttttttttgagttttattttggaattttgagtattttgggttattgtttttgagttttttttaggggtagggtttggggttttttttgttttttgatagggagtttttttagtgtagggttagggggtggtggaggtaagggtttttaggggattagatttgatatgcggggttattattgggttttcgatggttgtgttgtttcgttttcgcgtttacgtttcggcgtaggtttttttttggtatcggttatagggcgaggtttgcggtttttattttaagggtgcgttcggtttttatttgagggtttagtttaggtgttcggttttggtagttcggttttgggcgttttttatttttaggcgttgttttttattttaggttgttttttcggtcgtcgcggggttgcggtttgggcgttatagtaacgggagttaggttttatttgaatacgtaaatatttataagtcgtcgggggttcgggtttcgtgcggttgagttacgttttttagtaacggtcgttagggcggggttacgtggattggtacgtgcgtgggcgtttttgttgcgggcgattttaggggaaggagacgcgtttattgatgaattattatagttttagtggaattattagatgtttttttttaaaaaaattttgttttttttttaattttaatttattatttatttatttatttatttatttatttatttattttgagacggagtttcgttttgtcgtttacgttggagtgtagtggtgcgattttggtttattgtaagttttgtttttcgggtttacgttatttttttgttttagtttttcgagtagttgggattataggtgttcgttattacgtttggttaattttttgtatttttagtagagatagggttttattgtgttagttaggatggtttcgattttttgatttcgtgatttgtttgtttcggttttttaaagtgttgggattataggtatgagttatttcgtttagtttatttatttattttttgatatagagttttgttttgttttttaggttagagtgtaatgacgtgattttcgtttatcgtaatttttgttttttgggtttaagtgattttttttttttagtttgttaagtagttgggattataggtgtatattattacgttcggttttttttttttgagacggagttttgttttgttatttaggttggagcgtagtggtataattttggtttattgtaattttcgtttttcgggtttatgttatttttttgttttagtttttttagtagttgggattataggtgttcgttattacgttcggttgatttttttgtattttttagtagagatagggttttatcgtgttagttaggatggtttcgattttttgattttgtgatttgtttgtttcggttttttaaagtgttgggattataggcgtgagttattacgtttggttaattatttgtatttttagtagagatggggttttattatgttggttaggttggttttgaatttttgatttggtgatttatttgtttcggttttttaacgtgttgggattataggtgtgagttattgcgtttggcgtagataatttaatttttaataaaagtaaagatttttaataggtatattttagaagagggtatgttgatagttaataggtatatgggaaaagtggttaaatatgagtagttattaggaaaattaacgacgttttattatattaaaatggaagaaatattgttagacgtggttatttgtaaatgtcgttttttggtttgtgttttttgatttttttgatagtatatttgagttaattttttaatgtgtaaggtatgagtggaggtttttattaaaaattgtttaggttggttgtatggtttatgtttgtaattatagtattttgagaggttgaagtgggaggattatttgagtttaggagtttgagatcggttgggttaatatggcgagatttcgtttttataaaaaataagaaaattagttgggtgtggtattacgtatttgtagttttagttgtataggaggttgaggttagaggattatttgagtttaggagattgaggttgtagtgagttatgattgtagtaagatgtgattatatttagttatatttgatttttagataaataatagaagtttagtggaggttgggggtagtggtttatagttgtaattttagtattttaggaagttgaggtaggtggattatttgaggttaggagttcgagattagtttggttaatatgatgaaatcgtgtttttattaaaaatataaaaaaattagtcgggcgtggtggcgggcgtttataattttagttatttagaaggttgaggtaggagaatcgtttgaattcgggagacggaggttgtagtgagttaagattgtgttgttgtattttagtttgggtgataagagtgaaattttattttaaaaaaaaaaaaaaaaaaaaaataaattgggggttggttgtttttttttattgtttttattgtttttggatttgtgtgttagagatgtgtgttgtatatatttttttttcgtttagtttggtttttatttttggtggtcgtagatattttgggggttatttgaaggaattttaagtcgattagaggttgggttggattcgtcgtttggcgtttagtcggagattttagggttatttttttcggttttattttgggagagaagaaatttttattgttttagttttttttgtggtgattttttttgtttaagggtttataagggtagtagattgatttgtataagagggattgagtttggttgcggtcgtatttgatgtttgtgtatatttgtttttggtggttttttttgtggtgattttttttgtttaagggtttataagggtagtagattgatttgtataagagggattgagtttggttgcggtcgtatttgatgtttgtgtatatttgtttttggtgtaggtttttttttcgtagtttcgtgattttgttttgtgaggtttacggtgtttgtttttttttagagtttttatttttttttttaacgtacgttttgttagcgttttcgtttagttcgtgttttttagattttcgaggttaggggttttaatttttggtatagtttttttattttaggttttttagaaatagattagagtattaggatgtgcgtcgtttggggttttatagagtggtgtttttttttagtgttttttaggttttttagtgatagattatagaaaatattttttaggttataggttatttttttttggtgaagagtttatagaattttttgttgcgttttgtaagtatttttttttttgtacgtttggaatttatttcggtttgtcgtgttttttttttggttttttcgcgagtcgaatttattgttcggtttcgggattttttgtttagggttagaggggcgtttatttagtttacggttttgggtcggagggaatggaggagggagcggggtcgatcgtttagttgttcgtttagtttcggaggcggttacgcgaggattaattgtgtaacgggtggggtcgcggttgatcgtggtggtcgcgggggttgagggttagaggttgcggggggggggcggcgggatgagttaggcgtcggcggttgagtcgggcgcggagtcgggggtagggggagcgggcgtggagggtgcgtacgaggtcgaggcgagttcgcgggggaggcgggtagagtttgagtttaggtttttttgcgtttggcggaacgggtttgggagggaggttttgttagatattaggtggattagggtgagcgttcgagggtcgggacgtacgtacgggtcgggtaggatggcgttggcgtcgatgttcgcgcgttttagggtttggtttggtcgtttttttatttttgtcggtttttcgggtcgcggatttcgcgcggcgtcgggcgatgttggtttgttcgtggttattatttcgttttattttcgtttttttgggtcgtcgtattcgtttacgtgttcgtttttttttgcgtaaaattttaagatgagtaaatattgggtttacggtggagcgtcgcgggggtttttttgagtcggggcgggtcgggggcgggattagggttcggtcggggcgtgttcgaggggagggatttttcggtttgcgattcggcgttgttcgcggtgtttagcgttcgttcgggcgcgttatggggaatcgtagtatcgcggacgcggacgggttgttggttgggcgcgggtcggtcgcgggggtatttgcgggggtatttgcggggttggttgggtagggcgcggcggcgttggtggggggcgtgttgtttatcggcgcggtgttcgcggggaattcgttcgtgtgcgtgagcgtggttatcgagcgcgttttgtagacgtttattaatttttttatcgtgagtttggcggtcgtcgatttttttttcgtttttttggtgttgtcgtttttcgtttatttcgaggtgagtcgcgttcggtcgtacgagtatttttatttgtttttcggtttttcgtttttgtttttacggaggattcggcgcgattcggtttttttttggtgcggagtttttagttggggcggcggtaggggcgttgcgttttgtttttcggcgatatatttatcgtcgttatttcgcgattttttattcgttgcgttgtttgtttttcgattttcgtttttttttttttttttcgtttgttttggcgtttgttatttaggagatgttcgtttttttatttagggatttcggaaataggcgattttgttaagtttagtttttttcgtagttggattttatttttagggtagttagttggatagataggtagatgtaggtttagttttttggttgtcgtgggatatatatatatatatattgttatagttattgtttattatatatatttagtgtagatgttggtatatttttagaaggaggtttatagttcgtaggggagatttgggttggataaaatttaggggaggggagggtgtgtggggattaggtttttgttgagaattttggggggaagtttgagggggaattgggggatggagtttatattttatattaggtttggttttcgagtgggtcggttttggtgttagtttttttgcggttagagaaaagtagtttagggttgagttggagacgcggtgttttcgattgtgggggagggggattcgaggtttttttttgatggatatagtgaatttaggcggttggggtagagattagtagtacgggatacgcgtgatttgtgtttttttcgagtcgtagacgttatagtgacgacgtttaagtttttaatttttttaaatcggcgggaaggattagaggggttgtttgtttttttgtttttggagagagttattttacgtggagttttacgttgggtattgggtacggtttttatatttttaattataatttatttttaagataattatgatgtggatattattattatttttgttttatagatgaagaaatagaaatgaattaacgtgttcgagttttttatagagaatttagttaatagagtttttagtttcgtttttaggtttagcggggattttgtttattttaggttggggaggggttttttttgagttcgatgatattaggttcgtttttagggaattttttaggtcgtttttatgtttgtaataaaagggagattaaggttagaagtcgtgatttacgtttgtaattttaggattttgggaggtaaaggtaggaggatagtttgagattagtttgggaaatatattaggtttggtttttataaaaaattttaaaatattagtcgggggtggtggttgcggttgttgttttagttattcgggggagttgaggcggtagaatcgtttaaatttgggaggcggaggttgtagtgagttgagattttattattgtattttagtttgggtaataagagcgaaatttcgttttanaaaataaaaagaaaaataaattantcgggggtggtggcgcgcggttgtaattttagttattttggagattgaggtgggaggatcgtttgagtttaggaattttaggttatagtgagttatgatggagttatagtattttagtcgcggtgatatagcgagattttaatttaaaataaagggagatttgcgtggggaaggggtgtttttttgttcggttttttggtttttggtttatagtcgggttttttttttcgtatttagttttggaattatttataagagtgggggcgggttataagggttcgcggtggttgggaaattttagggtttgtggtgtcgtcgcgtagg

SEQ ID NO: 594 - DNA, 7029 bp, Artificial Sequence
  chemically treated genomic DNA (Homo sapiens)
  unsure 325, 349: n is a or g or c or t
tttgcgcggcgatattataggttttgaggttttttagttatcgcgggtttttgtgattcgtttttatttttatgggtagttttagggttgaatacggagaagggggttcggttgtgagttagaggttagaggatcgggtagggaaatattttttttttacgtagatttttttttgttttgagttagggtttcgttgtgttatcgcggttggagtgttgtggttttattatggtttattgtagtttggaatttttgagtttaagcgatttttttattttagtttttagagtagttgggattatagtcgcgcgttattattttcggntgatttgtttttttttttgttttntgagacggagtttcgtttttgttgtttaggttgaagtgtagtggtgagattttaatttattgtaattttcgttttttaggtttaagcgattttgtcgttttagttttttcgaatagttgggataatagtcgtagttattattttcggttgatattttaaaattttttgtagagattaggtttggtatgttttttaggttggttttaaattatttttttgtttttgttttttaaagttttgggattataggcgtgaattacggtttttggttttggttttttttttgttataaatatgagaacggtttggggaattttttgggggcgggtttgatattatcgggtttaaagggagtttttttttagtttggggtaggtagggttttcgttgggtttagaagcgaagttggaagttttgttggttaagttttttgtgggagattcgggtacgttaatttatttttgtttttttatttgtaagataagggtgatgatagtatttatattataattgttttgaagataaattataattaaaaatatgaagatcgtgtttagtgtttagcgtaggattttacgtggagtgattttttttaagggtaaaggagtaggtagtttttttaatttttttcgtcgatttggggagattaggagtttaaacgtcgttattgtgacgtttgcggttcgaaaggagtataggttacgcgtgtttcgtgttgttggtttttgttttagtcgtttggatttattgtgtttattaaggggaaatttcgagttttttttttttatagtcggggatatcgcgtttttagtttagttttaagttgtttttttttggtcgtagaggggttggtattaaggtcgatttattcgagggttagatttggtgtggagtgtgggttttattttttaatttttttttaggtttttttttagggtttttagtaggggtttggtttttatatattttttttttttttgggttttgtttagtttaggttttttttgcgagttgtgagtttttttttgggggtgtgttagtatttgtattaggtgtgtgtggtgggtagtggttgtggtagtgtgtgtgtgtgtgtgttttacggtagttagggggttgagtttgtatttgtttgtttgtttagttggttgttttggaggtgaaatttagttacggaggggattgggtttgataaagtcgtttgttttcggggtttttggatagaaggacgggtattttttggataatagacgttaagatagacggggaaggagaagaggaacgagggtcgggggatagatagcgtagcgggtggaaggtcgcgaggtggcggcggtgggtgtatcgtcgagggataaggcgtagcgtttttgtcgtcgttttagttggaagtttcgtattagaaaggggtcgggtcgcgtcgggtttttcgtagggatagggacggggaatcgaggagtaggtgaggatgttcgtgcggtcggacgcggtttatttcggagtagacgaagagcggtagtattaggagagcgaggaggaggtcggcggtcgttaggtttacgatgaaggagttggtgggcgtttgtagggcgcgttcggtggttacgtttacgtatacgagcgagtttttcgcgagtatcgcgtcgatgagtagtacgttttttattagcgtcgtcgcgttttgtttagttagtttcgtagatgttttcgtagatgttttcgcggtcggttcgcgtttagttagtagttcgttcgcgttcgcggtgttgcggttttttatggcgcgttcgggcgggcgttgagtatcgcggataacgtcgggtcgtaagtcggggagttttttttttcgggtacgtttcggtcggattttggtttcgttttcgattcgtttcggtttaggggggttttcgcggcgttttatcgtgagtttagtatttgtttattttggaattttgcgtagggagagacgggtacgtggacgaatgcggcggtttaaagagacgggaatgaagcgaggtggtggttacgggtaggttagtatcgttcggcgtcgcgcggggttcgcgattcgagaaatcgataaggatggaggggcggttagattaggttttgaagcgcgcgggtatcgacgttagcgttattttattcggttcgtgcgtgcgtttcggttttcgggcgtttattttagtttatttggtatttggtaaaattttttttttaggttcgtttcgttagacgtagaaagatttgagtttaggttttgttcgtttttttcgcggattcgtttcgatttcgtgcgtattttttacgttcgttttttttgttttcgatttcgcgttcgatttaatcgtcgacgtttagtttatttcgtcgtttttttttcgtagtttttggtttttagttttcgcgattattacggttagtcgcggttttattcgttgtatagttgattttcgcgtggtcgttttcgaaattgggcggatagttgagcggtcgatttcgtttttttttttatttttttcggtttaagatcgtgagttaggtaggcgtttttttgattttgggtagggggtttcgggatcggatagtaggttcggttcgcgaggaggttaggagaaagatacgataggtcggggtaggttttaaacgtgtagaagagaaagtgtttgtaaagcgtagtagagaattttatggattttttattaaagaggggtgatttgtgatttgagaggtattttttgtagtttgttattaaggggtttagaagatattaaaagggggtattattttgtgggattttaggcggcgtatattttgatgttttagtttgtttttgggaggtttggagtggaggggttgtgttaggaattgaggtttttgatttcgaaggtttggaggatacgggttagacggaggcgttgatagggcgtgcgttaaagggagaaatgaggattttgagaaggagtaggtatcgtgagttttataggataaggttacggggttgcgggggaagggtttgtattagggataggtgtgtataggtattaggtgcggtcgtagttaggtttagttttttttgtgtagattagtttgttgtttttgtgaatttttgagtaaaagaagttattataggagagattattagggataggtgtgtataggtattaggtgcggtcgtagttaggtttagttttttttgtgtagattagtttgttgtttttgtgaatttttgagtaaaagaagttattataggagagattgggatagtggaagtttttttttttttaggatggaatcggggagggtggttttggggttttcggttgggcgttaaacggcgagtttagtttagtttttggtcggtttagagtttttttaagtagtttttaagatgtttgcgattattaagagtgaaaattaagttaggcggagaaaggatgtgtgtagtatatatttttgatatatagatttagaaataatggaaataatgagaaaagatagttaatttttaatttgttttttttttttttttttttttgagatggagttttatttttattatttaggttggagtgtagtagtataattttggtttattgtaattttcgtttttcgggtttaagcgatttttttgttttagttttttgagtagttgggattataggcgttcgttattacgttcggttaatttttttgtatttttagtagagatacggttttattatattggttaggttggtttcgaatttttgattttaggtgatttatttgttttagttttttaaagtgttgggattatagttgtgagttattgtttttagtttttattaaatttttgttgtttatttgaaaattaaatgtaattggatgtgattatattttattgtaattatggtttattgtagttttaattttttgggtttaagtgattttttggttttagttttttgtataattgagattatagatgcgtggtgttatatttagttaatttttttattttttgtagagacggggtttcgttatgttagtttagtcggttttaaatttttgggtttaaatgatttttttattttagttttttaaagtgttgtgattataggtatgagttatatagttagtttaaataatttttaatgaggatttttatttatattttatatattaaaaaattaatttaaatatgttgttaggagaattaaaagatatagattaggaaacgatatttgtaaatggttacgtttggtaatgttttttttattttagtgtagtaggacgtcgttgatttttttgatggttatttatgtttgattattttttttatgtgtttgttaattgttagtatgtttttttttggaatgtgtttgttaaaaatttttgtttttgttaaaaattgggttgtttacgttaggcgtagtggtttatatttgtaattttagtacgttgggaggtcgaggtaggtggattattaggttaggagtttaagattagtttggttaatatagtgaaattttatttttattaaaaatataaataattggttaggcgtggtgatttacgtttgtaattttagtattttgggaggtcgaggtaggtagattatagggttaggagatcgagattattttggttaatacggtgaaattttgtttttattaaaaaatataaaaaaattagtcgggcgtggtggcgggtatttgtaattttagttattgaggaggttgaggtaggagaatggtatgaattcgggaggcggagattgtagtgagttaagattgtgttattgcgttttagtttgggtgatagagtaagatttcgttttaaaaaaaaaaagtcgggcgtggtggtgtgtatttgtaattttagttgtttggtaggttgaggaaggagaattatttgaatttaggaggtagaggttgcggtgagcggagattacgttattgtattttggtttgggaaatagagtaagattttgtgttaaaaaataaataaataggttgggcgaggtggtttatgtttgtaattttagtattttgggaggtcgaggtaggtagattacgaagttaggaaatcgagattattttggttaatatagtgaaattttgtttttattaaaaatataaaaaattagttaggcgtggtggcgggtatttgtagttttagttattcgggaggttgaggtaagggaatggcgtgaattcgggaggtagagtttgtagtgagttaagatcgtattattgtattttagcgtgggcgatagagcgagatttcgttttaaaataaataaataaataaataaataaataaataaataataaattaaaattaaaaaagaaataaagtttttttaaaaaaaagtatttgatggttttattaaggttgtagtagtttattagtgggcgcgttttttttttttgggatcgttcgtagtaggggcgtttacgtacgtgttagtttacgtggtttcgttttagcgatcgttgttaaggggcgtggtttagtcgtacggaattcgagttttcggcgatttataaatatttgcgtatttaaatgaggtttggttttcgttgttatggcgtttaggtcgtaatttcgcggcggtcggaagaatagtttggagtaggagatagcgtttggaggtggagggcgtttagggtcgagttgttagggtcggatatttaggttgagtttttaggtgagagtcgagcgtatttttggggtgggagtcgtaagtttcgttttatgatcggtgttaggagggaatttgcgtcgaggcgtgggcgcggggacgaagtagtatagttatcggggatttagtgatggtttcgtatgttagatttggttttttgaggatttttgtttttattattttttggttttgtattgaaagggttttttgttaggagataggaggggttttaagttttgtttttgagggagatttagaggtaatgatttagggtgtttagggttttagggtggggtttaggaggggagcgggttttgtttttcgagtttttatggtgaaggggcgagggtagtaggggatttagaggtgatggttatttattagggaatggtattagtaggggtgtggagataggttttttagttattaatttggggagtatgggggtttgtagaggggatatagggtgggagtagggtcgtgaagtgtgtggatgggtttaggtttgggtgagaatattaggtgtagtgtttgaggtgggagtttaatggggtttttggattttatagtttttaattttttgtatttttaggttttggggtttagattagtttgatgtttggggtttttgggtatagaggagataagggtagttgatttagtttttagtgttatttataggtgtttaggggttgttcgtgatttcgttagtttacgttttttatgaggttcgaggttggtaggtttgggatggaggtggttagagtttttggggggatgtagtgttggggttttgttgtgaggtttggggttttgtattggttggagaaaggtaggtagtgggggagatttgggttggaaattttatgagattttgttttgggttttatttttttgatttttggtgtatggttattttttagattaggttagtgaggtatttagagtttgagttattgtttcgttttaatatttttatttattatttttg

SEQ ID NO: 595 - DNA, 6161 bp, Artificial Sequence
  chemically treated genomic DNA (Homo sapiens)
  unsure 309: n is a or g or c or t
cgagtttaaataatttttttgttttaatttttcgagtagttgggattataggggggggttattatttttaatttaattttgggattttgggggataaaagggggggttattatattggggtaggttttttaaggttaagaaaattaaaaaattttttttttattataaataatttttttttaggggaatagtttttttaattaattaataattaattatttttaaatttgagaatgaagttttttttttgttgtttaagttgtagtgtagtgggtattattttaagtttattgtaattttttttttttnagtttaagtattttttttgttttaagtttttcgagtagttgggtttataggggtttgttattacgtttaattaatttttgttttttgtagtatagatggggttttattatattggttaggttgttttcgaatttttgattttaagtttttcgtttttattagttttttaaagtgttgggattatagttatgagttattacgttcggtttagttttttaaattttaatggttatttttagttattatgatttttgtttatatttttgagattaattttgtgattttttttaaaattaattaatttatttataagttatattttatattgtaagttataatttatttatttagttaagggattgttaaatattttttgtaaagggtaagggaagtaattattttaggttttttacgttaatatggtttttgttataattttttagttttgtttttgtggaatgaaaggagttataatttatatgtaaatgattatggttgcgtttaattaaaaaaagaataaaaattatatagtggattttatttgatttatggtaataatttgttgacgtttatttaagtttattatttttatttttattaggaaaatttttaaatatatataaaataaagaaaattatatattattatttagatttaatagttgttaatattttgttatatttattttatttgttttattgttgaattattatgaagaaaatttttattattatgatattttatttttaatgtaatttatatatttttaaaaatagatataatatggttaggtatggtggtttatatttgtaatttaagtattttgggagggtaaggcgggtagaacgtttgaggttaggagtttaagattagtttggtaatatgatgaaattttatttttattaaaattataaaaaattagttgggtgtggtggtttatatttgtagatttagttatttaggaggttgaggtatgagaattgtttgttttgggagatagagtttgtagtgagttgagattacgttattgcgttttagtttaggtaagagagttagatgtattttaaaaaaaaaaaaaagatataatataatataatttgataaaatatattataattttttatagtttttatttaaatttttttagatattggatattttaaaattatttttatagtttttttgtttaaattaaaaatttatttattaattagattttgttgtgattgttatatatgaaaaagaaaagtattttttaatttaaaatgtaggttttattttttagatgtatgtgggtgtgatattgattttttgaggaatagtttaattttaaataatgtgaataagatttataattaatatattttatggtaatattaatatagtatagaggtaaatagaaaatttttatttatataatgtttaatatatttattttaattttttttcgagttttaagttttttattttttatttattttttaaataatgtgtagagtttattaggataatttagaatatataaaattagaggtttatatataatattaaaatatagttaataataatttgttgtatattttaatatagttataagagaagaattttttaatataaaaaataaacgtttaaggtgacggatattatagttgttttgatttaattattataatattgtataggtatgtaaatattatatgtattttaaaaatatgtatagttattatatattaatttaaaaatattttattgttaaaaggaaaaaaaagtatattttaaagaatttttttgaaatataagtttatgttatggatgttatgtaaatgaaggtggataaaatagttattgttattaggtttgagaatttttagattaataaaatgtgttatttttagttaaatatgcggattattttgttttttaaaattatttttttagaggttgattattttgtttttttaaagggtattgtaatattttaagttaataataaatgtagaaatgtaaatatttaagttatattttggagtttttaatgttttgtgaaaaagaggaaaatttttttttttagagaattttagtttttatggaaatttttgttagtttattagggagattttagatagaaaaattattttaaattttataaaatttttatgaaatgagaattgttgttatgtacgtgtaggtatatatattaaataatgtttagagtaaagaaaaggagtttattgagatgggagagaagaagtaatagtgtgatgtgaggttatagatgaggttgttggaagaaagaattgaaaatattgtgaatacggaaatgaaatggtttgtgttgtttatgttttaaagtattttaatttattggtattaggaaggaggattattaagttaggaaaagggataggattaattgagataagagtatatgaaggaaaattaattaaatgtgtttattgaaagttggaataatggtggggtttttaattaagaaaaggtatagggtagattgagagaggtgagtttgtaaaaatcggaagttaaggtttggagtaagagagaagatagataataaaagtaatgatgtttgtattgtttaatatggtagttattagttatatgtggttatttaaatttaaattaagtaaagttaaatatttttttttttagttataataattatattttaaatttttaatagttatatattataaatggttattatatttgatagtatagatagagaatatgttcgtattgtagaaagttttattggatagtattgttttgaggacgttaaaatgagtaagaaagagaaaaaggtagggaaggaggtaagggagagaaagtgattaataaattttttttttcgttgtgtttaatatcgtattggtttttatgtaattgttaagatagacgttgttttgtagtattggagttttattatattttttttttagaaagatgtttgagagattgttgttttatgaattttttagttatataggattgttggagtaaggtattgagttaggggtggagttagggttaggtttaaggaaaggtaatttaatggatgaaggaggtttttatgtatgttttagtattatgtttagaattcgagatgtataaaatattgattcgttattggaaagttgtaagagtaggtgtagttgtttttggtgtttagtgagttttttgttatttatggttagataatatgatattaatatattgtttagattaagttataggttaatatagtttattttatttgatattttttattagagaaaatcggttagtttatttttttaaattttatttatttatatttgttatttataattataaatatttttatttattgtaaataaatatgggtagtttatttttttttttttatattgtatgatggataatatggaaatttaaattatatattttttttgttataaatttgtagtgaaatgatagttttttatagattttttgatttttagagatttttttttttttggagatattttgagtatttttttgattataattaatattttattaggtaggttttttgttttaagtagtcgttttaaattttgagggtgtttagtgtttatgagttttttgttatttataatatttatattagacgttgttaggggaagagaagagagtttaaaaatatgtttaaatgttgttttgtgaaggttgttatttatttttataaattttagggttgtatttagtttttcgtttatttgtgtaggtagttatttttttagtgtattttttatgttttaattggttcgttgtatagatttttggttttgtgtttaggaattgttattgatttttaatttattttatttgttgagtagttttttgtgtttttattagtattttaggtatcgaattttatttttaaagttattattaggattttaattggtggtttttattatttatttttaagtttagtaatatttaaatttttattttgttgtatttaataaaagaattataaagaaagaaaaataattagggagagaaaataatttttttagagggaaaatggaggattttttagattgaaggttggttagttaatgggaattgtgatttatgtagaggatttaataattgtaagtattatggttttatttgtttgaattaataattttaaaaaattttagttttgtattagtatattttttgttttttaataatcgaaaataattgaaatttttttaatatttattaaaatggaaagtttgttattttttattatgatttgagggtttggttataaatagataatggaatgaataagatgagtatttaagttatatttgtttgtttaatatggggagaaattaaattatttgtaaagaaagtatggggtgagaagtttttattatttgtataattttcggtatttttgtttattttaagagtttgttattgaaaatatttagtaaaggagtgaattttttttgttttattaagagtcgttttttagttggaggaagggtgtgtttttaagtttttatttgggagtaatgatgattttgttaagtattttagtgagattagtttaagtttttagggtggggatttagattggttatacgtatttttagttttttttttagaggaaggtagaaatattttaaagtttgtatgtaagaatatttattgagaaattattttaattagatattagttgagtgggagaaagaaaaagaatagagaagaataaataaaatttttttggttttggatgtaagagaatttagtagagatggattggagtttttttagagtagttgtaatgttgtttatttttttggtgagtggattttggtaaaagttttttataatcgtgtttattgtaaataagtgaaaattttttagaaaatgttagtgggtattatttttaatttaaatttattgaaaatgtatattaatgataagatgattttatgaattagattttttaatagtatttttttttttaattgaagatttaagattatgttaatgttttagtgttaatttattgtattatatttttgatattgaagttattgttaagttatgttgggaaaagattgaatttaggaaatttttatcgttagttagtagtattttgtcgtttaaaattttttttgtaagagggtttttaaattaaatattataagtgtgtttggatttttaatttgtttttttttttattttttttgtgtgtttggtggtggaattattttaatttttaaaatataaaaatagtattatataatttaaaatcgtagtagtttgtggttggtttcgttatttaaataaagttattagttgtatatttggttagaatttgtattattattataaaaagtttcgtattatttaattatgattttatttaaaatatttttaattttaaaaaacggtagtataggaggtttataaatgatatattaagtgaagaagtggttataattaaagagtaagtataattattattatattcgattttattattggaatgttagtgatgattgcgatataaaagttgtgtatttgatcgtttgacgaatgtaatgaaatattttattattgtttttttatatgtaattagttttttttgttgtagagataatattaagtgtattaggtaatgtattatgttaattttatttttagtgaaaatttgaaaattgtaattttttttatagtaaggttaatgtaatttaaaaaggtaggtgttaagtaaattgttttttagtttggtaggatgtatagtgttgtggtttatatttgtttttatttgtttaatttttgaattggaatgt

SEQ ID NO: 596 - DNA, 6161 bp, Artificial Sequence
  chemically treated genomic DNA (Homo sapiens)
  unsure 5853: n is a or g or c or t
atattttagtttaaaaattaagtaagtagaaataaatgtgaattatagtattatatattttgttaagttggagggtaatttatttggtatttgtttttttgaattatattaattttattatgagagagattataatttttaaatttttattgaaagtgaaattgatataatatattatttggtgtatttagtattatttttatagtaagaaaaattaattatatgtaagggggtaatgataaagtattttattatattcgttagacgattaagtgtataatttttatatcgtagttattattgatattttagtagtaagatcgagtgtaataataattatatttattttttaattatagttatttttttatttaatatgttatttataaattttttgtattgtcgttttttgaaattaaaaatgttttaaataaaattatagttaaatagtgcggggttttttatagtagtgatatagattttaattaaatatgtaattgatgattttatttggatagcgagattagttataaattgttacgattttaaattatgtggtgttatttttatgttttaaaaattagagtaattttattattaaatatataaaaaaaataaaaaaaaaaataggttaaaaatttagatatatttgtgatatttagtttaaaagtttttttgtagaagagattttgaacgataaagtgttattaattagcgataggaattttttaaatttagtttttttttagtatgatttagtaatgattttagtgttagagatgtaatataatgagttgatattgaggtattaatatgattttgagtttttaattaaagagagaaatgttattgaaaaatttagtttataaaattattttgttattaatatatatttttaatgggtttaggttagaaataatgtttattaatattttttaaaaagtttttatttgtttataatgggtacgattatgaaggatttttattagaatttatttattagaaaaatgaatagtattgtaattattttgaagaaattttagtttatttttgttggatttttttatatttaagattaagggagttttgtttgtttttttttgtttttttttttttttttatttagttggtgtttgattaaaataattttttagtagatgtttttatatgtaggttttgaggtgtttttgtttttttttgggagaaggattgaaggtacgtataattagtttggatttttattttaaaaatttgggttggttttattgaaatgtttgataagattattattgtttttaggtaaaaatttggggatatattttttttttagttgaaaagcgatttttgatggggtaaggaagatttatttttttattgaatgtttttagtggtaggtttttaaagtgaatagaaatatcgagggttatataggtgatgggggttttttattttatgttttttttataggtggtttagtttttttttatattaaataggtaggtataatttgaatgtttattttatttattttattatttgtttgtagttaaatttttaggttatagtagaaaatgataaattttttattttagtagatgttgggaaagttttagttattttcggttgttaagagatagaaaatatgttaatgtaagattgagattttttaaagttattaatttaaataagtaaaattatgatatttataattattagattttttgtataagttataatttttattaattgattagtttttagtttaaggaattttttattttttttttaaagaaattattttttttttttaattatttttttttttttatgatttttttattaaatgtaataaaataaaaatttaaatattattaaatttaagggtgaatagtgagaattattaattaaaattttgataataattttaaaaatgagattcggtgtttgaaatattaatgaaaatatagaaagttgtttagtaggtgaggtgggttaaaagttaatgataatttttaagtatagagttaagaatttgtatagcgagttaattagaatatagggaatatattgaagaaatggttgtttatataggtagacgggaaattgaatgtagttttgaggtttgtgaaaataaatagtaatttttatagggtagtatttggatatatttttggatttttttttttttttttggtaacgtttagtataaatattgtgagtggtaggaagtttatagatattggatatttttagagtttgaaacggttatttagaataagagatttatttgataagatgttgattatggttaaaaagatatttaaaatgtttttaaaaggaagaaaatttttgagggttagagggtttatagaaggttgttattttattatagatttgtggtaaagaagatgtgtggtttgaatttttatattatttattatatagtgtggaggggaggagataggttgtttatgtttatttgtagtgaataagaatgtttatgattgtaaatagtagatgtaaataaataaaatttagaaagatgagttggtcgattttttttaatgagaaatgttaaataaaatagattgtattaatttatgatttagtttgagtaatatattagtattatgttgtttgattatgaatagtagaagatttattgggtattagagataattgtatttatttttgtagttttttagtggcgagttaatgttttatgtatttcggattttgggtatgatgttagggtatgtatgggggttttttttatttattaaattatttttttttaaatttaattttggttttatttttaatttaatgttttgttttaataattttatatgattaggggatttataaggtagtaattttttaaatatttttttggagaggaggtgtgatagaattttaatattgtagagtagcgtttgttttggtagttatatgagagttaatacgatgttaaatatagcgggagagggaatttgttaattatttttttttttttgtttttttttttgttttttttttttttttatttattttaacgtttttagaatagtgttatttagtagaattttttgtaatacgaatatattttttatttatgttgttagatatggtagttatttataatatgtgattattgaggatttaaaatatggttattatgattaaggaagagaatatttaattttgtttaatttaaatttaaataattatatgtggttagtggttattatattggatagtgtagatattattgtttttgttgtttatttttttttttattttaaattttaattttcggtttttataaatttattttttttaatttattttatgtttttttttaattgagaattttattattgttttagtttttaatgagtatatttaattagtttttttttatgtatttttattttagttggttttgtttttttttttgatttagtggtttttttttttaatgttaatgagttaagatattttaaaatataggtaatataaattattttattttcgtatttataatgtttttaatttttttttttagtaattttatttgtaattttatattatattgttgtttttttttttttattttagtgaattttttttttttattttgaatattgtttagtatgtgtatttgtacgtatatagtaatagtttttattttataaaaattttgtgaaatttggggtgatttttttgtttggaatttttttggtgagttgataaaggtttttatagggattaaaattttttagagaagaggattttttttttttttataaggtattgaaaattttagaatgtaatttaagtgtttgtatttttatatttgttgttagtttgaaatattgtaatattttttaagaaaataaaataattagtttttaaaaaaataattttgaaaaataaaataattcgtatatttaattaaaggtaatatattttattgatttagaagtttttaagtttaataatagtaattgttttatttatttttatttatatagtatttatagtatggatttatattttagagaaattttttggaatgtgtttttttttttttttagtaataaagtatttttaaattgatatataatagttgtatatatttttggggtgtatgtgatgtttgtatatttgtgtaatgttataatgattaaattagggtaattgtgatattcgttattttaaacgtttattttttgtgttgggaaattttttttttgtagttatattgaaatatataataaattattgttaattatgttttaatgttatatgtgaatttttagttttatatgttttaaattattttaatgaattttatatattgtttaaaaaataggtgaaagatgaaaaatttaaaattcgaggggaaattgaagtaaatatgttaggtattatataaataaaaattttttgtttgtttttatattgtattaatattattatgagatatattgattgtagattttgtttatattgtttaaaattaaattattttttaaagagttaatgttatatttatatatatttgggagatggggtttgtattttagattaaaagatattttttttttttatatatagtagttatagtaaagtttgattggtaagtggatttttggtttggataaaagagttgtggaagtaattttgggatatttaatatttgggaaaatttaaataagaattgtagaaaattatgatatattttattaggttatattgtattatgttttttttttttttttgagatgtatttagtttttttgtttgggttggagcgtagtagcgtgattttagtttattgtaaattttgttttttagaataagtaatttttatgttttagttttttgagtagttgggtttataggtgtgagttattatatttagttaattttttgtagttttagtagagatggggttttattatgttgttaggttgattttgaatttttgattttaagcgttttattcgttttgtttttttaaagtgtttggattataggtgtgagttattatgtttagttatattatgtttatttttaaagatatgtgaattatattaggagtgaaatgttatgatgatggaaattttttttataataatttagtaatgaaatagataaaataaatatggtaaaatattaataattgttaaatttaaatgatagtatatggttttttttgttttgtgtatatttgaaaatttttttaataaaagtaaaaataatgaatttaagtagacgttagtaaattattgttatgggttaaatagggtttattgtgtggtttttgttttttttttagttgaacgtagttatagttatttgtatataaattgtggttttttttattttataagagtagggttaagaagttatgatagagattatgttggcgtagaaagtttaaaataattattttttttgttttttatagaaaatgtttgataattttttgattagatgaatagattatagtttgtagtatgaaatatgatttgtgagtagattagttgattttaggagaagttataaaattgattttaaggatgtgaatagaaattatgatgattgaaagtagttattaaaatttaaaaaattaggtcgggcgtggtagtttatggttgtaattttagtattttgggaggttgatgggggcggagaatttgaggttagaagttcgagagtagtttggttaatgtggtgaaattttatttgtattataaaagataaaaattagttgggcgtggtggtagatttttgtaagtttagttattcgggaggtttgaagtaggagaagtgtttgaattngggagggggaggttgtagtgaatttggaatggtgtttattgtattataatttgggtaatagaagggagattttatttttaaatttaaaaataattaattattaattaattaaaaaaattgtttttttgggaaaaaattatttataataaaaaagggattttttaatttttttagttttaaaaaatttgttttaatgtggtgatttttttttttgttttttaaaattttaaaattaagttgggggtggtggtttttttttgtaattttagttattcgggaggttgaagtagaaaaattgtttaaattcg

SEQ ID NO: 597 - DNA, 16217 bp, Artificial Sequence
  chemically treated genomic DNA (Homo sapiens)
  unsure 12269: n is a or g or c or t
gatttttttagaaatagtatttagtgtgttaagtgagggataaattggataagaggtgagaaaaaagtaaaagtttagttataagtttattgtttaggttatatgagagatgttaaaaatttagttaatgaggaagtttagagaagagaattaaagtggatttaaaatatattttgtaagtaaattaaattttgttagttgtatttttgataaatgaaaattgaggaagagatttttttaaaagaaatattttgttaaagtgagtattaggtttatttggaaaattttttcgttatattttttatgattttataaatatattattataaataagtaattatttgattagattaatttagagtaaaaagaggttgattgtggtttatagtataagtaaaatttttagaaagttatgtttatttatatttatttttttgaagtttgggtttaaattagtatatgataaaaattttgtaaatttttttaaataaattattttagggattatagaagtatggtgaattatattatatattatttaaaaggaaattgggttaatagttttttttattaattatttaagtgtagattgttttttacggatgtataattattgtattttgttatatttttggatatttttatatgatgattttaagggaagaggtgtacgatttttattattttgagtaataaaaagtgatagattattatttttgtaagttattttaagatatatgtataattttgggtttttttgttttgttttgttttttgaagcggagtttcgttttgttatttaggttggagtgtagtggcgtttttttggtttatcgaaattttcgtttttagggtttaagagatttttttgttttagttttttaagattatttttttgggattataggttcgagttattacgttcggttaatttttttgtatttttagtagagatggggtttcgttatgttggttaggttggttttaaatttttgattttaggtgatttatttgttttagatttttaaagtgttgggattataggcgtgagttattatgttcggtttaagatgtatatataattttgttaatgtatgatatgtggaattatgattttaatttatgaatttttggatatttaagaataattaaatattaaaaagtagtaacgtttgagatataagatatattatattttttttattaaaataaattaaagttagtgaaggtttgttagtgaaagtaaagttaattattattttttatttaataggtaataaaagttttgtagataatgagttttagaaatattatggaaatttttgaagatattgtttattggaataaatatttatttttattgttttattttttatatgataatataatatggtataatttttattaaagatagaaatgatttttttagtttttttaatttgtgatgtgttgtatttattttttaatttatatatttttaatatggtatattaattgaagtataatttatatatataatgaagattttttttagtgattatgatagtgtgataatttttatttttattttaattttttgagtaagatttagttttaggttgggtttcggtttttaaagatattatttagagaataataatataattatttattagaaaatacgggaaaatttttttttttttttttttttaaatataaatgagaagaaaggagaaagaattgttaagtttagaggttttatataaatgtacgttttagtaggattaatttgtagattatttttttaatatcgtgtaaacgtggttttaatgtaagggtgttttattatcgtattgaggtttttagttttttaaaggaaaggaagtgttggtttaatagagtgttgttaagggtatttggaaagatgagagatttttaaatgtttacggatagtacgatgagatttgtcgttgttttttataattattttgtatagggataagaaatggaattagtttgtattagattaatgtgttatatgatgtttttattaagtttgtatttgtttttaatatattatttaattaagaatttttagatggtattttaaaatataaaattgaattattagtgaaatttttaatttgtgtttaggtaagttaatagtggaatgattattatttttttaagtattaattaattaaaattgttaataaattggagttttagaaaatgtagatcgtaataaagtgaattatatttagaatttagtttataatgtaatttaataggtatgtttataaatataatttattggttattatttttaaatattttttttgtttttattataataatattttgaagagttgtaatatattaaatgatgggaaagaaaaaaattaaaagtgtattgtttgtttttttttttttgtttttaagtttagaatgttattatttataaagtttagttttttttatattattttttaaataatttttttttttaattatagaaataatgtatttttattaaaaaataaaattagaaaatgtaatatataaagatgtaatgaagaaaaaataaaaatatatttataatttttttatttaaaaaataagttttagtatattatggggtttgtttatgtttatatatttttttatattatattataagaaaaaagtatttatatatatttatatgaatttaaatttttattattgttaaataaatttaaatattaaatttagaaaggtaattaatattttggttattgaattttatattatataaattattaataaatttaatagtatttagtttagattttattatatttatttgttaattagtttagttatagagaaattattttttaatttagaaaagattttgttttgtgtgttagtttttttatgttggaaaggatttagtagtagtttattttttgattttagttaaaaagtgtataaaatatgatatatggaatttagtgggaattttatagagaatattaaatttgattttttgaaatttttttttttagtggaagtagattttaagggttttttaattatttttttattagtattaatatttattagatttgttataaatttatttaagatatatggtaaaatttagggatgagtaatttttttttttttttgtaaagaataagaaaatatttttgattttgtggttatatagtttttatttatattaattttgttgttataatataaaagtagttatttataatgtatgaataaatgggtatggttgtgttttaataaaattttatttataaagtttttattttaaaattaagatttttttggaaatgaagagtggtaatggttatggttgtataataatgtgaatatatttaatgttattgatttgtatatttaaaaatagttaaaatgatagattttatgttatgtatattttattataatttaaaaagaaataaaaataaaattttgtttataagatgttttttttaatttttagattatatagttttttttgtttaaaatattttgtgattggtttggcgcggtggtttacgtttgtaattttagtattttgggagttgaggtaggaggattacgaggttaggagattaaaattattttgattaatacgtgaaattttatttttattaaaattataaaaattagtcgggcgagttggcgggagtttgtaattttagttattcgggaagttgaggtaggagaattatttgaattcggaaggcggagtttgtagtgagtcgagatcgcgttattgtatttcggtttgggtaatataaagagacgtagttttaagtaagtaagtaagtaaataaataaataaataaataagaataatgttttattttttgtattattcgggagtttgaggtaggagatagtttttttaatttaggagaattgtttgaattcgggaggtagaggttgtagtgagtcgagatcgcgttattgttttttagtttgagcgatagagcgagatttcgatttaaaaaaaaaattgtgattaagtggtttttaaaatttaatgtgtaatatttgtaaagataaaattgtttttttattaaattttttttttaatatttttgaaattgtaaaaagtattttaaattttaatgttataagtaaagtagttaaaatggggttggtaattttttttttttgttttattttgggttagagtcgaagtatttaagtattttcgagtatgtaatagtaagtaggtttattatattggggaaaatgttttgagtaatgaaaagagtattaagataatttattttattaggtaatttaggtttttttgaaagttataaatgaaaagaaatatagtataaaagatgttatttgagtattattagagtaattttgtaacgtattatttatatattttaaatatttaaggtattatataattgtttaattttatttttttttttttttttatttaaagtttatatttatagttgtttaatgggatgttttttttttttatatttttagtgttttttaataaaatatattattgtttaatatttatattttgtttaattttagatttatttatatatatttaggttgaaaataaatgtttttttataagttagattttgggggattttgtacgttttgttttgtttttcggtttttattgtaattatagttaattagatttagttataagatattaatattgataaagtgtagttcggattagtttttgtatttttatattatgattaatttattatttatttggtatttttttattaaattttgtttttagtttgtgaattttttttttagtttttaataaaggattttattgttttaggaatcgaggtgtggttaagtttttatttgggagtaaaggtgatgtaagcgtttttggtgagatttatttttggtttagggtggggagggatcgtataatagattatttgtagattttttcggaaagtagtagagacgttgtagagggttttttttagatattaattgtagacggttggtaggatagaagtagcggtttatttggatttttttattagggaaattagagataatgatggggtttttttttagaattataggggttttggttattttcgtggtaagttttggatttttttaataattataaatttttttgtttttttttttgttaaagaatattatatttgattgtataatttttattataaattttaaaaggagtgtagtggaaattaatattttgaaatgaaatcgtgaagattattaattttttttttttgttgttttttatgttgtattttatatagaaaaataaattagaaagaaatgagttttaaaaattatttagaattttttttagttaatgaattaagtaattttaattataggttatattttttataatatttttattttttttaaagttatgtttttattagtttttttaatttataaataagaatataggagttatttttattttttaagattatatgttttttagtatatagttaagaattttatacgtttgggtttgatatttgatacgtttttaaaagtaaaaaatcgtagaattaaaattaaagtagtgtttgattttagagaagttgggaggattattaagtaagtatttatgtttagttattatgtgttaaaagaaaatgttagtttttggggatggggggaaagatatataatattttaaagttattttttttagaaaagtaatatttttgttgattgagaaagtcgtatatagtattatttaaaagagaaacggaatgttatagattgtttaaaatttggatgttatagattaatttattttttaattgtgtttttatagtaaaaaaaaaaaaagaaaagttataatattatttgttatacggagatattaaaatagttaaatatattttaaaaatgaatgttaaaataatttttaatgttaatttgtatggtttttatgataagttgggttggtttaggtattaatttattttatttttttatgaaaaaaattgagataaatggattttaagaagttatagggagatagattttaagaaaggatttttttagttttttttaagatttttgtttttgtttttgtttttgagataaggtttggttttgttgtttaggttggagtgtagtggtgcgatttttaatttttgtttttggggtttaagtgattttcgtgttttagttttttgagtagttgagattataggcgtgtattattatagttagttaatttttttgtattgttagtagagatggggttttgttatgttgattagtttagttttaaatttttagttttaatggattcgtttatttcggttttttataatgttgggattgtagatgtgagttattgtatttagtttttaagattttatttttattacgataatgtaattgtgtttagtatttgattttatttgaaaggaggatgttgttaaagagaaatgtgatagttgtatgatttttttatttttttagatgggaaatgtttgggttgaattttaggtggtttgataatttttatgtttaagttaatggtaaagtttaggaagttaggggttatgtagtatgggttgtcgggatagtattgttatgaggatataggattgggttattataagttaagggggatttttttttttttttaatttgatatataggatatttttaattatttttttgattttggagtgattgtgatatttttatattgaggttaatttttatttttatatttttaatgtttattatatttgttttagagtggatatgtaattgtttgaagaatgagtaaatgaatgatttaatgagttttttttaaattaaaaaattttcgtataatgtttttataattttagttataaaggaaattatgaaatgatatgtatttggttttatttaagaaaattttatatatatatgttgtttaaataatagtataattttatatataattgtttaattgagtggtttagatttattttgttttatatggtagttattagttatatgtggttttaagttatttgaaatgtggttggtttgagttgaggtgtgttatttaatataaaatatatattataatttgaagaagattttgaatgaataaaagaatgtaaaatatgttaataattttttatgttgattatatgttgaaatgatagtattttggatgtattagattaagttaatcgtattgttaaaatgtattttattttttaaaaacgttttaaatgtgattaaattttttaattatatgtggttcgtatttgtggtttttagttttttattggatagtattggtttattattaatgttattgatagaaggtagtgttagttaggagagaggtaattaagtttttatggatttagtgaaatttgagttgatttgggataagtatagatggacgggttaaaaggagattttttgggttgttagaagagtataattaaaggtaggtatagttaggatttgtttaggggaaatggatatattagtatgattagtatgatagtttgttttggagaatttggatatgaattggaaaggtagttgagggttagattgaaaagtgtattttgtgaaggtttatggaaattttttataagtggggagttatttagagttttgaaataatgtggttatgggggggaaaagtaatgttttttaaagtatttttaagtgggaatgtttattttttgttgttgtagggtgggttttgaaagttggtagatgtgtttgaaggttttgtaataatttattatttaatgattatatatgggttgtttagaatagtgagaaataatagtaaagttatagatttaaatttttggttatgttattgatttattataggttttgtttttttaattgttaaataagaattatattttattttttgtttaatgaaaatggttatagtgagaataaagtagtaatgtatgtaaaataattaaaaagtgttgtgagaaagatgaagtgatttgtaaattttttaatttttattatttgtattatttttagtaatggggtaatttttgataatttttttatattgtgttttattattttaaataattatggatattagtgttagtaagttaagaaagggtttgtatttgttttgagttaaaaagtatattaaaaatagttgtcgtattaatttttaaattgataggaaaaaataaaagttatatttgggaggagaaggtatggggaataattgtttattattgaaaaaaatgtggtatttattagttttttgtgtttgtttgatttattttatgtaacgtaaaataaacgtttttgaggaaaggatttatggttgaaaatgtttatttttagagatttaattttttgaaaaaaaaatttatttttagaggaaattattgtgttttgtagtttattaaattcgaaatagtttgttatttaatattgttatgagtatttggataatttgttatataattttatgttattatattaggtaaagttttttttattaaaaattaatagagatgtttgaaatttaaagatttttagagtataatttttttaaagaagttggtggtaggaaaaaaaagagagaagtagtttaaatattaagtttgagttagtaagtgttttaaatatagtataattatttttaattattttgttttttataaaatatttaaaaagaaaatttttagaaaaagaattttaggttaaatggtttaaatgtttaataaaatgaaaaatttttaagatattttttttttttttgattgatttagtttttagtattgttaatatatataaaaataaatgttttattgaattttttaaaaagttaatattttaaaattagaatatttttgttaaatggtttttttagttttgtttatttgggtagaagttaggaaagatgtaattatttttattaattagtatttttttttgttttatatttgaaatcggtttttatttggaattagaatatttagtgtttatgaggttttttataaattttttagtttttggttttttttgtttatttaagagttaagttggtagtttaaggtgaggttttgttttgggtagtttattataagaaaattatatagataatttggttattatttataattataagatgaataattgaatttgtttaatatatattttttttttggagagttgttgtgtagttggttaggttgtatattgtataattttaggaggtgtatttatataaattatagcgtgaggagtgttttggtattatttaaggagtaatttatataattgtatagtggagtattgtttttttttttttttttatggttaagaaagagaataattttatgtattttgatagtgaataattataggttattttatataaaaatggtttttttaggttgggtgtggtggtttatgtttgtaattttagtattttgggaggttaaggtaggtagattacgaggttaagagattgagattattttggttaatatggtgaagttttatttttattaaaaatataaaaattagttgggtttggtggtgcgtatttgtagttttagttattcgggaggttgaggaaggagaatcgtttgaattcgggaggtagaatttgtagtgagtcgagatggcgttattgtattttagttttgtgatagagcgagatttcgttttaaaaaaaaaaaaaaaaaaaaaaaaaaatttttttttgttttttttggagtttggggaaaaaatttgttaaaattttttttaaggggtatttaaaaaaaaaaattttttttgggggggtatgtgtttagtatagtttattttgattattttgtttaatagtggttggttttcgtttttttaaatttttttttttttgttttaatttttttatgatatttaatatttttttatatgttatgtaatttatttattattttattgtttttgtttgtttttttttattagattgaaagttttaataatttagggattttaattattttatttatttttgtattttaaatatttagaatatttattagtatatggtgagaattaataaatgtttgttaaatgaatagataggaaaataattatttttttttaggttttaattttttagattgaataaatagagtttattaatttttaagtttaatttttaatatgaatatttttttttatgatttttttttggtttgtttttttattttagtatttattatatgttatgaatttaaaattgaatttagaattttaataaagtttgtatagtttgagagtagaagaatattgatattgaaattttttaattattgatttatatttattatggaattgttatttgatttttgatattattttagaaattaaaaataaattttttttagaggaagtaatagtaaatttgaattttttttttaatggtaaatatgtttgatttttgataattatatggtttgaatgggtagattatttgtttattagtataataattttttgattttttgtagatattttatattaggaagttatatattttaatattataaaatttttaattattatttattggttttatgtattattttatatgtttagaatttgtggttttaaaagataagtgggtttttttttttatttttttttatagttagtaatatttaaattattttggaatatttatgagaattttattttgttatttgaaaataattattatgtaattgttaaagaaattaaatgtgattaaattttagagttaataaaatttaattttgagtttagtatgatttttattttggtgttttattgatataattatttattaaagtttttaaaaatatgtttttttatttgatgggtaggtgggtggaggggtcggtagggtggtagaaatgtatagtttgaggggtgtttgtttttatttttttatgtatttttataaagtatgatgttttggtagtagaatttgatgataattttgtttggttaaaggtatatattagttttttttgttgagattttataagagatgtttttagagagagtaattaaggtataattttttttgttttgtagttagttttgtttatattagagttcgagagaaaatagggtattttggaattaataaggattttataattatttatattgtgatttgaatataatttgtattattttatttaataaatatttattgatatttattttatgttaattttggtttgaatgttggagataaagtagtttataagaaatacgagttttttatttttatgaagtttaaattttgtatttaaaaatttttttggttaaatttgatagtgtaattgagagtttgagataatttaggtaaggtattgagataaaatttacgttaagtgtttagatagtattttagtttttggggtgaattttagttttagtatttttatttttattataataatgtttaattatggttatataaagtatttttaatttagtgtttatagtgttaatttgttattaatgaattgatttaagtattttttaaaataatttagtttattagttatatattattttttgggagtaatttttttttgaattgttttattgggtaatggatagaatattagaaagagagtaaggtttatgttattttaagtttttgtgaaaagatgagttcgtttttttatttttttaggtttgcgttatacggagaataaaaaagtagaatttgatttaatgatattaaagtttttttgtagttgtaagtttttgtgattttatttttttttattatttaaaatttgtttttttaagtattaaaggatattttatatttgttatattatgtttatttatatttaatgtttatttatatattttataattatataaatttagaatatatttttaaagtttaatatttttatttttatttttttttttaatttttatttttagtttcggggtacgtgtttaggatgtgtaggttgttatataggtaattatgtgttatggtggtttgttgtattaattatattattatttaggtattaagtttagtatttattagttattttttttgatgtttttttttttttaatttttttttttttataggttttagtgtgtgttgttttttaatatatgtttatgtgtttttattatttaatttttatttataagtgagaatatgtgggtttgtttttttgtttttgttttattttggngaggataatggtttttaattttataaaaaaaaaaaaaaaaaaaaaaaaaagtttttttatgttttttttgaagtttggtgatagaattggttaatattttattaaatggtaatttaataaaattaatttattttgggttgggtttatttatgtgttttatatttattaatttaatttttataataaatttataaggtaagtaaaattaatttttatttttattgtatagatgaagaaattgaaagattaaggaatgtttttaagttatatgttagtatatggttgggagttggatttaaatttagtgatttagaatttagtatttaattttatattattatatttgattgtagtttatatagtattttaaatgagtatttaagaatatttagggatatttattttttttagtattttgttatgatataaggtttaattttttaaattaattgaatttattttaaaaattagttattggaaattgaattttttataattaaataatttttaagtaattagatatatattaattttgtttaattaaggaatttgttttgataaatataaagtttattataatgttttagagtttttaaattttaaattttaatatatatagaaagttatgagatattatgaaagatgttaatatgaatgatattatttatttgtgtatattttatgatattttttttaaaaaaatttaataaatataaaattatgtttaaaatttggattgatttatttgaattatttaatttattttataaatttttttaagaatttttattttagaaattagaagtgtagttaggttttaggtttggttgggatgagttatttgtatttaatttatagttttatgttttgttttttgttatattaaagtatgaggtaattttaaataagatttcggttaaattaaagagtaggtgttattatatttgttttttgtttaatttagttatttatatttttagattatatttattgtgtatatattatatttaataggaattttagtgatataattatatatatttttattaataaatagagtatatggatattaaattgttttattttatatattttttaaatttaataattagatttgtttttgataatatttgtaatttatatttatattaaggtattaaggttatattaatgttttaaaaattatataattaaaatttataaaataattagaaaataaaaagaaagaaaagtatagtaatttttaagataagggaggttttttttatgttggtatttttaatttaggttattaaaagagataatttagtttatttaaatcgttagaaaattatgtaaatatttattggtttgatttagttattttatagtttatatatattttaaaataatatgtatatgataaatatatataattttgttaatgaaaatagatttataaataaaaatatataaattgtttttaaaatgtttaaaattattatattagtaaattaattaaaataagtagttattatataaatattaattaaaataatttttttaaaaaaatattattttaaataatgtaaggttgtgttgttttttaaaaatttgaagattattgtaatatttagaaatgttttttattatttattttttgggaaaataaatattttattttattgtgtattagaagaattattttttgtagggttagtttaagtatgatttatattttcgggatgattttttagtttttttgtaaaggggagtttgtttggtttatttttttttttatgtgtagttgagttatttttatgcgttgagaaaggaattgtgtagttattatatttatttggttttttttattaagtaatttaaggtattgttttaaaaagagtaataatgttggaaaataattttgagatatgttataattataagtaatggtttttttttatgataaatttgaatacgtattttttggaattaaggttttagttggaatgtttagaagggaagagttttgatattttatgtttgatataattatttatttggtttagatttggattagtttatttattataattttagaaaataaataatttatattgttttaagagtaattatagttttttgttaaatagaaatttaaattgattgttatataattttttttgtattattagtttgttttttttttttttttttttatgataattttggttaaaatttagtagtagttggtttatatttgtaattttagtattttgggaggttaaggcgggtggattatttgaggttaggagttcgagattagtttaattaatatggtgaaatttcgtttttgttaaagatataaaattagtcgggtgtggtggtgtgtttatgtttgtatttttgttattcgggaggttaagggtaagagaattttttgaattcgggagacgaagtttatattgagttaatgatcgtattattgtattttagttagggtaaaaattgtattttagttcgggttaaaaagagcgaaattttcgttttaaaaaaaaaaaaaaaaagaatttagtagtagtgaggtatatgttttggagttaggttattgcggtcgttattttattatggttattagttagggtaaagtatttatttttttgtatttttaattttttatttgtatattagggattataatattagaattttttttaggtgtttgttgtaagtattatataaaatagtaagtataaagttttaggagtagtagttgatatcgaaattatataataaatattagttattgttattatttttttagtttttttttttttttgatttattttttattattatttttcgattagatttattcgataattagtggattagtaaatatttgttaagtatttgtgagggttataagaaaaaaaaaataatttaatagtattgaattggaaagtttataatatttttggtttagtatagaaatttttttatgtgtataaaataagaaataataaattgtggtaaattattatgggttaaattttatggtatagaatatgtgttgtataaatttagaaaaagagatattagtaaagataattttatggaggttgttggaatttgatggatttggaaggatgagtaatatttaagtgggtggagtagaaagaggtaatgtatgttaggtagaatagaagatgaaaaatgatatagatgaatgttttatatgtttttgagaaggtgaagattttagtttatatggttttattttattgttatttaattttttggggttattttgaaaattaagtttaatatttaaattgaagtaatagagtagagatgaatagatttatgttttattgtaaatagggtttgtgattggaatagtatatttttattttttacgttttgttttttaaattagattggttttattttattttttttatttgtataattaaagaaaatgttttgtaattgtagaggattaatataggattgtttttttataaattagttgggtggttgaaggtttttaataattttttgtggtttttttttgaagtattttataatggtgtttattaatgttttttaaagtaatgatttttatagtttttaggaacggtgtataaagtagttaggtaagaattgtgtggttgttgtaattgattattaggtatagtttttgtaaagtttaataggtttttttttatgttattaaaattttgtagttaattaaaaaattggtggaatgtgtttatattgatagtaatatttttttttttggtaggaatttattttttgattatggttttttgaaatttattttttttgaaatagaaataaattataatatgaataatagaatataataattaggattatttattgtatataattttttatttgaagaatttatatttaattcgattttatttaaatgtttgtagg

SEQ ID NO: 598 - DNA, 16217 bp, Artificial Sequence
  chemically treated genomic DNA (Homo sapiens)
  unsure 3949: n is a or g or c or t
tttgtagatatttaaataaagtcgaattaaatgtgaattttttaaataaggaattatatataatgaataattttgattattatattttattgtttatattgtgatttgtttttattttaaaagaagtaagttttaagaagttataattaaagggtaagtttttattaggaaaaggaatattattgttaatataaatatattttattagttttttaattgattatagaattttgatgatataaagaagaatttattggattttgtaaaaattatgtttaatagttagttgtagtaattatataatttttatttggttgttttatatatcgtttttggaagttatgaaagttattgttttgggaaatattggtaagtattattgtgaaatgttttagaaaggggttataggggattattaaaaatttttagttatttaattgatttgtaggaaggtaattttgtattagttttttataattatagaatattttttttaattgtataagtgaaaagaatggaatggaattagtttggtttagagaataaaacgtaaaagatgaggatatgttattttaattataaattttgtttgtagtgagatatggatttgtttatttttgttttattattttaatttaaatattgaatttaatttttagagtggttttaaaaaattaaatgatagtaaaatgaagttatgtaggttagggtttttatttttttaagagtatatgagatatttatttgtgttattttttattttttgttttgtttggtatgtattatttttttttattttatttatttaaatattgtttatttttttagatttattaagttttaataatttttatgaaattgtttttattgatgtttttttttttgagtttgtataatatatattttgtattatgaaatttagtttatgatggtttattatagtttattattttttgttttatgtatatgaaagaatttttgtgttaagttaggagtattgtaaattttttagtttagtgttattaggttatttttttttttttgtaatttttataggtgtttaataagtatttgttaatttattgattatcggatgaatttggtcggaaaataatggtggaaaataagttagaagaaaaaaaaaattagaagagtaataatagtagttaatgtttattgtgtagtttcggtattagttgttatttttagagttttatatttattgttttatgtaatatttatagtaggtatttgaaggagattttagtattataatttttagtatatagatgaagaattggagatgtaagggaatgaatattttgttttagttaatggttataataggatagcgatcgtagtagtttaattttagagtatgtattttattattattaaattttttttttttttttttttgagacgggagtttcgttttttttggttcgggttggagtgtaatttttgttttggttggagtgtaatggtgcgattattgatttaatgtaagtttcgtttttcgggtttaagggatttttttgtttttagtttttcgagtaatagggatataggtatgggtatattattatattcggttaattttgtatttttagtagagacggagttttattatgttggttaggttggtttcgaatttttgattttaggtgatttattcgttttggttttttaaagtgttgggattataggtgtgagttaattattgttaaattttaattaaagttgttataaagagaaaaaaaaaaaaaataaattaatggtataaagaaaattatatgatagttaatttagatttttatttggtaaaagattatggttgtttttgaaataatgtagattgtttattttttagggttataatgaatagattagtttaagtttgaattaaatgagtaattatgttagatataagatgttaggattttttttttttagatattttagttgaaattttgattttaaagagtgcgtgtttaaatttgttatggaaaagaattattatttgtggttataatatgttttaaaattattttttaatattgttgttttttttaaagtagtattttgagttatttggtagaaaagattagataaatgtagtaattgtataattttttttttagcgtataaaaatgatttagttatatatgagaggagggatgggttaggtaggtttttttttataggaaaattggagagttatttcgaaaatatgaattatgtttggattagttttatagagaatgatttttttaatatataataaggtagaatatttgtttttttaggaagtaggtgatgggaaatatttttgaatattgtaatgatttttagatttttagaggatagtatagttttatattatttagaatagtatttttttaaaaaaattattttagttaatatttatataatggttatttgttttagttaatttgttaatataataattttggatattttaaaaataatttatgtgtttttatttgtaaatttatttttattgataaaattgtatatatttattatgtatatgttgttttgagatatgtataaattgtggaatgattaaattaagttaataaatatttatatagttttttgacgatttgaatgaattaagttgttttttttggtggtttggattggaaatattaatatggagaaaattttttttattttgagaattattgtatttttttttttttttgttttttggttattttgtaaattttaattatatgatttttaaagtattgatatagttttagtgttttggtatagatatgaattataaatattattaaaagtaaatttaattattaaatttaaaaaatatatgaaataaagtaatttgatatttatatgttttatttgttaataaaaatgtatatggttgtattattaaggtttttattgaatatggtatgtatataataaatataatttgaggatatgggtagttagattaaataaaaagtaagtataatagtatttgttttttagtttggtcgagattttgtttggggttattttatgttttagtgtggtaggggatagaatataagattatggattagatgtaggtagtttattttagttaggtttagggtttgattatatttttgatttttagaatggggatttttggggaaatttgtagaatgaattagataatttaaataaattagtttaaattttaaatatgattttgtatttattaaatttttttgggaaaaatgttatgaaatatatataggtaagtaatattatttatattagtattttttataatattttatagttttttatatatattgaaatttaaaatttaaaaattttgaaatattgtgataaattttgtatttattaaagtaaattttttaattgaataaagttgatatatatttgattatttggaaattatttaattgtgaagaatttaatttttaataattgatttttagagtaaatttaattaatttagaaagttaagttttgtattatgatagaatgttaagaaaaataaatatttttggatatttttaaatgtttatttgaaatgttgtgtaggttgtagttaagtatgataatataaaattggatattggattttgaattattgaatttaaatttaatttttaattatgtattagtatataatttgggaatattttttaattttttagtttttttatttgtataataggaataaaaattaattttatttattttataggtttgttgtgaggattaaattaataggtgtaaagtatataggtgagtttagtttaaagtaagttagttttattaaattgttatttaataaaatgttaattaattttgttattaaattttaaaagaggtataaaagagtttttttttttttttttttttttttttataaagttggaagttattatttttnttaaaataaggtaggaatagaaaagtaaatttatatgtttttatttgtaagtgggagttgaatgatgagaatatatggatatgtgttggggaataatatatattagggtttgtgggagaggggaagttgggggagggagagtattaggaagaatagttaatggatgttgggtttaatatttaggtgatggtatgattggtgtagtaaattattatggtatataattatttatgtaataatttgtatattttggatacgtatttcggaattgaaaataaaagttgaagaaaaaaataaaaataaaagtgttaaattttaaaaatatattttaaatttatataattataaaatgtatgagtgaatattgaatatgaatgaatatagtgtaataaatatagaatattttttgatatttaaaagggtaagttttggataataaaaggaagtagaattataaaagtttgtaattgtaaaggaattttgatgttattagattaagttttatttttttatttttcgtatgacgtagatttagagaggtaaaaagacggatttatttttttataaaagtttgaggtagtataagttttattttttttttagtgttttatttattatttaatagaatagtttagaaaaaaattatttttaagaaatggtgtgtggttagtaaattaaattgttttaaaaaatgtttaaattaatttattaataataaattaatattgtgaatattaaattggaaatgttttgtgtaattatggttaggtattgttatggtagggatagggatgttgaaattgaaatttattttagaaattgaaatattgtttaggtatttgacgtaagttttattttagtattttatttaagttattttaaatttttaattatattgttaggtttaattaaagagatttttaagtgtagggtttaagttttatgaaaataggaaattcgtgttttttgtgaattattttatttttagtatttaaattagaattggtataaaatagatattaataaatatttattgaatgaagtagtgtaaattgtatttaaattataatgtgagtgattataaagtttttgttgattttaagatgttttattttttttcgggttttgatgtgaatagagttgattataaggtagaagaaattatgttttagttgttttttttgagaatattttttgtaaaattttaataaggaaaattagtatgtatttttaattagataaaattattattaagttttgttgttaaaatattatgttttatgaaaatgtatgaaaaaataaaaataaatattttttaaattgtgtatttttgttattttatcgatttttttatttatttgtttattaagtaaaaaagtatgtttttaaaaattttgatagataattgtgttaatgaggtattaaggtaaaaattatgttagatttaagattaaattttgttagttttaaaatttggttatatttagtttttttgataattgtataataattatttttaaataataaaataagatttttataaatattttagagtaatttaagtgttgttggttataagagaaggtaaaaggagaaatttatttattttttggaattatagattttaagtatgtggaatggtatatgaaattagtagatagtaattgaaggttttataatgttaaaatgtatggttttttagtgtaaggtatttatagggggttaggaaattgttatgttagtgaataagtaatttgtttatttaaattatgtggttattaaaggttaggtatatttattattgaagaaggaatttaagtttattgttgttttttttaggagaagtttgtttttagtttttggaatgatgttagaaattaagtagtagttttatgataaatatggattaatagttagagaattttagtgttaatatttttttatttttagattatataagttttattgaaattttgaatttaattttgaatttataatatgtaataaatattaaaatggggagataagttagaagagaattataaaaaaaagtatttatgttggaagttagatttaaaagttaatgaattttgtttatttagtttaggaagttaaagtttgagggaggatagttatttttttatttatttatttagtaaatatttattagtttttattatgtgttagtaagtattttaagtatttaggatatagaagtaaataaaatagttaaaatttttgagttattgaggtttttagtttggtggaaggagatagataagaataataaaataataagtaaattatatagtatgtaggaaagtattgagtgttatgggaaggttagagtagaggaaggggaatttaaaagagcggggattagttattgttaaataggatgattaggatgagttgtattgaatatatgtttttttaaaaaaagtttttttttttaaatgttttttaaaaaaaattttaataaattttttttttaaattttaaaaagggtaaaaaaaagtttttttttttttttttttttttttttgagacggagtttcgttttgttataaggttgaagtgtagtagcgttatttcggtttattgtaagttttgtttttcgggtttaagcgattttttttttttagtttttcgagtagttggaattataggtgcgtattattaagtttagttaatttttgtatttttagtagagatgaggttttattatgttggttaggatggttttaattttttgatttcgtgatttgtttgttttggttttttaaagtgttgggattataggtatgagttattatatttagtttaaaagagttatttttatgtgaagtgatttgtaattatttattgttaaggtgtataagattgtttttttttttgattatgagaaggagaaaagaaatagtattttattgtataattgtgtaggttgttttttgagtaatgttagggtattttttacgttgtagtttatgtgaatgtattttttggagttgtgtagtgtataatttagttagttgtatagtagttttttaagaaaaaggtgtatattagatagatttaattatttattttgtgattatgagtagtaattaaattgtttatgtaatttttttatggtgaattatttaaagtaaggttttattttaggttattagtttgatttttaagtggatagaaagagttaaaggttaaaaggtttgtgagaaattttatgagtattgagtgttttagttttagatgaaaatcggttttaggtatgaagtaagagggagtgttaattggtagaagtaattatattttttttgatttttgtttaagtaggtagggttggaagaattatttggtaagggtattttgattttagaatattaattttttgggaagtttagtaggatatttatttttatatatattagtagtgttggaaattgggttaattaggagaagaagagatattttagagattttttattttgttaaatatttgggttatttagtttagaattttttttttaaagattttttttttagatgttttatagaaaataaagtggttgaagatagttgtgttgtatttagaatatttgttaatttaaatttggtatttaaattgtttttttttttttttttttattattaatttttttaaaaaaattgtattttaaaaatttttagattttaaatatttttattaatttttagtgaggaaagttttatttaatatagtaatataaagttatatagtaaattgtttaaatgtttatagtagtgttggatgataaattgtttcggatttggtggattataaaatataatggttttttttgaagataaattttttttttaaaagattaaatttttgaagataagtatttttaattatgagttttttttttaaaaacgtttattttacgttgtataaaatggattaaataagtataagaaattgataaatattatattttttttaatagtagatagttattttttatgttttttttttttaaatatagtttttatttttttttgttaatttaaaaattgatacgataattgtttttgatatattttttagtttaagataaatgtaggtttttttttgatttattaatattggtatttatggttatttaagatagtaagatataatgtgaagaagttattaagaattattttattattaaaaatagtataagtgataaaaattaaagggtttataaattattttattttttttatagtattttttaattgttttgtatgtattgttgttttatttttattatgattatttttattaggtagggggtggggtgtgatttttatttgatagttgaggaaataaagtttgtagtgagttagtggtatagttagagatttaagtttatgattttgttattattttttattgttttgggtaatttatgtatggttattggatggtggattattataaaatttttaaatatatttgttaatttttagaatttattttgtaataataaaaaatgagtatttttatttgagaatgttttagaaaatattgttttttttttttatgattatattattttaaaattttgggtggttttttatttgtaaaaggtttttatgagtttttataaaatgtattttttaatttgatttttagttgtttttttaatttatgtttagattttttaaagtaaattgttatgttagttatattggtgtgtttattttttttaggtaaattttaattgtgtttgtttttgattatatttttttgataatttaagagatttttttttggttcgtttatttatatttattttaaattagtttaaattttattgaatttataaagatttgattgttttttttttgattgatattgttttttattaatagtattaatagtagattagtattgtttaatagaaagttaaaaattataaatgcgaattatatataattaaaaaatttagttatatttaaaacgtttttaaaaggtgaaatgtattttaataatacggttaatttaatttaatatatttaaaatattattattttaatatgtaattaatataaaaaattattgatatattttatatttttttgtttatttaaagttttttttaaattatgatgtatattttatattaaatagtatattttaatttagattaattatattttaagtggtttaaaattatatgtggttggtggttattatatgggatagagtaggtttagattatttagttgaataattatgtatgaagttatattgttgtttaaatagtatgtgtatgtaaaatttttttgagtggaattaaatatatgttattttatagttttttttatgattagaattatagggatattgtgcgggggttttttagtttagagaaggtttattaaattatttatttatttattttttaaataattgtatgtttattttaagatagatataataagtattgagaatataaaaataaaaattagttttaatataaggatgttatagttattttagaattagaggagtaattgagagtgttttatatgttaaattagaaaaaaaaaagaattttttttagtttatggtggtttaattttatgtttttatggtaatattatttcgatagtttatgttgtatggtttttaattttttgagttttgttattggtttggatataggggttattagattatttggggtttagtttagatattttttatttggaaaggtgggaaagttatataattgttatatttttttttaataatattttttttttaaataaaattaggtattgaatatagttatattgtcgtaatagaaatagaattttagaggttgggtgtagtggtttatatttgtaattttagtattatgggaggtcgaggtggacggatttattgaggttaggagtttgagattagattggttaatatggtaaaattttatttttattaataatataaaaaaattagttggttgtggtggtgtacgtttgtaattttagttatttaggaggttgaggtacgagaattatttgaattttagaggtagaagttggagatcgtattattgtattttagtttgggtaatagagttagattttgttttaaaaataaaaataaaaataaaaattttagggagagttaagaaagtttttttttgagatttatttttttgtgattttttgaagtttatttattttaattttttttatgaagaaatgaggtaaattgatgtttaggttaatttagtttattatggaaattatataaattagtattaggaattgttttgatatttatttttaaggtatatttaattattttgatattttcgtgtaatagataatattgtgatttttttttttttttttttgttataagaatatagttaaggagtaagttagtttgtaatatttaggttttaaatagtttgtaatatttcgttttttttttagataatattatgtacgatttttttaattaatagaagtattatttttttgaaaaaaatggttttaaaatgttgtatgtttttttttttatttttaaaggttgatatttttttttggtatataatagttaaatataaatatttatttaataatttttttaatttttttagagttaaatattgttttgattttaattttgcgattttttatttttaaaagcgtgttaggtattaagtttaggcgtgtagagtttttagttatatgttaagagatatgtaattttggaaaatagaagtggtttttgtgtttttgtttgtgggttagaaaaattagtaaaagtataattttaaagaaagtgaaaatgttgtggaaaatataatttgtgattaagattatttaatttattaattaaaaaaaattttaaatggtttttaaaatttatttttttttggtttatttttttatgtaaaatataatataaaaaataataaaagaaggaaattggtaatttttacgattttattttaaagtgttgatttttattgtattttttttagaatttataataaagattgtgtaattaaatataatattttttaataagggaggaagtagggaagtttgtgattattaggaaaatttaggatttattacgaagatggttagagtttttgtagttttggggaagagttttattattgtttttgatttttttggtgaaaaagtttaagtgagtcgttgtttttattttgttagtcgtttgtagttgatgtttaagaaaagttttttgtagcgtttttgttgtttttcgaaggagtttatagatggtttgttatgcggtttttttttattttaaattaagggtaggttttattagaaacgtttgtattatttttgtttttaggtaaaaatttagttatatttcgatttttaaagtaatgaaattttttgttggaagttgaaagaaaagtttataggttaaagataaagtttaataggaaggtattagatgaataataaattaattatgatgtggaagtgtaaaagttagttcggattatattttgttagtgttgatgttttatggttgaatttagttgattatggttataatgaaaatcgaaaagtaaagtaaaacgtataaaattttttaaaatttaatttgtaaaagagtatttatttttagtttgagtatgtgtgggtagatttaaagttaagtaaaatgtagatgttaagtaatgatatattttattgaaaggtattaaaaatatgaagaagaaaaatattttattaagtaattatgaatgtaggttttgaataaaaaaaaaaaaagaaataaaattgaatagttatatggtgttttgaatatttgaaatatataaataatgcgttgtaaaattattttgataatatttaaatgatattttttatattgtatttttttttatttataatttttaaaaaagtttagattgtttaataaggtagattattttggtgttttttttattatttaagatattttttttagtgtggtgaatttgtttgttgttatatattcggaagtgtttaaatatttcgattttaatttaagataaagtagaggggaaaaattattagttttattttagttattttgtttataatattagaatttaaagtattttttatagttttagaaatattgaaagaaaggtttggtagaagagtaattttatttttgtaagtattatatattaggttttagaaattatttaattatagttttttttttgaatcggggtttcgttttgtcgtttagattggagagtagtggcgcgatttcggtttattgtaatttttgtttttcgggtttaagtaatttttttgaattgaggaggttgttttttgttttaggttttcgagtagtatagaaaatgaaatattatttttatttatttatttatttatttatttatttatttatttgagattgcgtttttttgtgttgtttaggtcggagtgtaatggcgcgatttcggtttattgtaagtttcgtttttcgggtttaagtgatttttttgttttagtttttcgagtagttgagattataggttttcgttaattcgttcggttaatttttgtagttttagtagagatggggttttacgtgttagttaggatggttttgattttttgatttcgtgatttttttgttttagtttttaaagtgttgggattataggcgtgagttatcgcgttaggttaattatagagtattttaagtagaaaggattgtgtagtttaggagttagaaaaaatattttgtgaataaaattttgtttttgtttttttttaaattgtggtaaaatatatataatataaaatttattattttaattatttttaagtgtataaattagtggtattaaatatatttatattgttgtgtaattatgattattattattttttatttttagaaaagttttggttttgaaataaagattttgtaaataaagttttattggaatatagttatgtttatttgtttatgtattgtgaatggttgtttttgtgttgtaataatagagttgatatggatagagattgtatggttataaagttaaaaatatttttttgttttttatagaaaaaaagaaaaattgtttatttttgagttttattatatattttaaatggatttgtgataaatttgatgagtgttgatgttaatagagaaataattagagaatttttaaaatttgtttttattaggaaagaaaattttaaaagattaaatttggtgttttttgtagagtttttattaaattttatatattatattttatgtattttttgattaaaattaaaaagtgaattattattgaattttttttaatatgggaaaattgatatataggataaggttttttttgagttaggaggtaatttttttgtgattagattagttaataaataaatgtgatgaaatttgagttgagtattattgaatttgttagtgatttatataatgtggaatttagtgattaaaatgttggttatttttttgaatttagtgtttgaatttgtttaatagtggtgagagtttgggtttatgtggatgtatatggatgttttttttttataatataatgtgaggaaatatataagtatggataaattttataatatattagaatttattttttgaatgaggggattatagatgtatttttattttttttttattatatttttatatattatattttttgattttgttttttaatgaggatatattgtttttataattaaaaaagaaagttatttgaaaaataatgtgaagaaagttagattttatgaataatagtattttaaatttggaggtagggaagaagagataaataatatatttttagttttttttttttttattatttaatatattgtaattttttagagtgttattgtgatgaaggtaaaggagatatttaaaaatgatagttagtgaattatatttgtaagtatatttattaaattgtattgtggattaaattttagatatgatttattttgttacgatttgtattttttaaaattttagtttgttaataattttaattaattagtgtttaaaaaggtaatgattattttattgttagtttatttgaatataggttaaggattttattggtaatttagttttgtattttgaaatattatttagggatttttggttaggtagtatattaagagtaaatgtagatttgataggagtattatatggtatattggtttgatgtaggttggttttattttttgtttttgtataggatgattgtagaaagtaacgataaattttatcgtgttgttcgtaggtatttggggattttttatttttttaagtgtttttgatagtattttgttaagttaatatttttttttttttggaagattggggattttagtacggtaataaagtatttttgtattggggttacgtttatacggtgttaggaaggtaatttgtaggttagttttgttgggacgtgtatttgtgtagagtttttggatttagtagtttttttttttttttttttatttatgtttggaaaaggaaagaagaaagaattttttcgtgttttttagtgagtggttatgttattattttttagataatgtttttggaaatcgaagtttaatttaaaattggattttatttaagaggttgaaataaagataagaattattatattattataattattgaaagggatttttattgtgtgtgtagattgtgttttaattaatgtgttatgttgaaaatatatgagttggaaagtgggtataatatattataggttgaaaaagttaaagaaattatttttgtttttggtggaaattgtattatgttatattgttatataaggagtgaagtagtaagaatgaatatttattttaatgggtagtatttttagaggtttttatgatgtttttagaatttattatttatagaatttttattgtttgttaagtagagaatgataattaattttgtttttattggtaagtttttattggttttagtttgttttgatgggaaagatgtaatatattttatattttagacgttattattttttggtatttaattatttttgaatatttagaaatttatgaattgagattatagttttatatattatgtattaataaaattatatatatattttgggtcgggtatggtggtttacgtttataattttagtattttgggagtttgaggtaggtggattatttgaggttaggagtttgagattagtttggttaatatggcgaaattttatttttattaaaaatataaaaaaattagtcgggcgtggtggttcgagtttgtaattttaggagggtaattttggaaggttgaggtagaagaattttttgaattttggaagcggaggtttcggtgagttaagaaagcgttattgtattttagtttgggtgatagagcgagatttcgttttaagaaataaaataaaataaaaaaatttaaagttatatatatattttgaaatggtttgtaaaaataatgatttattattttttgttatttaaagtaatggaaatcgtatatttttttttttaggattattatatgaaaatatttagaaatgtaataaaatgtaataattgtgtattcgtagagaatagtttgtatttgaataattggtaaaaggagttgttaatttaatttttttttagatggtatgtaatgtggtttattatgtttttgtgatttttggaatgatttatttaaaaagatttgtaaaatttttattatatgttgatttaaatttagattttagaagggtaaatgtagatgaatataattttttaaaagttttatttatgttgtggattatagttaatttttttttgttttgaattagtttggttaggtaattgtttatttgtggtagtatatttgtaaggttataaaaagtgtgacgaaggagttttttaaatgaatttaatgtttattttaataaagtgttttttttaggaaaattttttttttagtttttatttgttagaggtataattgataaggtttgatttatttgtaaaatgtattttgaatttattttagtttttttttttgagtttttttattagttaaatttttaatattttttatgtagtttgggtagtgggtttataattgagtttttgttttttttttattttttgtttagtttgttttttatttagtatattgagtgttatttttaaaaagatt

SEQ ID NO: 599 - DNA, 19082 bp, Artificial Sequence
  chemically treated genomic DNA (Homo sapiens)
atttttttattttagtttttttagtagttggtgtatacggttatgttaggttaagttttgtattttgtatttttgtaggaagggggtttaattatattgtttaggttggttttaaatttttgggtttaagttatttttttgtttcggttttttaaagtgttgagtttataggtatgagttatcgtgttcggtttaaaaaatatatttttaaagtataatggatagtataatttatttgtgttaaatataaattaaatggtaataataataataataaaaatttattattttagtgataaaaaatgagaagtttttttgagttatttaatttttataaagttaagtatttttttttagtaaaaatgaaaaattattgtaaatagataaatttttttgtttttgaatgatatttaaattaagtaaattaaagatagtttggggttaatgtatatattttataaatatttttttatttttgaaacgagttttgttaaatagttttttttattttgataattttaattaggagagattaattttatttttgtgataatttagattttagatttattatttttggaggattttaatttatttagataaatggaagagaaaagaaagagtaaaatatatatatttattttattattaagattttaattgtttgatattttaataggtattttttttttttttatattatggttttaattttagtttttgtttgtaattttgatttattaaaatattattttttggtcgggtattgtggtttatgtcggtaattttagtattttgggaggttaaggtgggtggattgttcgagtttaggagttttagattagtttgggtaataaggtgaaattttgtatttataaaaaatataaaaattagtttagtgtggtggtgtgcgtttatagttttagttattggggaggttgaggtaggaggatgatttgagtttagaaggtagaggttgtagtgagttaagattatgttattgtattttaggttgggcgataagtgtgagattttgttttaaataaaataaaataaaataaaaattttagaattatttttttgttaggtagaatagttattttaatttatgggttataaatttttttgtgatgaagaggtattatttattaatataaagatatagagagtttttatgggattttgagtaagtaaatgattttttttaattttattgaaattaaagtgtcgtttttttttaaaaatttgttttgaatatgattgattcgttttttttaattgtaaggtgatttttaaggttagttagagagaaagttgtttgttagtgatttgttttattagtataaggggagttatttatgagtggtagggaaaaaatagttgattttaggttagttagtgaagattttgttagattttggattttgattttttaaattaagttgtaagaaaataagttatttttaaatttttttgttgcgtttttaaaattttataaatatatttttattatagtatatttaatgttgtattgtaattatttgttttattattgtagattttgatattttgtagaaaaagagttatgttttatttatttttatgtgtttagtattgaatttgttgtgtaatatggtagatgtttaataattgttttttaaatgaatgtattttaaatgtgtttaagagggaggtttattgatttatatgtgggataaagataggaatattaacggttaaaatttcgtatttagtaaagaatttttggtttaataggtggtattttaagttttatatgttttatagtgtttaagaatgtttacgtattttattttatttgatttttattgtggatttggaaggttggtagagtaagtgttatttttattatatatatgaagaaattgagtttttgtataagtaaattgtagtattaagattataattatgggtaagttattttcgttttttattgtgtgatgagttaatttggataattgatgtgtgtgtgtgtgtatgtgtatgtgtgtgggtgtgtgttgaggtggggggtgttttatttgtcgggtatgttaatttgtttattttatttttttatttttttttattatttttagagaaagataaatgaaagttattgtttttttagagtaggtatgtttggtagttggaagtcgttcgtgtttttggggatgtttggaaaagtttaggaagtagtaagatgggtgaggaagtaacgtagttagaggtgtgattggtggcgtgggtttttcgtttttttttttgttttgtttgtagattgaatagttttgtgagtttgggtggtgtttgggtttgtgtggagtttggtttttatgatcgtaaggggatttttggttaataagagtttttgttattattgggggggtggttaatagatatgtgggttttttttaaaaggataattttatcgtgtaattgtgtagtttttttattatatattagggaagaataatttttgaattttttttttttttttttttttgagatagagttttgttttgttatttgggttgtagtgtaatgatacgatttttgtttaatataatttttattttttggatttaagtgatattcgtgtttttgttttttaaatagttaggattataggcgtttgttattatatttagttaatttttgtatttttagtagagatggggttttattatgttggttaggttggtttcgaatttttgattttaagtgatttattcgtttttgttttttaaagtgttgggattataggtatgagttatcgtacgggtttttgaattttttaaattaaagttttattataatatatttaagggtagtgattggattttatttatttttgtatgttgtagagtatttttatattttaggttataattatttgttgaataaatgagatgtatagagggaaaatattttaaatgaaatgttgtatattatgtattgatattttttttttatgtatgttttttttttttttattaatggatattatgggttgtttgtgtagaggttgatttttagttattgattttgtttgagaaaaattatcgttttgtttatagattagtgtttgtataggttgagtatttttaatttgaaaatttgaaatttaaaatgtttttaaatttaaattttttgagtattgatatgatgattataagtggcgaattttatatttgattttatgtgatgatttgtagttaaagtgtagttaaaattttgttttatgtataaaattatttaaaatattgtataaaattatttttaggttatgtgtataaggtatatagaaaatataaataaattttatgtttaggtttgagttttatttttaaagatttttcgttacgtttatgtaattattgtaaaatttaagaaaatttagaatttaaaatatttttggttttaagtattttggataaggggtatttaatttgtataattatttaaatatttgattattttggttttattaaagattcgaggaaattgagattacgatgtaaattattggttgtgttaatagtgataaatttttattttattatatgtgtttattttttgaatttaagacgtttagttgtaaaaagaaaaagaataagatattttgttaaaaattatgtttaaagggttaagttgttatgagaagtgttataatacgataaattttagaaagttttttttattttttttataatataaaaatgtagttttttatttttgtttttagtttataaatattttggaaacgtattgtattagaaggtaattagcggtattgtttggaaagatgaaaaatttattagaaaagatttttaaatggtttttattaaagcgttatttaataattttttatattatagaaatagttttttatggatggtgtgattgggtttgtatttaaattcggttcggtttttggagttaacggcgtagttaatatttagttttttgtagttaatatttagttttttaattgggagtggttttggagtaagtcgttggaatgtttaagtttcgcgttatttatcggtattaagttgatgatttttgtttagggtttttcgttatttttaggtttaagttttaggaggtttttttcgttgatttgggtgaatagttttgagtttcggagagggttcggtttgcggagaagcgcgcgagagataagtatttttaaggttttggtataaaatttggaaaatggatttggcgttgaaatttttatttttcgtttaaaaagattatcgaaagggaaaaaataaaagaaattgtagtttatatttttgttattttatgaaaaattagttgtagtgtttttttttttatgttaaagagattaatatttacggtgaagatttttttaggaagtcgtggttttttgtaaaaaaaggttttatatattagaaatcggatttttggggtaattttttgaatttttggaataaaataaaataaaaaaaagtttttaaataaaattttattatttaaagcgttttttttttattgtggttttagttaatgcgtggtaggtagcgtttttagtgattaataaaagtaaatatttgattagtaagtttttaatcgagaggtttttttattttagttattttcgttcggggatcgaggaaatttttaaaagtcgggttacgtatttttagttcgagaggttttagcgtagagcgtagtagttttcgcgagcgtaggtttttttcgcggtggtttcgtttagggcgtttgggtttcggggatttcgttttcgtttcgttcggtgttatttaggtttcggtggcgtagggcggagtcgcgggcggcgggcgtaggtggggaggggcggtcggagcgcgtcggtgatattcgcgggggggcggggaaggcgcggcggtcgtattttattttgggaagaaatcggttaggtgtggtttaggcgtttagtgttagcggggaggagattcgtttcgtcgtcgattaatattaatatttagtttcgacgtagtttttttgcgtttttgtcgtttttcgagttatagtttttttttcgtttttgttttcggttcgtcgtcgttttcgcgttcgtagcggtttcgggagggtttaggtagcgagtagcgatttcgcgagtttttcgtattttcgttcggtttttcggtcgttcgtttatttttggtttttttcgtttttttcgcgtcggttcgtttcgtttatgtttcggcgttgagtcgttttttcgattgttcgtcgatatgagttgtaacggaggtttttattcgcggattaatattttgggtcgtatgattcgcgtcgagtttggttcggatttgcgttacgaggtgattagcggcggcgggggtattagtaggatgtattattttcggcgcggcgtgattatcgattagaattcggacggttattggtgggtatttgttcggagagcgcgggttgcggggttcgcgggatagggagggatcgtttttttttggacgattgggagattcgggtttcgaaggtggaaaggtttttttgttttaggtttcgaaagaatttttcggtcgcgttgggagtaggatcgggtgttttgacgcgtgcggggataggttggtttttgttttgcgaatagggattcggtcgtattttttttttttttcgcgagttcgggcgggtggttagagggggcgtcgggttcgcgcggggttgttttttgtttgttggatacggttgtagtcgtttttgttttagttcgcgaatgggaggttaggcgaggtggggttgcgattataaaatttaatttttttaatcgtaattaaagtaaaagaggaaaggagcggggtttcggttttgtttggtggtcgagtggtgttcggggtttcgtagtttttatcggtttatttttaatttttagtaatttcgagattacgattgtaacgatttttggatttttcggttatttaaggacgtttgtattaaggttgcgcgtttcggcggcgcggggttttgtttcgaggaggcgtttcggttttttttgttcgggaaacgaaattttttcgtcggggcggttgtcgggttcgggtttcgaagttcggtcgggacgtgtttgttattttcggtcgttcgcgtcgtagttttcgcgggcgagcgtatttggggttttgtttttgagttttttgtttttttttttttaaaaatatcggatgaaagattttagtgtgttttggatcgtagagcgtcggtcgtatgtttgttttgatttagaatgtgtgggtaggggagtgggggggtgggagaggacgacgttgggggttcgttttggtttaggcgtttcgggaagatttttcggtgagagggttagttttttcggattttagcggaaatagatcgagggcgttatttgggtgggtggggaagagattttgtttttgttttgatcgggtttcgggagttggattttagatgtttacgtgagtcgtgcgcgttttgtagttcgttttattttttcgttttttgttagttgtttttacgtcgggtttttgggaaagaggttttgagcgtcgggacgttatttattaggcgttgtggttttaggtttgggaggagtaatttgaatgcgttttagggagttttgttttgtaagtagttttgaaggtagggattattcgagttgtaatttgttttttgtttagatttatttatttatttatggggtattttgaaaatttattttcgtttttttttttttttttttttttgagttagtaaagaattgttttaattttggagttttttgttttttgaataaaatgtgtttggggatttttagggaaaatgtgttaagtaatagaaggaatgaaaatttgggtttttattatatttgttttaaaattttgttagttatttaaatttgaaatttaaattttttttcgtagttttttaggatttgagatgtatattttttaaatgtgtgggttatatatagtttaaatttaagttagaatagaatgcgaaggattttttagtagttttttttggcgtttttatgaattaagtatttattttgattattatttataattatgtttttgttagtttggattttttattttttaaatagataataattagtattattaatcgaatattttatttttttggttttttatattttttgtaggggagtaaaattttaataaattaagtggttaatgaattgtattaaggtatatgttttattaggattttttattgaaatatttaattttgggtaggttttatgttttttttttgtgtagtattatttcgtgttttgtttttttaatttaaagtttatttataaatttgttaagttttatatttttttgggaaggggaaagagatttaagtgaaaaattatttgattttgaggaaggatgttttttttttttattaatgttgttttgttcggtagtagggcgttaagtttagggtttgagtcgggaggcggttatttttttcggggattttggtaatggaggtttttttcgagtttgatttagtttgtagtggtgttattgattataaaatagtttataaatgttgatttttgcgtttttaaataatagcgatcgtttgaaggtagggtatgtcgtagtttttttggtggtattttggttttgtgtggagggatatgtttggttgtggcgtgtattttgtagaagtagggtgttttttgtgtttaagggagttattgttttttgttaagtgaatgatgattaagaattttataagtatttttttgattcgaaggttttttaaataaaggtttttgtggtttttttttttttttttttttttttttttttagtatgaaaattagtataaaaattattggttgattttaaatttatttattttaaaaattgttattttatggttgaattattaatagattggtgatttttgagatgagtgttttgtatttagtttttttttgaataaagaaatttgaatgtgtggagggtttaatttttagtttttttttgaaaatgattttaaaatatttttttttttttttgttttttttacgaatagtatttattcgtttttaggatagtattagattttattgtattttaattttttttttttttttcgattatttgtttgttttttgtgtttttgttttagattgaatggaatttgtaattatttaattttgttaatatttggtaaatgttataattttgataatgaaataatagatatgtatatgttttgaaatgtaaattttggattttttttggataggatattatattaatattgtttttaattatagtagaattattttagttttatttttgttattaaaataaattataaatagtgaaatttgttattaaagtaataaagttttatagttagattttttttttatttattaaagggtgaatttgtgggaggattaaaagtagaaaatagttattaagttttagaaatatgtggttataatattaatgtttatttttttttagattttatgattttaaaattgagatacgtgtgattattattttatatatattttaaagttagttttaaattaggttttaagagaagtttattttttattatgagataaataggttaatttgtttgaattttagagcggggggatttttaaggattatttagtttaggtagaaattttatacgtatattttagagataggaagttgaggacgtgtcgaagattttagaatttatttagggttgggttggtttgaggatttaaggatttttattttggttttttttgtgtttttatagtttgatttttagaatggataggtttgtaattatattatgtaagtattttaaattttattaattttttaatttagtaagtatttatcgagtattgattgtattttgtgttaagtgttaggggagattaaggtggaaatttatagttttgaaaggagtgtaggtttttttaaggaagataagtatacgaagattagtacgtaaaagcggaatgtataggaggggtgtacgtgattttagagattttataaggaggtgagagaatatttgtcgtgggggtattgggaagattttataaaggaagtggtgtcgaattagattttggagtattttagttgtgttaggatgggtgggtagagagttttttagagggagagaagagtatgagaaaagtttgcgaagtttgtggagtgatttttttttagagtattttttttgagtagggaggtagtaagatgaaaggaagaagtatttttttttgattaaggtattggagattttgaatgtttcggagagggatttggataggtagagggaagttggtgtaggtttttattgaagttattgaaagttttttttattggaggagtagggaagtgagacgattataattgagtttttggattgtttaggcgttggtttaaggaagttattgtattagtgaaggagggagggaatgaaagtttgaattagggtgagggtagtggatggaaaagtaggtattgttaaggtggagtgatagttttagttaagaattggatgcgagagataagggagagtttgagaaaataggtttagagttcgagtgatttatagcgtagatagtttaaatatttttttgggaaattattgtaaagtaagatttagtttagtttaatatacggtaggtaatatttatatggttattaaatttaatttgtatattttataaaaatattaggtttgtggttaataatagttattattatttagtaaatatttgtgatgtgttttgtataggatgtttgttattttaagttttataataaattttttagtttatagatgggaagttgaggttaaaatatttaaatggtttgtttaaggttatatagttagttaagttgttaagttagatttgaatttagtatattataatgacgtaagagaagattaaatttgtagtgtgagaatttattttttttatttgtaaatttttttttatttgagttattatttatttttaatttgttgaattttttagtttgcgtttttgtgaaatattttataattattgtatttttttattaatatttttgtagagtttttatttgtttaggaaaaaagaaatttaatttgattttgtattaagttaattaattgttagttagatttatttaatgggataatatagtttttaatagttatttttttttttaaatatgggtataattttattgtttaggtaatggaagtgttttggaaagggaaaaattgttgatgtttttgatgttttagtgttgattttttagggtggagtaaaggagggtttgggtgtgagatttggagagtgtgttttgatttttagttaattagtttttttagattaggaggttttagaaggagtggttttagtttggaggttttgttgttgtagttgggagtagtgttttattttttgattttttttatttttttttcgttgggttggttttagtggttttgtcgtttgaaaacgtttagatgtggttttgattttgaagttacggttttatagattttaagatttagatatgagttgtttatttgaggtgatattttgtaaaatattagtgtagtttaataatttatggtttattatcgatattttgggttggaagggtttatgaatgtgaaatttatattttatgaaaatgaagatagtttagtgagaagttgtagtaaatagattaaaggttttgtttggaattatattttgtttgtttgtttgtttgttttgagatggggtgttgttttgtggtttaggttggagtgtagtggtatgattatagtttattgtagttttgattatttaggtttaagtgatttttttattttagtttttcgagtagtttgggattataggcgtgcgttattatatataattaattaaaattttttttttttttttgtagagataaggtttcgttattttgtttaggttggttttgaatttttgggtttaagtgatttttttattttggttttttaaagtgttagaattataggtaagagttagtgtatttggtttttgaatttttttatttttaataagttttttttatgttgttaaagtgtattattttttgtgaattgttttagttatttttgagttttgtagggaatttgaggaatttttgaaatgttttatatttaatatttaatttatttttttttttttttttttttttttttttttttattatttcgtttttattttgttgtaggatatttttaaagttatggattggggtaaagataaaatataaaaacgaaatttttgtcgggcgcggtggtttacgtttgtaatttagtattttgggaggtcgaggtgggcggattataaggttaggagttttagtttagtttagttaatatggtgaaatttcgtttttattaaaaatataaaaattagttgggcgtggtggcgggtttttgtagtcgtaattgtttaggaggttgaggtagaagaatcgtttgaattcgggaggtagaggttgtagcgagttgagattatgttattgtattttagtttgggtaatagagcgagatttcgtgaaaaaaaaaaagaaagaaagaaattttagaattataataatagtagtagttttcgtaagtaagagttattattaagtgaggttttcgtttttgtagtgtttttttgagttttattttagttttaggaggggggtgttttatttgttatagaggtagaagttttaggtattgttagtggatgttattttaagttgtttaaggttataggttgtataattggaagtggttgagttgggcgtggattttaattgtgttttattttaaagtttttttgaagttaatgatatgtgattagttttttattattttataaatataatttgttaaatatatagtgtgaaaatcgagaaaatcgtttggaaaagaagtagaatttttattagagtattgtttttgtagttgttgggcgaagataaaatgtaggattaaaggaggttgtttttttaaaatttatagagataaaaaatttattatgtttgtttattgttggagtgggaatggggaggggagagttgtgttttttggttgagtttttgaaattagggtaatgagatgagttataatatttttagatgggttttttgtttgtttttgttttttttttattttattaagttaaataaatatttattaagtattttttgtgtgtcgaattttatttatgttgttaggttaagtgtttgtaggagtttaagatgattaagatatgggattttgttttttaggagtaggtagttaggtgtgtttaaattaatgtaagagaggagaggatgtagaggtgtgatatggaaaattttttgtagaaggttgtaatttttgaagttttgaatttttgaaggatggttaatatagtattttagttgatgtatatagagagtgtttaatgaattttttttttttttgagacggagttttgtttttgttgtttaggttggagggtaatggcgcgatttcggtttattgtaatttttattttttaggtttaagcgatttttttgttttagttttttgagtagttgggattataggtatgcgttattacgttaggttaattttgtatttttagtagagacggggtttttttatgttggttaggttggtttggaattttcgattttaggtgattttttcgttttagttttttgaagtgttgggattataggcgtgagttatcgtattcggttagtgaattttagaggtaaagtattatttttaaatgaagtattaaaaatatatttttttttttatgaaagatttttttaagaaatttaaataaaatagtatatgtgaaaaatgttttgaaaattataaagagttaagtaaataggttttacggttaatattaaagtattatataattattataatttttaatatatattttttgagttttttttaggtaattattttgtgaatttgaaaatagagagatatatgagtttttttggtatatgtataagagtttgtgttgattgaatgaataaaagaagaggagagagaggaagggagagatggaaagaggaaggaaggaaaggagtttagttagagagaaaatatataaataaaaagaaaggtaaagttagggggtatggtttaagtgtttaatgagtaatatagttattataaaagtatttttataaaataaagagagtaattttttatttaaaaattttgtttttgtttataatgtttttttttgaaatatttgttttgtttttttgtgttttttttttatttttttgaaagtatgaatttttttttttttatttttttgaatatttttatttttttaagataaggttttgttttttcgtttaggttggagtgtagtggtgtaatttcggtttattgtagtttttgttttttaggtttaattattttattttagttttttattttagtttttcgagtagttgggatttataggcgtgtgtttttatgtttagttgttttgtttttgtttttttttttgtagagatggggtttcgttatgttgtttaggttgattttaaatttttgggtttaagtaattcggcggtttttgttttttaaagtgttgggattataggtatgagttacggtatttaattttgttttgtatttttaaaaataatatttttggtaatatatgtaaagttaatgttttaggatagttagttttggagttttatttttaaagaaaaatgtttttttaaaggtagtaaaataaaattttgaaattttggtaatattgtttatatatttatgtggttcgtttttggattagaatttagaatttgttttttttttaattatcgatgaagggttttttatgtaaatatttggaatttttatttgtttaaataagttttaggatgaatttaaaaaaaaagtatgtgtaggtaggttttttgtaatatgatttatttattttttagaagagttaaaaatttttaaggatgagttattttttttaagggtatttattaattttggtttggaagttaatatttttttgataaatttgatttaaatgagttgttttttttttttttttttttttttaaaaaagtatatgatatttgttattttttgtgttattgaaatgggatttaaaaatcgaattttatggtttgttaatttaatttttaatatgatttgaaaattttttaatttttaatatttatatgtagtagtattaaaaatttttttgagggtagggatttaaaaaaatgtgtatacgtttgtaagtatattattttaaaattatttttttatttattatagaattttgtatttttttaaattgtattatatgaattaaatttaatttaattagtatgaataaatttatttattatgaatttaatatagatatttgtattatttttagtaaggaagaatgagtttggttattttttaaaattgagttatagaatgaatgaggtgaagaaattttatatattatttagtttaatagatggagatagaaatttttgagattaaaaaaaaatttaaaattgtgtagttaataatatatatatatataatttgatttagaaaggtttgaattatagtttttaaaaaaatgtatgttttttggttgggagtggtgttttttatttgtaattttagtattttgggaggttaaggcgggtggattttttgaggttaggagtttgagattaggttggttaaaatttggtgaaattttgtttttattaaaaatataaaaattagttttgcgtggtggtagtgtgtttgtaattttagttatttgggaggttgaggtagaagaattatttgaatttaggatgtggaggttgtaatgagttgagattgtgttattgtattttagtttgggcgatagagtgagatttttttttaaaaaaaaaaaataggtatgttttttgaagtaagtttttttggttttcgtgttgaagaatttagtgttatatatatagttggtgtatgtttgatattagattgattcgatgggtcgaaattattttcgttgaattttttttttgattaagtatagcgagttttgtgtggattttttattgggttaagataagtaaattgatttggtaaggtggattttttatattttagttggtttgagtttttttttattttgttttgatggatcgagttatttataaggtatatatttagttttttttttcgtttcggtttgtttttaaagggaatttttggttatatttaagattgaagttggatttttatagatgaaagatagaagtagattttgttttaaggattagacgcggttttgaaaagttgtgtatatgatgaaatttcgttaattagattatattttttaatagataaataatgatattaaagattttttattttattgttttaatatttaagttttttatttttttaattttttaaaggattagatttttgtgtattttttatttttatatagttgttaatttatttattaagatgttgtgtaaaatatgtaagttttttagtggatattaggaatatatgagatagggcgcggtggtttacgtttgtaattttaatattttgggaggtcgaggtgggtagattatttgaggttaggagtttgagattagtttgattaatatggtgaaattttatttttattaaaaatataaaaaaaaaaaaatagttgggcgtggtggtgtatgtttgtagttttagttattttagaggttgaggtaggagaattatttgaatttaggaagtggaggttgtagtgagtcgagattatgttattgtattttagtttgggtgatagagtaagattttatttcggaaaaaaaaaaaaaaaaagaatatatggaaatggaaattttttagaaaagtacgaagaatttatttggtattattagtagtatataaagttatttgttgtttttttttttttttaagtttaaatatgggtaggtaagggaaggtaggtaaggtgttttttttttataggatgttaattgatttttagagaaataggaatgttttttaaaattagggggagggaattaaaaaatagagtaaatttattaatgttttaagttaatgtttggttgttttattttttttattttggatgtaattcgtttttaattgtggtataattaattagtttagtttttgggtaaaaagaagttggtaagttttatattttgtggttaaatgaatttgattttataaatttatttttaaaaatgtgtatgtatatttcggtgcgtttatttataattgtgtttgttttttttgtttttgttttttaatatattttaattttagaatagttttagatttgtagaaaagttataaaatagtataaagtttgtgtatatttttatttagttttttatgtttttattattttatttttttttaatagcggggttttatgttgtgttgtttaggttagttttgaatttttgagtttaagtaatttttttgttttggttttttaaagtgcggggattataggcgtgttttatttttattttatagtttagtttgtgattgtttttatagtggtatatattattaaattatttaggaaattttgattttttattgtgttaagagataatttttttatttatttgtttgggattggtattttttgtgggaattattttcggagttaaattgttgaatagaattttttaatgttttagaataaaggtatttttatgtttttttaatgaagaaaataaagataattatataggatttttttaattttttaatttattttagggttttaagtgaggttgttgggttttttaatgtttttttttgttttttgaattttttttttttgtttgataataggtacgttttggaaggtgttttaagttagttggaattttgtataagttaggataataaatgtgattttgtttgtattttagtagtatgagaaacggattttattttttgtataattcggagtggaagatagagattggttgtattggtggtgggtgggggtagttttggtttcgagagttggatggttttggtattattttttttgggtttgtttggaggagtttgtgtttttttttgggagtagtttttagggaggtttgggttttttatttatatttatttagttttggtttgttggggagttttgtttgtagggaggaattttaaatgggtggttaaaaaagaaatgtttttttatggtgagatagtgtagttaggtgtttcgggagaatttttatattattgtgattttattttatttatgtataatgtaattattgtttgttaaatatttttttttaaatagtgaaattttttttttaaaatatatatatatatatatatatatatatatatatatatatatatttagttggttagataggtattagataaaagtaggtttaggttggttttggttgaaggtaggaagagttaattttttgtagtatattcgtgaggattttttatagatattaaataattatttggtttgttttaaatttttttgaaattaaattatagtaggttgtgttgtggtataatatattttggtaaatttaaaagttagattttggttatattttgtttgaagagtaaatgaaattttgttatttcgttttttaagatatagattatttgtaatatttttcgttaatattatcgttgttttaaggtttttgttaggtgttttttagaaaagtgttttatttgaaatgtatattgaatgagttttattgtagagaaaaataggtattttaggaatattttgaaaggagaatgggtttgttttgcgataaagataatgtatttaaattttttattattttttttatattatgatttttaaaaaaaatattattgttttttataggaattatagaaaatatatatatatatttttatagatagggttttattttgttatcgaggtaagagtgtagtgttgtgattatagtttattgtagtttttaattcgtgggtttaagtgatttttttattttagttgtttgagtagttagagttataggtatgtattattatgtttggttaatttaaaaataattttttttttttttgtaagatagggttttgttatgttgtttaggttggtttttaatttttagatttaattagtttgtttgttttggttttttaaagtattgggattataggtgtgaattattgtgttcggttaatatttttgtagagtaagtttttttttttttttttattttttttttagttcgatttgttagtgaaatttttatgttttgtgtttgatattatgaggtttttttgtagagggatttgtggtgttggggattgttattagggatcgttgtgggatgaagtaggagtgaagttgaaatagttgtgtgttattgttattgttagaagtgtgtttttataatttagagagatatatttttggattggattttggatttgggaggggaaaatttgttgtgaatgatattattgggttaattggtgaaatttgaataagttttataaattagaaaattatttgtgttaattgtaaattttttgttttttattattgtattgtggttatatataagtgaatgtttttatttttaggaatgatatgttaagatatttgggggttaaaaagttatgtttttaaatgatttagaaaaaaataatatgtatatatagataaatatatgttgaaatatttgggggtagaagggtatggttatttttaagtggtttagaaaaaataatatatatatatagataaatatatatatatttatggagaggggagaagggggataaaagaaatataataaaatgttaataattgggatttcgggtaaagggttttataggagtggttttgtttcgtttttgtaatttttgtaagtttgaaattattttagaattgaaataggttatttgatgtttggtttttttgtgtttgtttttttagt

SEQ ID NO: 600 - DNA, 19082 bp, Artificial Sequence
  chemically treated genomic DNA (Homo sapiens)
attaaggaggtaaatatagagaaattagatattaaataatttattttaattttgaaataattttaaatttgtaaaagttgtaaaaacgggataaaattatttttgtgagattttttattcggaattttaattgttaatattttgttgtgttttttttatttttttttttttttttttatagatgtgtgtgtatttatttgtgtgtatatattattttttttgaattatttgagaataattatgtttttttatttttaaatattttagtatatatttatttatgtatatatattatttttttttgaattatttgagaatatggttttttaatttttaaatattttagtatattatttttaagaataaaaatatttatttatatataattataatataatgatgagaagtagaaaatttataattgatataaatgattttttaatttatagaatttgtttagattttattaattagtttaataatgttatttatagtaagttttttttttttaggtttaggatttaatttagaaatatatttttttgagttataaaaatatatttttggtaatgataatgatatatagttattttagttttatttttgttttattttatagcggtttttaatgatagtttttaatattataagtttttttgtaggaagattttatggtgttagatatagagtatgaagattttattggtaagtcgggttgaaggaaaggtaggagaggagaaaaaagtttattttataaaaatattggtcggatatagtggtttatatttgtaattttagtgttttgggaagttaaggtaggtagattgattaagtttaggagttggagattagtttgagtaatatagtaagattttgttttataaaaaaaaaaaagattgtttttaaattagttaaatatggtgatgtatgtttgtagttttagttatttaggtagttgaggtgggaggattatttgagtttacgagttggaggttatagtgagttatgattatagtattgtatttttgtttcggtgatagagtgagattttgtttgtaaaaatatatatatatattttttgtaatttttgtaaaagataataatgttttttttaaaaattatggtgtgaagaaagtgatggaaaatttaaatatattgtttttatcgtaaaataaatttattttttttttaagatgtttttagaatatttatttttttttataatgaagtttatttaatgtatattttaaatgaggtatttttttggaagatatttagtagaaattttaaaataacggtggtgttggcggaaaatgttgtagatggtttgtattttaaagaacgagatgatagagttttatttgttttttaagtaaggtataattaaagtttggtttttaaatttattaagatatattatgttatagtatagtttattgtagtttggttttagagagatttaaagtagattaagtgattatttaatgtttgtgaaaagtttttacggatgtgttataagaagttggttttttttatttttagttagggttagtttgagtttgtttttatttgatgtttgtttaattaattgggtgtgtgtgtgtgtgtgtgtgtgtgtgtgtgtgtgtgtgtgtgttttaaagaaagaattttattgtttaaaaaaaaatgtttgataaataatggttgtattatgtatagatgggataagattatagtaatgtgggaattttttcgaagtatttggttgtattgttttattatgggaaagtattttttttttggttatttatttggggtttttttttgtaggtaaggttttttaataagttaggattagatgaatgtgggtgaggagtttagatttttttgggaattatttttagaagaagatataggtttttttaggtaggtttaggggaggtggtgttagagttatttagttttcgaaattaagattgtttttatttattattaatgtaattagtttttgttttttatttcgaattatataggaaatgaggttcgttttttatattgttgagatataagtaagattatatttgttgttttaatttgtgtagaattttaattgatttagaatattttttaaaacgtatttgttattaaatagaggaaagaaatttaagagataaaggaaaatattaagaagtttagtaattttatttagaattttaggatgaattaaaaaattaggaaggttttgtgtaattatttttattttttttattgaaggggtataggaatatttttattttgaaatattaagaaattttgtttagtaatttggtttcgaaggtgatttttataaagaatgttagttttaagtagataaatgaaagagttgttttttagtataatggaaagttagagttttttaaatgatttaataatgtgtgttattgtaaaaataattataaattgagttataagatgagggtggggtacgtttgtaattttcgtattttgggaggttaaggtaaaaggattgtttgagtttaggagtttaagattagtttgggtaatatagtataaaatttcgttgttaaaaaaaaataaaatgatggaggtatgggaaattgggtgagggtatatataaattttgtattattttgtaatttttttgtaaatttaaaattattttagaattaaaatgtattaaaaaatagagatagggaggataaatataattgtgaatgaacgtatcgaagtgtatatatatatttttaaaagtgaatttatgagattaaatttatttgattataaaatataaaatttgttaatttttttttatttaagaattagattgattagttatattatagttagaaacgaattatatttaggataaaggaggtaaggtaattaaatattggtttaaaatattggtgggtttgttttgttttttaattttttttttttagttttagaagatatttttatttttttagagattagttgatattttataaagagaagatattttgtttgtttttttttgtttatttatatttgaatttaaaaaaaaaaaaaaataataggtaattttatatgttgttaataatattaaataaatttttcgtgtttttttaaaggatttttatttttatatgtttttttttttttttttttttcgagatggagttttgttttgttatttaggttggagtgtagtggtatgatttcggtttattgtaatttttattttttgggtttaagtgatttttttgttttagtttttggagtagttgggattataggtatgtattattacgtttagttatttttttttttttgtatttttaatagagatggggttttattatgttggttaggttggttttaaatttttgattttaaatgatttgtttatttcggttttttaaagtgttaggattataggcgtgagttatcgcgttttgttttatatgtttttgatatttattaaaaaatttatatgttttgtatagtattttagtaaataaattaataattgtataggaatggggaatgtatagaaatttaattttttgaagggttgaaaaaataaaaagtttaagtgttggaataatgaaataaagaatttttgatattattatttgtttattgggaagtgtgatttgattaacgaaattttattatatatataattttttaagatcgcgtttgatttttaaaataaggtttatttttattttttatttgtaagaatttaattttagttttaggtgtggttaagaattttttttggaaatagatcgaggcgagaaaaggaattaggtatatattttgtgaatggttcggtttattaaaataagatagagggagatttaggttaattaaggtatagggaatttattttgttaggttagtttgtttgttttagtttaatgaagaatttatatagaattcgttgtatttaattagggaggaagtttagcggaaatgatttcgatttatcgggttagtttgatgttagatatatattagttgtatgtgtagtattggattttttagtacgagagttaggagagtttgttttaggaaatatgtttgttttttttttttgagaaggagttttattttgtcgtttaggttggagtgtagtggtataattttagtttattgtaatttttatattttgggtttaagtgatttttttgttttagttttttaagtagttgggattataggtatattgttattacgtaaagttaatttttgtatttttagtagagatagggttttattaaattttggttagtttggttttaaatttttgattttaagggatttattcgttttggttttttaaagtgttgggattatagatgggaggtattatttttagttaggaaatatgtatttttttaaaagttgtaatttaaatttttttaagttagattatatatatatatgttattgattatataattttagatttttttttaattttagaaatttttatttttatttgttgggttaaatggtatgtaagatttttttattttatttattttgtaatttaattttaggaaatgattaaatttatttttttttattgaaaataatataaatgtttatgttaagtttatggtaaataaatttatttatgttaattgaattaaatttaatttatatagtgtagtttgggaaaatgtaaaattttataatggataaagaaataattttaaaatgatgtatttataagcgtatatatatttttttaaatttttatttttaaagaaatttttaatattgttatatatgggtgttaggggttgaaagatttttaaattatgttaggaattaaattaataagttatgaagttcgatttttaaattttattttagtggtatagaagatggtagatgttatgtgtttttttaaaaaaaaaaaaagaaaaagaaaataatttatttgggttaaatttattaaaagaatattgatttttaaattaaaattaataggtgtttttgaaaaaaataatttatttttaaaagtttttaatttttttgagagataaatgagttatattataaagaatttatttgtatatattttttttttaagtttattttaaaatttgtttaaataagtaaggattttaaatatttgtatagagagttttttatcggtggttaaaaagaaaataagttttggattttaatttaaagacggattatatgaatatgtgaataatattattaagattttaaggttttattttattatttttaaaaaaatatttttttttaaaaataggattttaaaattagttgttttaaggtattagttttatatgtgttgttaaaaatattatttttaaaaatataagataaggttgggtgtcgtggtttatgtttgtaattttagtattttgggaggtagaggtcgtcggattgtttgaatttaggagtttaagattagtttgggtaatatggcgaaattttatttttatagaaaaaaaaataaaaataaaatagttgggtatgaaggtatacgtttgtaagttttagttattcgggaggttgagatgggaggttgagatgagatggttgaatttgggaggtagaggttgtagtgagtcgagattgtattattgtattttaatttgggcgaaagaataagattttgttttaaaaaaataaaaatatttagaaagataaaggaaaaaaagtttatatttttaaaaagataaagaaaaaatataaaaaaataagataaatattttaaagagggatattataggtaaaaataaagtttttaaatgaagagttattttttttgttttataaaaatatttttataataattatgttgtttattagatatttggattatgttttttaattttgtttttttttttgtttatatattttttttttaattggattttttttttttttttttttttttattttttttttttttttttttttttttttttgtttatttagttaatataggtttttgtatatatgttagaaagatttatatgtttttttgtttttaggtttatagaataattatttaggaaaaatttaggaaatgtgtgttaggaattatgatagttatataatgttttaatattgatcgtgaggtttatttgtttagttttttataatttttaaagtattttttatatatattattttgtttgagttttttgaaaggattttttataaaaagaaaaatatatttttaatattttatttaaggatgatattttatttttaagatttattagtcgggtacggtggtttacgtttgtaattttaatattttaggaggttgaggcgggaggattatttgaggtcgggagttttagattagtttgattaatatggagaaatttcgtttttattaaaaatataaaattagtttggcgtggtggcgtatgtttgtaattttagttatttaggaggttgaagtaggagaatcgtttgaatttgggaggtggaggttgtagtgagtcgagatcgcgttattgttttttagtttgggtaataagagtaaaatttcgttttaaaaaaaaaaaaaatttattaaatattttttatatatattagttgaaatgttgtgttagttattttttaaaagtttagaattttaaaagttatagttttttgtaaggagttttttatattatatttttgtattttttttttttttgtattagtttaaatatatttggttatttgtttttggagagtaaagttttatgttttagttattttggatttttataaatatttaatttaataatataaataaggttcggtatatagaaggtatttaatgaatgtttgtttggtttagtaaagtggaagaaaaataaaggtaaataaaagatttatttgagggtattatggtttattttattattttgattttaaaagtttaattagagagtatagtttttttttttttatttttattttagtagtgagtaaatatggtggattttttgtttttatagattttagaaagatagttttttttgattttgtattttgttttcgtttagtagttatagaaatagtattttaataaaagttttgttttttttttaggcggttttttcgatttttatattgtgtgtttggtagattgtgtttgtgggatagtggaaaattgattatatattattaattttagaaggattttgaagtagggtatagttggagtttacgtttagtttagttatttttagttatatagtttgtgattttgagtaatttaaagtgatatttattggtagtgtttggagtttttgtttttgtgataggtagaatattttttttttggggttgaggtgaggtttagaggggtattgtagaggcggagattttatttagtgatagtttttatttgcggaggttgttgttgttgttatggttttgaaattttttttttttttttttttttttacggagtttcgttttgttgtttaggttggagtgtagtggtatgattttagttcgttgtaatttttgtttttcgggtttaagcgatttttttgttttagttttttgagtagttgcgattataggagttcgttattacgtttagttaatttttgtatttttagtagagacggggttttattatattggttaggttgggttggaatttttgattttgtgattcgtttatttcggttttttaaagtgttggattataggcgtgagttatcgcgttcggtagaaatttcgtttttgtgttttgtttttgttttagtttataattttaaggatgttttgtagtaaaatggaggcggggtgataagaaaaaaaagagaaagaggaaaaggaagaaatggattgggtattaagtgtgaggtattttaggagttttttaggttttttataagatttaaaaataattgagataatttatagagagtgatatattttagtagtatgaaagaaatttattgagggtaagaaaatttaaaggttaggtgtattggtttttgtttgtaattttagtattttggaaggttaaggtgggaggattatttgagtttaggagtttaagattagtttgggtaagatagcgagattttgtttttataaaaaaaaaaaaaaaattttaattagttgtgtatggtggcgtacgtttgtggttttaagttattcgagaggttgaggtgggagagttatttaagtttgagtggttaagattgtagtgagttatgattatgttattgtattttagtttgagttatagagtaatattttattttaaaataaataaataaataaataaaatgtaattttaagtagaatttttgatttgtttgttgtagttttttattaaattgtttttatttttatgaaatgtagattttatatttatgagtttttttagtttaaggtgtcggtggtgagttataaattattggattgtattagtattttataagatgttattttaaatgagtagtttatgtttgagttttaggatttgtggggtcgtgattttaaaattagaattatatttgaacgtttttaagcggtagggttattgggattagtttagcgggagggagatggagaaaattaaggggtgaggtattgtttttagttgtagtaataaggtttttagattgaaattattttttttagaattttttggtttggaaagattggttagttgagagttaagatatattttttaagttttatatttaagtttttttttgttttattttaagaagttagtattgaggtattaggggtattagtagtttttttttttttaagatatttttattatttgaataatgaaattatgtttatatttagagaaaaaaatgattgttgaaagttgtattgttttattaaatagatttgattaataattagttggtttaatgtagaattaaattgagtttttttttttttaagtagatagaaattttataagagtattaatgaaagaatataatgattatgaaatattttataggaacgtagattgaggaatttaatagattaaaaataagtaataatttagatagaaaagggtttataagtagaaaaggtgaatttttatattgtaggtttaatttttttttgcgttattgtggtatattggatttaaatttagtttaataatttaattagttgtgtgattttaggtaagttatttaaatattttaattttagttttttatttgtaaattgggaagtttgttatgaggtttgagataataaatattttatataaggtatattataggtatttgttgggtaatggtaattattattaattatagatttgatatttttataaaatatataagttaaatttaataattatgtaaatgttatttgtcgtatattaagttaaattaaattttgttttgtaataattttttagaaaagtgtttagattatttacgttatgagttattcgagttttgggtttgtttttttagatttttttttgtttttcgtatttaatttttagttgaagttgttattttattttggtaatatttatttttttatttattgtttttattttggtttagatttttatttttttttttttttattggtgtaatggtttttttaagttaacgtttaaatagtttagaagtttagttatgatcgttttatttttttgtttttttaatggaggagatttttaatggttttagtgaaaatttgtattagtttttttttgtttatttaaattttttttcggggtatttaaggtttttaatgttttggttaaaaaaggatgttttttttttttattttattgtttttttgtttagagagaatgttttaaaaggagattattttataggtttcgtagattttttttatgtttttttttttttttggaaggttttttgtttatttattttgatatagttgaaatattttaaagtttagttcgatattattttttttataaagtttttttagtgtttttacgatagatgtttttttatttttttgtgaagtttttgaagttacgtatattttttttgtgtatttcgtttttgcgtgttagttttcgtgtatttattttttttggaagggtttatattttttttaaggttatagatttttattttgattttttttgatatttaatatagaatgtagttaatgttcggtaaatatttgttgaattaaggaattaatggaatttgagatatttgtatggtgtaattataggtttgtttattttaaaagttaggttgtgaaggtatagggaaaattaaggtgaggatttttgggtttttaggttaatttagttttaagtggattttaggattttcggtacgtttttagttttttgtttttgaagtgtgcgtgtggggtttttgtttaggttaagtgatttttaggggttttttcgttttaaaatttaggtaaattgatttgtttgttttatagtaagaaataagttttttttaaaatttaatttaagattaattttaaaatgtatatgaaataatgattatacgtattttagttttgaaattatgagatttgaagaaaaataagtattaatattataattatatatttttgaaatttaatgattattttttgtttttaatttttttataaatttattttttgatgggtgaaagaaagatttaattgtgagattttgttattttggtaataaattttattatttataatttgttttaatgataggaataagattagagtaattttgttgtaattgaaaatagtattaatataatgttttatttaagaagaatttaaaatttatattttaaaatatgtatatgtttattattttattattaaggttgtaatatttattaaatgttaataaaattaagtagttgtagattttatttaatttaaaataaagatataaagaataggtaggtggtcgggggaaaaagagggaattaggatataatgagatttaatattgttttaaaaacgggtaagtgttgttcgtggaaaggatagagagagagagagatgttttaaagttatttttaaaggaaaattaagagttgggttttttatatatttaaatttttttatttagggaagggttagatataaaatatttattttaaaaattattaatttattaataatttagttataaagtagtagtttttgaaataaatgagtttaaagttaattaatagtttttatattagtttttatgttaaaaaaaaaaaaagaaagaaagaaaagaaaattataaaaatttttatttagaaaattttcgggttagaaaaatatttatgaaatttttaattattatttatttagtagagagtagtggtttttttgggtatagagggtattttgtttttataaagtgtacgttatagttaaatatatttttttatataaaattagaatgttattagaaaaattgcgatatgttttgtttttaggcggtcgttattatttgaaaacgtagaagttagtatttgtgggttattttgtagttagtagtattattgtaggttgggttaggttcgagaggaatttttattgttaggattttcggaaagaatgatcgtttttcgatttaagttttgagtttgacgttttgttgtcgggtagagtaatattaatgagaagaaaaaatatttttttttaaagttaggtaattttttatttgggttttttttttttttttagagagatgtgagatttgataagtttgtaagtaggttttaagttggaaaaatagagtacgggatgatattatataaggaaaaaatatggagtttgtttaaaattaaatgttttaatggggaattttaataaaatatgtattttgatgtagtttattaattatttaatttattaaagttttatttttttataaaaggtataagaagttaagggagtgaaatattcgattaatagtattgattattgtttatttaaaagataagaaatttaagttagtaaaagtatagttataaataataattaaaataaatatttggtttatgaaaacgttaaaaagagttattaaagagtttttcgtattttattttgatttggatttaaattgtgtgtaatttatatatttaaaggatgtgtattttaaattttggaggattgcgggagaaaatttaaattttagatttaaatggttggtaaaattttaaaataaatgtaatgaaaatttaagtttttattttttttattgtttggtatattttttttggaaatttttagatatattttgtttaggaaataaagaattttaagattgagataattttttgttaatttaaaaaaaaaaaaaaaaaaaaaagcgaaaatagatttttaggatgttttataaataaataaatgaatttaagtagaaaataggttgtaattcgagtagtttttgtttttaaaattgtttgtaaaataaaattttttggagcgtatttaggttgttttttttaggtttagggttataacgtttggtaaataacgtttcggcgtttagggttttttttttaaaagttcgacgtgggaataattagtagggggcggggaggtggggcgggttgtaaaacgcgtacggtttacgtgggtatttagagtttagttttcgagattcggttaaagtagggataggattttttttttatttatttaaatgacgttttcggtttgttttcgttgggattcggagaagttgatttttttatcggggggttttttcggggcgtttaggttagggcgggtttttagcgtcgtttttttttatttttttatttttttgtttatatattttggattaaagtagatatgcggtcggcgttttgcgatttaaggtatattggggttttttattcggtgtttttaaaaaggaggaaataaaaggtttagaggtagggttttaggtgcgttcgttcgcgggggttgcggcgcggacgatcgaaggtaataggtacgtttcggtcgaatttcgagattcgggttcggtagtcgtttcggcggggaagtttcgtttttcggataggggaagtcgaagcgttttttcgggataggatttcgcgtcgtcgggacgcgtagttttgatataaacgtttttgggtggtcgaggagtttaggagtcgttgtagtcgtggtttcggggttattggggattgggggtgagtcggtagagattgcggagtttcgagtattattcggttattagataggatcggggtttcgtttttttttttttttattttgattacggttggagaggttgggttttgtggtcgtagttttatttcgtttgattttttattcgcgggttgggataaaggcggttgtagtcgtgtttagtaggtaggggatagtttcgcgcgggttcgacgttttttttgattattcgttcgggttcgcgggaggggagaaaggtacgatcgagtttttgttcgtaggataggggttaatttgttttcgtacgcgttaggatattcggttttgtttttagcgcggtcgggaagttttttcgggatttggggtaaaaaaatttttttattttcgggattcgagttttttagtcgtttagaggaggacggtttttttttgtttcgcgagtttcgtagttcgcgtttttcgggtaggtatttattagtagtcgttcgagttttggtcggtgattacgtcgcgtcgagaatagtatattttgttggtgttttcgtcgtcgttggttatttcgtagcgtaggttcgggttagattcggcgcggattatgcggtttagagtgttgattcgcgggtgggagttttcgttgtagtttatgtcggcgggtaatcgggagagcggtttagcgtcgaggtataagcgaggcgggtcggcgcggagaaagcggagggggttaaggataggcggacggtcggggaatcgggcgggagtgcggaaggttcgcgaggtcgttgttcgttatttgggttttttcgaggtcgttgcgagcgcggagacggcgacgggtcgggggtaggagcgggaggaaagttgtggttcggagggcggtaagggcgtagaggagttgcgtcggagttgggtgttggtgttggtcggcggcggagcgagtttttttttcgttggtattgggcgtttaggttatatttggtcggtttttttttagggtggggtgcggtcgtcgcgtttttttcgttttttcgcgggtgttatcgacgcgtttcggtcgtttttttttatttgcgttcgtcgttcgcgatttcgttttgcgttatcgaggtttgagtaatatcgggcggggcgggggcggggttttcgagatttaagcgttttgggcgaagttatcgcggggaggatttgcgttcgcgggggttgttgcgttttgcgttggggtttttcgggttgggaatgcgtggttcggtttttgaggattttttcggttttcgggcggaaatagttggaatggaggggtttttcgattggagatttattggttaaatatttatttttgttgattattggaaacgttatttattacgtattgattaggattatagtgaggagggaacgttttagatgatagagttttgtttgggggtttttttttgttttgttttattttaggaatttaggaaattgttttagaagttcgatttttgatgtgtaaaatttttttttatagaaaattacgattttttggaaaagtttttatcgtaaatattaatttttttggtatgaagaggaaaatattgtagttaattttttatgggataataaaaatataaattgtaattttttttattttttttttttcgatggtttttttaaacgaggagtaaagattttaacgttaggtttattttttaaattttgtattagaattttgaggatgtttgtttttcgcgcgttttttcgtagatcgaatttttttcggaatttagagttgtttatttaagttagcggaggaggttttttgggatttgagtttgagggtggcgaagaattttaggtagagattattaatttggtatcgatgagtgacgcggagtttgaatattttagcgatttgttttagggttatttttagttaagaggttgagtgttaattgtaagaggttgagtgttaattacgtcgttggttttaggaatcgaatcgggtttggatatagatttagttatattatttatgaaaagttgtttttataatatgaaaaattgttaaatgacgttttagtaaaagttatttaaagattttttttaataaattttttatttttttaaataatgtcgttaattattttttgatatagtgcgtttttaaaatgtttatgaattgaaaataaaaataaaaaattatatttttatgttgtaaagggagtgggggggattttttaaaatttgtcgtattatagtattttttatgataatttgattttttaggtataatttttgataaaatgttttgttttttttttttttatagttgaacgttttaaatttaaggagtaaatatatataatgagataaaagtttattattgttagtataattaataatttgtatcgtagttttaattttttcgaatttttaataaaattaaagtggttaagtgtttaaatgattatatagattgagtattttttatttaaaatgtttgggattagaaatattttggattttggatttttttggattttgtaatagttgtatagacgtaacgagagatttttggggatggaatttaagtttaaatatgaaatttatttatgttttttatatgttttatatatatggtttgaaggtaattttatataatattttagataattttgtgtatgaaataaagttttgattgtattttgattgtaagttattatatgaggttaggtgtggaattcgttatttgtggttattatgttagtgtttagaaagtttggatttgggagtattttggattttagatttttagattagggatgtttaatttgtataaatattgatttatagataagacggtggttttttttaaatagaattaatggttggaagttagtttttgtataaatagtttataatatttattggtggaggagagaaagatatgtatggagggaaaatgttagtgtataatgtataatattttatttaggatgttttttttttatgtattttatttgtttagtaaataattataatttaggatatggaaatattttgtaatatataaagataaatagggtttagttattgtttttaaatatattatagtaaaattttgatttaagaaatttaggggttcgtgcggtggtttatgtttgtaattttagtattttgggaggtagaggcgggtggattatttgaggttaggagttcgagattagtttggttaatatgatgaaattttatttttattaaaaatataaaaattagttgggtgtggtggtaggcgtttgtaattttagttgtttgggaggtaaaggtacgagtattatttgaatttaggaggtggagattatattgagtagagatcgtgttattgtattgtagtttaggtaatagagtaagattttgttttaaaaaaaaaaaaaaaaaaaaaatttagggattatttttttttaatgtgtaataaagaggttatataattgtacggtagaattatttttttaaaaaaaatttatatatttattaattatttttttagtggtaataaaagtttttgttagttaagggtttttttacggttataggaattaggttttatatagatttaaatattatttagatttataaaattgtttaatttgtaggtaaaatagaggaggaggcgaagagtttacgttattaattatatttttggttgcgttgtttttttatttattttattgttttttgggtttttttaggtatttttaagaatacgaacggtttttagttattaaatatgtttgttttaggaagatagtggtttttatttatttttttttaagggtgataaagaaagataagaggataaaataaatagattgatatgttcgatagatggaatattttttattttaatatatatttatatatatgtatatatatatatatatatattagttgtttaggttggtttattatatagtgaagagcgaggataatttgtttatagttataattttagtgttataatttatttatgtaagagtttaatttttttatgtgtataatggaaataatatttgttttgttaattttttaaatttatagtgagggttaaatgagataaaatacgtgaatatttttgaatattgtgaaatatataaagtttaaggtattatttgttaagttaaaagttttttgttggatgcgaaattttaatcgttaatgtttttgtttttattttatatgtaaattagtaaattttttttttggatatatttaagatgtatttatttagaaagtagttattgaatatttattatgttatataatagatttaatgttagatatatgaagatgaataaagtatgattttttttttgtaggatattaaagtttgtagtagtaaaataaataattataatataatattaagtatgttataatgaaggtatatttatagaattttgaaagcgtagtaaagaggtttaaaagtagtttgtttttttataatttggtttaaaaaattagaatttaaagtttggtagagtttttattggttgatttaaggttagttattttttttttgttatttatagatagttttttttgtattgataaaatagattattgataggtaattttttttttggttgattttagaaattattttgtagttaggaaagacgaattagttatatttagagtagatttttaaaagaaaacgatattttgattttagtgagattaagaagaattatttatttgtttaaaattttatgggaattttttatatttttgtgttggtaaatgatatttttttattataagaagatttatagtttatgagttaaaataattgttttgtttaatagaggagtagttttggggtttttgttttgttttgttttgtttgagatagagttttatatttgtcgtttagtttggagtgtagtggtatgattttggtttattataatttttgttttttgagtttaagttatttttttgttttagtttttttagtagttgagattataggcgtatattattatattggattaatttttgtattttttgtagatataggattttattttgttgtttaagttgatttggaatttttgggttcgagtaatttatttattttggttttttaaagtgttgggattatcggtatgaattatagtgttcggttaaggagtagtattttaataagttaaaattataggtagaagttaggattggaattataatgtgaaggaaaagaaaatgtttgttaaaatgttagataattaaaattttaataataaaatggatatgtatattttattttttttttttttttttatttgtttgaataaattagaattttttagaaataatgaatttaggatttgaattattataaaaataagattggttttttttaattaaaattgttaaaatgaagaaagttgtttgataaagttcgttttaaaaataggaaaatgtttgtaaaatatatatattaattttaaattatttttggtttatttggtttaagtgttatttaggaataggggagtttgtttgtttgtagtgattttttatttttgttgggggagggtatttaattttgtggaaattaaatagtttaaaggaattttttattttttgttattgaagtgatgagtttttattgttattgttgttgttatttggtttgtgtttggtataggtaaattgtgttatttattgtgttttaagaatatgttttttgggtcgggtacggtggtttatgtttgtaagtttagtattttgggaagtcgaagtaggaggataatttgagtttaggagtttgagattagtttgggtaatatagttagattttttttttataaaaatataaaatataaaatttagtttggtatggtcgtatatattagttattggggagattagagtgggaagat

SEQ ID NO: 601 - DNA, 7669 bp, Artificial Sequence
  chemically treated genomic DNA (Homo sapiens)
aaattattaaattgggttagtttttttatttttaatttatgtatgtttttatatttaaagtgggttttaagtagatagtatatatttgggttttattttttaattttatttgatagtttttatttttaattagtatgtttagattatttatatttaatacgatatgtttggattaaattttattattttattggttgttttcgtttgttttatttgttttttatgttttattttttttttttatttttttttgagttgagagtttttttatgattttattttatttttattattattatttatatttttttaaaaatgtagtggttatttttaggtttaaatgtatatgtttaattagagtttatgtttaaataagatattattttatatttagtataagattttatagtttgttgggtatggtggtttatgtttgtagttttagtattttgggagattaaagtaggaggattatttgagtttaggagtttgagattagtttgggtaatatagtgagattttatttttatttaaaaaaaataataataattagaaaattttaaaaagattttaaaatttttaatttttttttttattttgtgtggttgttgttatatatttattttgtatatgttataaagtatatttttatttttggtttaaatagttattttttagagtaattaaatattttttaattgaaaaaatgaattttattttatttttatttgttttattttttggattttttttgttatgtagaattgaatttttgattggtgtattttttttggttaaagaatttttttgaaattgtttttttttttttgtgtgtttttttttgtgtttttttttttttttttattttttttttttttttttattttttttttgtttttttttttgtttttttttatttttttttttcgttttttttatatatatatggtgttggtttgttggttttaaatttttttagtgtttatttgagaaagtttttattttttttttatattttattttatttaagatagagtttttttttgttatttaggttaaagtgtagtggtgtgattatggtttattgtagttttaattttttaggtttaagtagtttttttattttagttttttaagtagttgggattataggtatatattattatgtttggttttttattttttaaaatattttttttaggtaaagaattttatgttaaaagttatatttttggggttagatgtggtggtttatatttgtaattttagtattttgggaggttagggtgggaggattatttgaggttaagagtttgggaattagtttggggagtttagtagtaagattttgtttttataaaaaaaattaaaaaatgagttaggtttggtcgtgtatatttgtaatttttattatttaggaggttgaggtgggagaattatttgagtttaggagttcgaggttatggtgagttataattgtatgttattgtattttagtttgggtaatagggtaagattttatttttataaaagatatatatttttttgatataaagatattattttattatgttttggtttttatgatttttaataagaagtttgttataatttttatttttgtttttgtataagtaatatatgttttttttttgtttttaggattttttttttattttttgtttttagtagtttgaatattatatgtgtaggtgagggtttttgttttttttttgtttttatatttattttttttggaattttttaagatttttggagatagattatatattatatatatatgtattttttttttgagatagagttttgttttgttattatgttggagtgtagtggcgcgattttggtttattgtagttttcgttttttaggtttaagtaatttttttgttttagttttttgagtagttgggattataggagcgtattattatgtttagttaatttttgtatttttttagaagagacggggttttattatgttggttaggatggttttgattttttgattttgtgatttgtttgttttggttttcggaagtgttggaattataggtgtgagttattgtattcggttttttttttttttttttttttgagaaggagttttttttttgttgtttagataggagtgtaatggcgtgatttcggtttattgtaatttttagtttttgggttttagcgatttttttgtttcggtttcgcgagtagttgggattataggcgtgtgttattatgtttgattaattttatatttttagtagagattttgttttattatgttggttatgttggttttgaatttttggttttaggttatttggatttatattttgatgttttttattaattttggaaattttttggttattatattttgaaatattttttttgtttattttttttttttttttggtattttaattatgtatatgtttgatattttgatgtgtttcgtagtttttggatgttatgttatattgttgatattgggggttttttgttttgtttcgttatttaaatttttttgcgttttagtttagttaatttttgtttatttgtttttttgagtttatcgattttttttttggtttttaggtttagtaatgattttatcgaaggtatttattatttttgttattgtgttttttatttttagtattttttatttgatttttttttatagtttttatttttttgttttattttttatgtgaatttttatttatattttttttagatagtagttatattgggtaagatttggatttttttagtttttttttatgttttttttgtatattttaggtttggaaaaatttttttatttagaaattattaagagttttttaaaataggacgttggtgtatttaagttagttttagaaagtaggaaatgataggagagttatagattggttgtattgtagagtaaagagttgttgggtgtatttattaatttgattgatttttttagggttagtggttatttaagtttattttttttttttttatttattttagaagattattaaaatatttatttatgttaaatttaaataaaatgaatatgggttatttttatatattttgtgtttttgaataagttataggttttggattttggtagtttggtaacgtaaggtttatagaattttataagggtttatttttttgttagttttaaaataagaaattttttgagttttttatttaaaatatattgtttcggttgggtgtagtggttcgtgtttgttattttagtattttgggaggttgaggcggatggattatttgaggttaggatttcgagattagtttgattaatatggtgaaattttgtttttattaaaaatgtaaaaattagttaggcgtggtggtatgtatttgtaattttagttatttaggaggttgagataagagaattgtttgaatttaggaggtggaggttgtagtgagttgagattgtattattgtattttagtttgggcgatagagtgaaattttgttttaaaaaaaaaaaaaaaaatgtttttatttggttatagttataaatgtttgtttatttgtttatttatttatttaaatgttttgtaagtttgttattttagcgttattatattttatttagattatattgatgaataagatgttttttttttaggagttagagagatttttattttattaatataagagtgtggttagtattttaatggaggtgtaatatgttatgggatatagagggtgtagtattttatttgggttaggggagattggttagtgttttttggaaaaggtagtattgtaattgggttttaaaaaattattaggattttgataggtaaagaggtggatggttattttaagttaagtaaatagtttatgtaaaggtattaatttatgaagtatttggtaaataatttatgttttatttttttgagagtttggtttattttttttttttatttcggttattagatttattatttgttgttgttttttttttttttttggttatttttattttttttgtttttttatagttttttatggtagattttatggtattagttttatagtttaggatatagagatgaaggattatttgtattgtttttaagtggaagtgtagggtaatattatttttttatttaatttgtgttttagtgtgtgtatttagaatagtaaagtgaattttgtatgaatgtaggttttgtttatagggtagatgattttatattagaatatagtggaatagataaaaattttttatagtatgtatgagatatttggtttatcgattttttttatgttttttatatttagtatttttatattgatttttttttttttttttttattaagtaagggagtattgtttaaagacgtaaatgtattttgttttagtttttttttattgttaaaaatatttatttttattttataatttatttttttatttatttttaatatttagtaggttgtttaaaaagggattaaaaaataaaataggattattttttttgttttagggattggtaggtaggtattaaggttaaggtaggggttaagattagattttattttgtagtttgtttgggaggtgaaaaatttgggaagaagatcgttggtagtatatgtatggaaaggagataggttgtttttatatttttttaggaggaaaaattgttagggggagttaggtatatatggagaagaatttttaatggtttatatttttgggaagttttgtatttagttagttatttgttttgatttggttgtttaaggtttggttttggtttttttttttttttttaattaagataaatgaggtttaattaaggaaaagggatataagatatttattttaaaattgaattttttttaatttttatgaaatgataaatagaattgttagtatatgtgagtattgagaattattttattgatgaatattggtattttttttggtgtaggaagttgaattatttatttttagaaatgtttttagaaagtaaagagtaatataacgttttatttagagatttagttgaaggaaatgatagttatttatttgggatttatttggaattttaaagggaattaagtattgattttaagtaatttgagattaatgattaatgtagattttattataggatttttattgagcgttaagagaaattagatataaattttaaggagtttgttattaaaaagttgtagaagaattgttagtgtagtttagttaaagttaaaaatatgattttaggttttttttttgttttgtagtggtttttaaaatacgatttaaagaaaaatattttaggggatgtgatgttaggtttgattgtgggtatattattggtgttttagtttattgtttattttttgttggttggttaagaatttgtttatggtttgtatatatttttttttgttagtattatttatttttttttgggtatttttcgttatatttttgtgggtatttttggagtattgtgttttatgattggtgagatagttgatcgagaattatagaaagttggttatgataatgtttatagtgttttttttttaggaatggttttaaatgggagtatattattaaattatatattagataggatatgtgataaaagttgttatgtaattatggttggtagtattgtaatttttatagttggagtttattaggtaagtagtaatgaaataattggttatttttagaaaagtaatttagtatatgaaattttatatttttaagggatttgaggaattataataattaaaggtattatttattgagagtttaggatatatgaagggtagaggtaaaatttaaattttaatttgattttataggtaatataaggttggtttattggatttttattatttagtataattttttaattttatatgttagaaaattttggttttgtttgagattatttgtggttggttattggtagagttagtattagtagttaggtaagtgggtaatagaatggagttgagagtgtaggagttttttattttttttttttttttggagatagggttttattttgttacgttggagtgtagtggtattattttagtttattgtaacgttcgtttttttggtttaagtagtttttttattttaattttttgagtagttaggattataggtatatgttattatatttggttaattttattttattttattttattttattttttatttttattttttgtagagatagggttttgttacgttgtttaggttggttttaaatttttgagtttaagtaattttttcgttttggttttttaaagtgttgggattatagttatgagttattatatttagttttaaattttaaatgttttttattttttattaaaattgttgatttattgagtaatttttattaaaggtagtggttgttttggattgttggggagggagggaaaaagttggggattatagttttatattattagttaggagaaaggataagaaattaaatttttgagttttttatagaatttattaatttgttattattattatgtttttggtttttggtatttaggagttagtgttaggattaaattttttttaatgtaggtattttaaattaataagggaaggggaagagtagtttattttagttggtgtttagatgagtggggagggagagtgaagatggtgtgaagatgagttgtttatttatatataatggtaaataataagtttatttatttatttattatttatttatttatttataaagagatagggtttttttatgattaaatttttgggtttaagtgatttttttaatattgtttttttaaatgttgggattataggtatgagttattacgtttaattaatttttgtttttttgttagtatgttttattaagaaggaagaaggtataataattttgaaaatttattagatagaggaaaatataaagaagtaaaaatgtagaatttttattaatatgggagatagtgtggtataagtatatatatattgtatgagaatggttttttagtatgaggttaaagataagtttataataatttttaaagtgtgattttattttgatgtaaatttaattttttgttttattaattaaaattttatttgtatatttgtttttagttaagaggttgagaagtcgtaagattttatttttatagtagtgatttgtaatttaaggaaaatatttggttttttaattagaataattttttttaatttgaagtttttttgtggatttttgagaatgttttttttttaaaagaggtttgttttttgtgatgggaagaatgaaaaaaaaaagaggtatgaattttatttaagtttaagaaacgtatgaaaagaaagaaatttaaagtttttgttttatttgggttaataagtaatagtgtgattttgggtaagttgtttagttttttaaatataatttttatttttgtaaaatgagaagattgatatatgattgtgtttattttagttttgatattttgtgatgttttgatgatatgtttttatgtaagaaatgttaggataatataaaatttagaagtttttttttatttatatttaatatttttatatttttttttttagg

SEQ ID NO: 602 - DNA, 7669 bp, Artificial Sequence
  chemically treated genomic DNA (Homo sapiens)
tttggaaggaaggatatagaagtgttaaatataaatggaaaagaatttttaaattttatattattttgatattttttgtatggagatatattattagagtattatagaatgttagagttagaataaatataattatatattaatttttttattttataaagatgaaaattatgtttaaagggttaagtaatttgtttaaggttatattgttatttattaatttaggtgagataggaattttggatttttttttttttatacgttttttaaatttgaataaggtttatatttttttttttttttattttttttattataaagaatagattttttttaaaagaaaaatatttttaaggatttataagaaaattttaaattggaaaaaattattttagttaagaaattaagtattttttttaaattataaattattattgtaaaagtgaagttttacggttttttagttttttggttaagagtaagtgtataagtgaagttttaattggtaaaataaaaaattagatttatattaaagtagaattatattttaaaaattattgtagatttatttttaattttatattaagaaattatttttatgtagtatatatgtatttatgttatattgttttttatattaataaaaattttgtatttttatttttttatatttttttttgtttaataagtttttagaattgttatgttttttttttttttggtgggatatattaataaaaaggtaaaagttggttgggcgtgatggtttatgtttgtaattttagtatttggggaggtaatattaggaggattatttgagtttaggagtttggttatagagagattttgtttttttataaataaatgaataaataataaataagtaagtagatttattatttattattatatatgagtagatagtttatttttatattatttttattttttttttttatttatttgagtattaattaaagtgagttattttttttttttttttgttggtttgaaatgtttgtattagagaaggtttaattttggtattgatttttggatgttaaaagttaggggtatgatgataatgatagattagtggattttatgggagatttaagaatttgattttttatttttttttttggttgataatatgaaattgtggtttttaattttttttttttttttttaataatttaagataattattatttttagtaagagttgtttaatagattagtaattttaatggaaggtaagagatatttagaatttgaggttgggtgtggtggtttatggttataattttagtattttgggaggttaagacgggaggattgtttgagtttaggagtttgaaattagtttgggtaacgtggtaaaattttgtttttataaaaaataaaaataaaaaataaaataaaataaaataaaataaaattagttaggtgtggtagtatgtgtttgtagttttagttatttaggaggttgaggtaggaggattgtttgagttagggaggcggacgttgtagtgaattaagatagtgttattgtattttagcgtgatagagtgagattttgtttttagaaaaaaaaaaaaagtgagaaatttttgtatttttaattttattttgttatttatttgtttaattgttaatgttgattttgttaataattagttataaataattttaagtaaagttaagattttttgatatgtaaaattaaggagttgtattgggtggtggaggtttagtgaattagttttatattatttgtggagttaggttagggtttgaattttgtttttattttttatatattttgaatttttaataaatgatatttttaattattgtgattttttagattttttagagatatgagattttatgtattagattatttttttagaaataattaattgttttattgttgtttatttgataaattttagttataaaggttatagtgttgttaattataattgtatagtaatttttgttatatattttgtttgatgtatgatttaataatgtgtttttatttgaaattatttttaaggaaggagtattatgggtattgttatagttagttttttgtagttttcggttaattgttttattaattataaggtatagtattttaaaaatgtttatagagatgtgacgggaggtatttaagagaaaataaatgatgttggtaaaaaaagatgtgtatagattatagataggtttttggttagttagtagggaataagtaatggattggggtattaataatatgtttataattaagtttgatattatattttttaaaatgtttttttttaggtcgtattttgggagttattgtaaaataggaaggaaatttaaaattatatttttggttttggttggattgtattggtaatttttttgtagttttttaataataaattttttgaagtttgtatttgattttttttgacgtttaataaggattttatgataaggtttgtattgattattggttttaaattgtttgaagttagtatttgattttttttgaagttttagatggattttagatggataattgttattttttttagttgagtttttgggtgaaacgttatgttgttttttattttttgaagatatttttggagatagatggtttagttttttatattagagaaaatattagtgtttattaataaagtaatttttagtgtttatatatattaataattttatttgttattttatgagagttaaaaggaatttagttttggaataggtattttatgttttttttttttaattgagttttatttgttttggttagggggaaaaaaaaagattagaattagattttaaatagttaagttaaagtaaataattggttgggtataggattttttaagagtataaattattaaggatttttttttatatatgtttggttttttttggtagtttttttttttgaaaagatgtaagggtagtttgttttttttttatatatatgttattagcggttttttttttaggttttttattttttaggtagattgtaaaataggatttggttttaatttttattttaattttaatgtttgtttattagtttttgaaataaggaagatggttttgttttattttttggtttttttttaaataatttgttaaatgttgaaaataaatagaaaagtaggttgtagggtaaagataaatgtttttagtaataaaaagaaattagggtagaatgtatttgcgtttttgaatagtatttttttgtttggtaggaaagaggagagagaagttaatatgagggtgttgaatgtaaagggtatgaagagggtcgatgggttaagtgttttatatatgttgtagaaggtttttgtttattttattatgttttagtatggagttatttgttttgtgggtagggtttatatttatgtaagatttattttattattttaagtatatatattgaaatataggttaaatagagaaataatgttgttttgtatttttatttggaggtaatataggtgattttttatttttgtgttttagattataaaattaatgttataagatttattatgaggaattataggaaaataaaggaggtaaaaatagttagaaaaagagaaaggataataataaatagtaagtttaataatcggagtaagagaagaaaatgaattaggtttttaaaggaatagaatataaattgtttattaaatgttttatgaattagtgtttttatataagttgtttatttagtttagaatggttatttatttttttgtttgttaagattttaataattttttaaaatttagttataatgttattttttttagaaagtattaattaattttttttagtttaaatgaaatattatattttttgtgttttatagtatgttgtatttttattagagtattaattatatttttgtattagtgaagtaggaatttttttagtttttggaggaaagatattttgtttattagtgtaatttgaatggaatgtagtaacgttgagatagtaggtttataaaatatttgaatgaatgaatgaataaatgaataaatatttgtgattgtggttagatagagatatttttttttttttttttgagatagagttttattttgtcgtttaggttggagtgtagtggtgtaattttagtttattataatttttattttttgggtttaagtaatttttttattttagttttttgagtagttgggattataggtgtatgttattacgtttggttaatttttgtatttttagtagagatagggttttattatattggttaggttggtttcgaagttttaattttaggtgatttattcgttttagttttttaaagtgttgggataataggtacgagttattgtatttagtcgagataatatattttagatgaaggatttaggaagttttttgttttggaattgatagaaaaatgggtttttgtgaagttttataaattttacgttattaaattgttaaaatttaggatttatgatttatttaagaatataagatatgtaaaagtaatttatatttattttgtttaggtttaatatgagtaaatattttgatggttttttgaagtagataaggaaagaaagaatagatttaggtgattattgattttgagaaaattaattaggttgatggatatatttagtagttttttgttttataatgtaattagtttgtgatttttttgttattttttgttttttagagttagtttgagtgtattaacgttttattttggagagtttttggtgatttttgggtgaaaaggtttttttaaatttaagatatgtaaaagagatataagaaaaaattaagggaatttaaattttgtttagtatggttgttatttgggaagaatatagataaaaatttatatagaaagtaaaataaagaaatggaaattgtaagaaaaaattaaataaggaatgttaaaagtgaaaaatatagtaatagagatgatgaatgttttcgataggattattattagatttgaaagttaaagaaagaatcgatgaatttaaaaagatagataaatagaaattagttaaattaaaacgtagaaaagtttaaataacgaaataaaataaaaaatttttaatattaataatgtaatataatatttaagagttgcgggatatattaaagtattaaatatatgtataattagaatattaaaagaagagagagaatgggtagaagaaatattttaagatataatggttaagaaatttttaaaattaataagagatattaaaatatagatttaagtaatttgaggttaggagtttaagattagtatgattaatatggtgaaatagggtttttattaaaaatataaaattagttaggtatggtggtatacgtttgtaattttagttattcgcgaggtcgaggtaggagaatcgttggaatttaggaattggaggttgtagtgagtcgagattacgttattgtatttttgtttggatagtaagaggaaaatttttttttaaaaaaaaaaaaaaaaaaaaggtcgggtgtagtggtttatatttgtaattttaatattttcggaggttaaggtaggtagattataaggttaagagattaagattattttggttaatatggtgaaatttcgttttttttaaaaaaatataaaaattagttgggtatggtggtgcgtttttgtagttttagttatttaggaggttgaggtaggagaattgtttgaatttgggaggcggaggttgtagtgagttaagatcgcgttattgtattttagtatggtgataaagtaaaattttgttttaaaaaaaaaatatatatatatataatatataatttatttttaagaattttagagaattttaagaagagtaaatataaaaataaaaagaaaataaaaatttttatttatatatatgatatttaagttgttgaaaataaaagataaagagaaaattttgaagataaagaaaaaatatatattatttatatagaaataaaaataagaattatagtagattttttattggaaattatggaggttagaatatgatggagtggtatttttgtattaaagaaatatatattttttatagaaatagggttttgttttgttgtttaggttgaagtgtagtgatatgtaattatggtttattatggtttcgaatttttgggtttaagtgatttttttattttagttttttgagtagtgaggattataggtgtgtacgattaagtttggtttattttttaattttttttgtagagataaggttttgttattaagttttttaggttggtttttaaatttttggttttaagtgatttttttattttggttttttaaagtgttaggattataggtgtgagttattatatttgattttagaaatataatttttaatatagaattttttatttagaaaaaatattttaaaagataagaggttaggtatggtggtgtgtgtttatggttttagttatttgggaggttgaggtagggagattgtttgagtttaagaggttgaggttgtaataagttatgattatattattgtattttagtttgggtgatagggagagattttgttttaaataaaataaaatatgaaaaagaaataaaaatttttttagataaatattgagaggatttaaggttagtagattagtattatatatatgtggggggaacgggagagagagatgaggggagatagggagagagatagagagggagtgggaaggagaagaagagatggggaaagagagagaaatatagagagagatatatagagagagagagatagttttaggaaggttttttagttaaaaagaatatattaattagaaatttagttttatataataaagaaagtttaggaaatggaataaatgaagataaagtaaaatttatttttttaattaaaaaatgtttaattgttttaaaagataattgtttaaattaaaaatgggaatgtattttatagtatatgtaaaataaatgtgtgataataattatatagaatgggagggggaattgggaattttaaagtttttttaaaattttttgattattattattttttttaaatagagatgaggttttattatgttgtttaggttggttttaaatttttgggtttaagtgatttttttattttggttttttaaagtgttgggattataggtatgagttattatgtttagtaaattgtaaggttttatattagatgtgaaatggtattttatttgaatataggttttgattaaatatgtatatttaaatttaagagtaattattatatttttaaaaaggtataagtaataatagtagagataaaatagaattataaaaaaatttttaatttaagagaaagtagaaaaggaagataaaatataaaaaatagatggaataaacgaagatagttagtaagatggtagagtttaatttaaatatatcgtattaaatatgaatggtttaaatatgttaattaaaaatggagattgttagataggattaaaaaataagatttaagtatatgttgtttatttgaaatttattttaaatataaagatatatataggttaaaagtgaaaggattggtttaatttagtaattt

SEQ ID NO: 603 - DNA, 14987 bp, Artificial Sequence
  chemically treated genomic DNA (Homo sapiens)
  unsure 5092: n is a or g or c or t
gtttttaaattgttttattattattttatttttttttatatatgggggtaaagagttggagttatttttgtttagcggtgtaatttttttttaatgattattttgaagaagggtgatttggtgattttattttttataaatttattaatgttatggggttaaaagattattttttaatatgggagagaaaaagttgaggtttttttatttgttattttttgtgtggtttggtagttattaagttttattaaatgtgttttttaaattttttttaaattaatgttttaatgtaatatatgagttttatttttgaaatatagaagtatttaatttattggattttttcgttagtcgtgtgtttttacgtttatttttttatttatttagttttttttttatttattatgttggagttgttttttaaatttgaatttttatatattaattttttatttaaattttggatggtatttagcgtcgattggaaagttttttatcgtttaaatatgataaggatggttttttagatttgatgtttgttaatttttgaagtgtttttatttatatttgtatttagtaatattgagtaattgtttgtttttaaatgtattttatttattttaaagttttttgtttttttttacgattttatttgttttttttttatttttttttatttggaaaattttcgtttatttttttaaattttgttttagagtttttttttatttgattttattttagattattttagaaataaattattatattttatagtatatatttttattatggtatatattattttaaattttaattatttgttagaaaaatttgtttttttttttaaagttgtgagttttttgaagataaggattatgttgtattaatttttgggttttaagaaattattagtgtgtttgataaagtatagttattttataaatattgtttaagtaaatgaatggatgggtttttataagcgaaaataatatatgttttgtataatttgtgggattgagttttagtaaaggaaatatttgatagggtttattatttatttattattgttagttttttttatttttttgatatttatataatttttttgtaaaatttaaggttgtaagtattttatgtatatgaaggagtaataaaaattgattaaattgggtttatcggtgagttatgtgttttgtggtatatattagtgttattatagatgggttatttttttttttattttttttatatgattttgggtagttgttgttgtattgaaatttatgaaaagtatagttttttgttaattttttttattttagaaataaaattgttttttgtaaaagtatttgtttttttttttatagaatgatatgttttttttttttttaaaggtagtgagaatgtagttaggtattgtgtgttttagattttattgatgagagttaaattggaaattaaggagtttatagtggtgttttttgtttgttgaatttatgagtttattttgttttagagtttttttattgaattagtgtaaagtgtaatttagtaggttttttatttttattattatgattacgattaatgagtaataggtgagtatttttaattttatttgattatattattttttagaaaattttggggataaaatgagaagtgtgttattttttttttatatttataattatattttgtgttttgtattattttatattatagagatttttttattttttttaaggtatatatttgatttggaagtgagaattaatatttattgtgtaattaatgatggtttttttataagttaattaattaaaaaaaatatgaggaatagaataaaagttgatattagtgtattttgtatattttttaatttttttataagatttgattttgttttaaaatgtatggttttagattataaataatgtaaattagtttttgttattttaaataattaatttttgaaattagtataatttgaattttatatttttgtaagttagatttgggaaatataattgaaagtttattttatggaaattaaatttagtttgttttgttgtttttttttttttttttttttttttttttttatttatttatttaataaatattagttggttatattatttgttggttggattttgttgggtattgtgaaaaattaagatatgtgaggttagtgttttcgaaattttatagagaaatagataaagtgttaaataggagtagagttgttataatttcgtaaaataagtagtataagtagtaaggtttgtaagtttagatgttaggttttatttttgatattttttgttagagttttttagattattattttttgtgatttatttatttatttatttatttattttattttttttttttttttattttttattttttttttgagacggagtttcgttttgtcgtttaggttggagtgtagtggcgggatttcggtttattgtaagtttcgtttttcgggtttacgttatttttttgttttagttttttaagtagttgggattataggcgttcgttattacgttcggttaattttttgtatttttagtagagacggggttttatcgttttagttgggatggtttcgattttttgatttcgtgattcgttcgtttcggttttttaaagtgttgggattataggcgtgagttatcgcgttcggtttgtgatttatttttaattattttttttattttattttaatatatagatttaggaatatattatttgttttattttttattttttttattgttttaagtttatttttgagtttttgaaataaaaattggaagttatatttatattattttgtgaaagttagtattatttatttattttttttgaaataaaggagatgaggttatatgaattaggaagggagtgtttttttttagatttatatattaattttatttgcgtatatgaaattttataaaaagaaagtatttgattatgtttagtaataaattgttattaaattgatgaagttttattagtaattttatttttttttaataattatttaggatagtttttggtatattatttaatttattgttaatatgtgtatattttttttttgattttataaattaaagttattttacgtttttttttttttttttggtaatgggtaaatagtgttttatttataaaagtatttggttaggttattggattaatttgataaatattatttttattattaatttttttttttaattttatttttaggtgagttattttgtatatagtttattattttttgagtagttttttgttgtagttttgttaaatttatttttaggaaattaattttttttatggttatatttttttttttatttttatggttataattattttattgtgttttaattgtttttatgtttcggtatttttgttattatagtataagtattttgaggataagtattgtggtttgattattgtagtgtatttagaggatagcgtggttttggtttgattattgtgatgcgtttataggatagtgtgattttggtttgattattgtggggtatttaaagtgtagtagggtttttggagtatgaaaggtatttagtaaaggtttgttttgtttttattcgtttatttttaattgttagataattatagtgtatatttatggggtataatgtaatgtgttgattcgtgtatatattgtaggaagagttagttaagttaattaatatatttattattttattaatttattttttgtggtgaatatgttgtttgttgagtgagtgtttagaattgaaaggtattgtgtgttgtggaggtgtagaggataggtattaaatttaggtagttgtagaaagttggggaagattttagaggaagatagataaattgagatttgaagggtgatagtaagttagtttggtatagggagaggataattttgttaaaaaagagtatggatagagttttagatttgagaaagagtaggggttatagttataggtaaaaaattatgtagttatattttttgttaattatgtttgagaattaaggtagaagttagtgtggtagatatacgtgtgtatttatatatgtgtatatgagaggaaattttggtttttgaaagtttaattagatgtaataaaaagttaaattcgttagtttttaaaatttttgatatttagtttaaagttttttatatgattaaatatatttattaatttttttattattttttttttttttaagttgaagtttattttttttattatattttaattttttgttttaattgttggtattttagtagtatattttaaatagttttattgtagataatagtatggttaaggaaagatatttgaatttaattattttgtatgaagttgttatatataggaattgttgtaagttttaaatatttaatttagaaatgaatatttagaaaattatttgtttataaattgaggttttgagtgtataagggataattggtaataggatgagatggaagttatattggttttagaatttaaacgtttgtattttttatttattaagtttattagatttttggttttattatttgttgaatgggatttataatatttgttttttagttataggtatttttaaaattgaaagagaaattgaatgggaaacgagttatttaatagatggtagattgttgtatttagttatagtataaggttatttgttatagtagttatttttatgttagataataaaaattttattttttttttaataattataataataatatatatggaaaaatatgcgtagtaatttaggttagtaaaattaaagttgtattttttaaaataaatagttttaaataggttttttatgtgtttgtgttataagtatagtaagtacgtttatagagaaatggttttttgttttaatagcgtgaggataatatatattgtaattattttgttttatagaatgattgaagatagtgggaaaagaggaaatattatggtagaaagaagatagttgtttgtagagatgagtaagtatggattttttaaggaantattttatagtttttattgaatatttatggaaaggttagaaataattatttatttttatgatatttgtatttttttttaggatttaaagttttttttatgaagtgtatattttggttttttttattttttatttggtaagagtttagttagttagtaatttattttaatttgttattagattgtttattttatgtggaagaaaatgtttatagatttatatatttatatttatatatatatgtatatatatagatagttgataaatattatttagtgttgatattaatatagtttattaaattttaaagtttgtgtttattattttgaattgttatagtagttggtatattgtaggtattagataaaatttttgaaatgaattattgatttttttttttgtaaagtgatattatatgtttatgtggaaaggagaagttaggtataattattggattaaattataaatttgttatttagattttatgtagaaaaggagaatttattttgtaaattggtttttttaaaaatattaaggaaaataaaagataaaaggagtttagagttgatttgttatataagggaaattaaattaagttattgattttagtgaagaatttatttaataaaggttattggtttatgtaagtgtatagttgttgtataagtaattggttggtagtattttttttgtagattattttttttatttataaagaaaaagaatttgatattagggagaaaattatatattttaagttgaatattataaaggaaaaagtatggttttttttatgtttttttattttttttttttgtatacggaatgaggatgagtaagagtgagtggtaagtttttttttttaagaaggtagtagataaaattaggtttttattaaagattggaagtgattggtaagaatgagggttagaatagaaaaaggaaagttttagataataagatttatatttttttttattattttttaataatttggtggtattaagatagtattagaattaataaggaggaaagaaaattaaaattgatgtggggaattttagtcgtgttttttgttttttttatttttagagatgtgtttagagtgtttgggagagttttagttaggttttttaattttttagattttatgtgtggtattgtgtttttatttggaattgtgatttttgtgtagttataaatttaatagagtaaggagtttagtgagtatttgtttatttaaataaaatttaaagtagtataggtattttttaatagtatatttttatattaaaaaggtataaaattatgttttatattataagatattatgggataatgtttttttagatatagtagaaaaaaaatatttattataaaaaggtaataaaatttggggaaaaatatttgaatttattattataatattaaagattgtattagatagtatattgtaagaattataaaagtatgtttatttaatgattttgtaaatttttttttgagtttaagtattttagtgttttttgaatttgatatagtgtttggtttagataaatatatatgttataaatgtttattggattaaaattgtttaatttaaagaaagttcgatatgatttttagagatatagaaataagataattttaagtttttttttaagtgatagagatttaggaaaattgtgtattcggtttttaaattataattttgtgtttttatagaaatattatagtgatgttttgtagttttattagttttgtgagtttttgtgattaacggttagaatagataaataagttaaataaatatatattttttttttttgggtgttttaatttaaatgttggtaaaaatagttaaatacgtttgattttaataatttattagtttgagtaatatgtttatattagtattaagtagggtatatttataataagtaggattcggttggataaaataattggttggttttaaagggagtaattgattttgataggtagattgttatataaaagagaaaggtaatattattgcgaatgtgttaaatggttgaaaaatatatgggtattttagttgtattagtagtatattaaagaaaggaaaggaaatttttattagagaagattgatattaagatttaaaaagtaatttttaggaatttgtgttttttagatagggagtaaaaaaggattagatttgtaaatttttttatttaagtattatatagaaatatttaaagaaaaaataataaaagaaagtgttaatgagattttttgttttagaaattagaaatgtgaaagaaaagttgtaatggttagagttaaataggtagggaagatttttatttaagattattgtaataagggagaaagattgaatttaatttttttggaagaaaaggtaggaagtattttaagtattggggaaaaatattggaggattttagggaggagattggttaatgtgattaggttatttgtttgttaattgttatatttaaaagttaggtttttatttttttgataagatttggagatagaggtgataagttttttaattattatattttaaagggttggtatttaggtttttgagaaagatatttttgggttgtaaatttggtaagatatttatattttaaaggggtagagaaagaatttataatgaaaagttttttaaagtaaatgttgtaagaaaatagaggttagaagtttagagtaaggaagaagtttatttaaagttaggtaagttgaggaggtttaggttttagaaaaggtaaagaatagagagtaattgataagaaaaatggataagaaagtttggtaaatttaggtgattgtagtatatatgtgttaaatatttatttttagtttattattataagtagtagaagtaggaagaaatagtaaagaaatgaaattaagagaagtatagattaaaaaataaatagaaaaaaatagttttatataaaaaattgggtgattatttattttgatttaagaaattttgtataagtttttttttaattaaaaattttttttataataatgttttaattattagtttgtttagtattttggattaaagttgaaaaaaataaaaaaataaaaaaattttttagttaaatataaatattatttttattttggtttttttagttattatataagtttagtagtttaaataagtttattagattgttttttaatagaataaattgtttgtttttggaattaaattttttttttttgttgttttatttttagagtatatttatttagttttatatggtagttatttgtgaatatgtttataatatttattgttgtgaatttttttttagggatagatttaggatatgtatttttaaatttattttttttagatgttgaattaagttttgtttaaaagtcgattgggtataggatgggtaggttttaatggaagggaagtgattggaaaatatattttgagaatattgaaggttgtttaataaggtaaggaaggttttggggagaaatgagagtgatgttatcggtttgttagtagagataggatttgaaattaaaaggaggtaaatgaaattatttaataaatattatttttggtttttgtttttgtttttgttttgagatatagttttattttgtcgtttaggttggagtgtagtggcgcgattttagtttattgtaattttcgtttttttgtttaagcgatttttgtgttttagttttttaagtagttgggattataggtgtattattatatttggttaatttttgtatttttagtagagatattttgggttttattatgtttggttaggttggttttaaatttttgattttaagtgaaatatttattttggttttttaaagtgttggaattattatttgagttattgtgttcggtttaagtattgttgaattatttgaaggtaggttatttttgagagtgttggttgaagtcggtatatgtacgattggaaaggaatttagggtatgattttgaaacgtatattatgagtttaagaaaatcgattttaaaaatttagaaaaatgatatgaatgattttattatcgtaggtttatggatacggtgattgtttttatttgtttttttattttttatgttttttagtttttttaagatattaatattatggatcgttattttagaaattttttttatgttattattttaatatagttttttgttttttttgttttttttatttttttttttttgttttttagtattttgtagatattgaagttagagaatttaaagatttttttttgattagttgtttttatatataatttgttttttttttaagtttttatttttattgttataatttttgagtgtttagagttttttaaaataatttttattttttatgagttagtttatttaaaataggtagtatataaattaaattttttttttagttttgtttatttgtttttaagtgttttgttaatgaagtagtttgaggagggtttattgttattttattaatagtgtttattataaaaatatttattatttttgttaaggcggttgttttttagtgtttttaaagtttgcggtttttgaataattgttaagtagttgggtatagtttagaagtggggagagtatttttgtttttaagtttgtgttttattttgtcgttagaaatatagaatagttttatttgtgtatagagttttttgttggtaattttggtttagttacgtatattattatattttgtgtgtttgttgataatttttggaatatattaaagttttaatttttatatttaattgttttgtggatattttatttggatattttataagtaatttaaattttttagtttaaaattatttttatttattaataaatttatttttttttgtttgtattttatttagtttaatgagggatattttattttatttagttatttaaggtagtaattattttttatttttaaatttttttatttttttgttagtattttttttttttttttttttagtatttttttttttttttttattttttatatatatatatatatatatatatatatatatatatatatatagagttaatgataaagcgtggtagagtttaggtagtaggtttattataggttttatttttattttggaaatatgtattgagtaaaatttttaaatgaatgagatatttaagaattaaaatggttatatattaatagagttattaaaaatggttatataatgagttattaaaatataaaaggtaaaatatataaaaattgtgtgaaaatgtttagagtgtaaaagttaaaattaaaagttagataagattggttcgttgatttgttggttgattggttgtttgaatgaataaatgaatgggtagggaaaaggtggaaggaaagaagggagtgagagagggagagagagggaagtagggatagagggagaagagaagaaagagaatttttttaaaaagggttaaagaaaggaaaaattgttgttgataatagtgtaaataatttgtgtttttgttgttttatttattatttttttttaattatgatatgggtataagaggtttgaggagacggtgtaagagtattaagttgttttaaataaatttgttttagtttttttattatgaaaagttttaaatatatgtagaagtagagaaaatagtatttattttaatttttaattatgtatgttattttttattgtattagtatgaagtaaaattaataaattatttagattagttgaattattagatttaacgaattatattttagtgatataatttagaaaataattattatttattattttgaaaaataatgaagagtatattgaaaaaaaatgtaacgagaaaattttgtatttttttattaaaaagaaaaagtatagattttttggagtttagggtatgaattggttataagttttataataaaatggatgttttttagattttggttaaaatatagtggtaattttagatatattaatatattaaaagtaaagattgttttgttgattttatttttttatttatttatttaaattttatttttttaatagataaattaagttagttaatacgttttttaataagattattagattgttagattagaaaaatattatttgataaaaattaattttaattttagtaagatattgattaaagttgttggattgtgtatgtgttggggaattgtggattgggttataatatagttaggtagatttatgggggatgttatgattatgtttaaagttataattaatgggtttattaatttggaggaaggcgtttagtagtattttggaaggttttgtttgtggatttgttttggtttttggttttaattaatgattcgaatgaagatatagaattaattttaaagtaggtttttgggtttataaatttttaagaaaagattatatatgtaaaattgggttaagtttattgtttgttggggtaaagaaaaatatatttattttgataaggtagataaatagagtaagaggttatgtattatattttagtttagttttttttggtttttttttggatggattttgtagttaatatatatattgattgtgtacggttgtgtgttgttatatttgatatattaaattgtattgtttattatattttttttaatatttagggtttatattattagttaggaagaatttatatagtatttatagatttatagatttttttttgatttttgaataaaatatagggttagttaagtttatatagtgatacgataggagagagtagttagtgtattttaggtttaaagtagtatttttatatttttttttattgtattttggagaagtgtatttttgtcgtattttttttaggattttaattagaggaaagtgtagaggtgttagggttattgtgtttagagggtaaggttttgtagaaattgagaaatttaattatgtgttatattataaatatttttttatttggagtttaaattattatgtttgaagaatttatataaataatttgtgtttttaatgtttttttttaagtgattatttatagatattgagatttttttgattgttgagttaaatttagtattaataaaagtatatttttatttgggagtaaaggtagatttagtatttaggtatttttaaaagtttttttgtttttggttatcgggtattttagagagtttattttttacgagttatatttatagagggtatgaaattaggaaagatttttgaagttttagtgataatttaagaattttaaaagatttagaaaagtttttagtatgagttaaattttaaaagtaattaattagataaatatgacgttttatttttagttttaaaataggtatttaaatagtaaatagaaaagatttgatttatatagaagtgtatatgattttttaaagtagttttttaattaattttaaatttaataaaagttggtataatgagtcgtttatttttaaaaaaagattatattagttaggagtttttattaaaggtagtaataattgttttttgtatattttatataggtaaagtaatagttatttggattaattttggatatttaattttaaagagatattagttagttatagaatagggtgattagaatgtttaagggttttaaattatgtttgattataatgaaaataataataataattgttatgaattgaagttttattgggtattagatagataaatagtatatttgaaatggttgtggagttgaatattttttattttaaaaaaagttaaggagaagttatttttttagttaaattttaaagtttatgatgataaggattgttgtatataatttttagatggtaatgaggatgttaataatgataatgtagttgttttgtaatattttagaaatgaatttttaaatggtagggggaaaagagtatgtgattttaggggaaattagattaaataggttgaagttatagggaggtaaattaaagtttaaatataaaaaagaaatttttattatatatttttgtttagaaatggtatatgaagttttttaaggggtttatttattgttaagtggttattatgtttttagtgtagaagttaagattttatatttgtattattagttagtaaagttgatattgttatttcgttttatttatgaggaaattgagatgttaaggaaaaatttggtgaaatttatataattgggaagtgatagagttaaattttattttttttaaagtttatttatttttataagtaataattttttttattattggaaataattttacgtggttattggttaaatgtttattttttgagaatatttttaagggaatttttgtattgggtgagggtagttttttatttttttgattttttaagtgtttagtgttattaagtttgtttgttaaagaataagttttattaagagtgatcgtttaatgatttgttttgtaaaattataaagtaataggattattggtaatattttaagtgaatttgaagatatcggtttgagttgaagaaatgttaaattttttagtgggggatatttgttaatttatgttgagttttattgggaaagtatttaattggtcgtttaatataatcgtttttaggatagtttatttattttttattttgttttattttaaaggatttatatagtatattttattagtatatgattggtaaagataaaagtttaatatatgtttttatatttgttatggattataaatatgggtttagaaaaagaaaatatgtagaaatggagaaaagtagatatttattgatagtttaatgtgttttagataaagtttagagattaatttatttaaaggagggtgggaggaatattaggagtttaggttttgatgtaataagtagtttatttgtagggtattgagatgagattgattaaggttacgagagattttgtggtagaaagtggtgggtaatgtcgttaggtaagtaagttggaaagaaattgtagacgagtttggattttgagtagagtttttagatttgatgttttgggtattaggagttatgttggatttttaagtgggagagtgaaataaggaaagtagtttaagaatatagggaatgtgttttttttaagttaggaaggaattggaagttatagtaaaagaaaggttgttttagaaaggtatgtttttttttgagattgataggaaggattataagaaagttgttagtaataaaaatgaatatttatgtagtatttattgtgtgttagacggtgtttaagtgttttaggtatatttatttatttatttttataatagttttgtgtaataagtattattattattattatttttattttttaagtgagaaaattgaagttttaaaagtaattggtttaagggtatatagagaagatgtttagtagttagtatatggttatttaatagttatattttaatgattaatagtaatgtattttaaatgtttatttgatgatagtatttatattatttcgttgttttattgtaggttatagtttgagtagattgtttttagaagtggtggatataatagggatgatattgtgttttttgatttaagaatatggtttataatttaatttttaatgttgattatatgtgtgtgttttttttttttagaatttgaggaatttgtttttgaataggatagatttgtttaagttttaaagttatatttatattttaataaaaataaaattaggggtaaggattatatttatagttgttttatttgtaaatattgtaaatttttttttgtatatatggtatattttatgtgtttttttttttcgtattagg

SEQ ID NO: 604 - DNA, 14987 bp, Artificial Sequence
  chemically treated genomic DNA (Homo sapiens)
  unsure 9896: n is a or g or c or t
tttagtgcggggaaaaaggatatataaggtatgttatgtgtgtagaaagaaatttataatgtttataaataaaataattgtagatatgatttttatttttaattttatttttattagaatataaatataattttaagatttgaataggtttgttttatttaaggataagttttttaggttttagggaaaaagagtatatatatgtaattaatattggagattaggttgtaaattatatttttggattaagaaatataatgttatttttgttgtgtttattatttttgaaaatagtttgtttaagttgtgatttatagtgaaatagcgagatgatatagatattattattaaataagtatttaaagtgtattgttattggttattagaatgtggttgttaggtgattatgtattgattgttgagtattttttttgtgtgtttttaggttaattgtttttagagttttagtttttttatttggaagatggggatgatgataataatagtatttattgtataggattgttgtaaggataaatgagtgaatatatttaaggtatttaaatatcgtttggtatatagtaaatgttgtataagtatttatttttattattaataatttttttgtgattttttttgttaattttagaggaagatatgtttttttaaaataattttttttttattgtggtttttagtttttttttaatttagagggaatatattttttatatttttaaattattttttttattttatttttttatttaggagtttagtatggtttttgatgtttagaatattaggtttaaaagttttgtttagaatttaagttcgtttgtagtttttttttagtttatttgtttaacgatattgtttattattttttattatagaatttttcgtagttttggttagttttattttaatattttgtagatgggttgtttgttatattaagatttgagtttttagtattttttttatttttttttgaatgagttaatttttagattttgtttagaatatattagattattaataaatgtttgtttttttttatttttatatattttttttttttaagtttatgtttatggtttataatagatataaaggtatgtattgaatttttatttttattagttatatattaataaaatgtgttatgtgaattttttagagtaaaatagaatagaaagtaaatgaattattttggaagcgattatattagacggttaattaagtgtttttttagtgaaatttagtatgaattagtaagtgttttttattaggggatttagtatttttttaatttaaatcgatatttttagatttatttgaagtgttgttaatagttttattattttgtggttttataaagtagattattaaacggttatttttaataaagtttattttttgataaataggtttagtgatattgagtatttgagggattaaagagatggggaattatttttatttaatgtaggaatttttttagaaatgtttttaagagatgaatatttagttaatggttacgtaggattatttttaatgatagagaagattattatttgtgaaaataaatgaattttaaaggaagtaaaatttaattttgttattttttagttgtgtgagttttattaagtttttttttggtattttaatttttttatggataaagcgagataataatattaattttattggttggtaatatagatataaagttttgatttttgtattgagaatataatgattatttaatagtaaatgggttttttaagaggttttatgtgttatttttgaataaaaatatgtgatagaaattttttttttatatttgagttttgatttatttttttgtaattttaatttatttgatttagttttttttggagttatatatttttttttttttgttatttgagaatttatttttgaaatattgtaaagtagttatattattattattagtatttttattattatttgaaaattatgtgtaatagtttttgttattatggattttaaaatttagttggggaggtagtttttttttgattttttttagggtaaaagatgtttaattttatagttattttaggtatattgtttatttgtttggtatttagtagggttttaatttatggtagttgttattattatttttattatgattaagtatggtttgaaatttttaaatattttagttattttgttttgtgattggttaatatttttttaaaattaggtgtttaaaattaatttaaatagttattgttttatttgtatagaatatatagaaagtaattattattatttttgataaggatttttaattaatgtgatttttttttaaaaatagacggtttattatgttagtttttattaagtttgaagttaattaaaaaattgttttgaaaaattatatgtatttttatataagttaaattttttttatttgttatttaaatgtttattttggagttaagggtaggacgttatatttatttggttagttatttttaaaatttagtttatattaggaatttttttgaattttttaaaatttttaagttgttattggaattttaaaaattttttttagttttatgttttttgtaaatgtgattcgtggggaatgagttttttaagatgttcgataattagagatagagagatttttagaaatatttgaatgttaaatttgtttttgtttttagatgaggatgtatttttattggtgttaagtttggtttagtaattaggagagttttaatatttgtaaataattatttaaaagaaaatattaggggtatagattatttgtgtaagttttttaagtataatgatttaagttttagatgaaaaaatgtttgtgatgtggtatatagttaagttttttagtttttgtaagattttattttttgagtatagtaattttggtatttttgtatttttttttgattgaagttttgggggaaatacggtaaaggtgtatttttttaggatgtagtaaagagggatgtagagatgttgttttgggtttgaagtgtattgattgtttttttttgtcgtattattgtgtggatttaattgattttgtgttttgtttaagaattaggaagaggtttgtaggtttataaatgttgtataaattttttttggttgatgatgtaagttttgaatattaaaagggatgtggtgaataatataatttagtgtgttagatatagtagtatataatcgtgtataattaatgtatgtgttagttgtaggatttatttagaaagggattagaagaagttgggttgagatatgatatatagttttttattttgtttatttgttttgttaaaataaatgtatttttttttgttttagtaaataatgaatttaatttagttttatatgtgtggtttttttttgaaagtttataaatttaaaaatttattttgggattagttttgtgtttttattcgagttattgattaaaattaaggattagaataggtttataaatagagttttttaggatattattagacgtttttttttaagttgatagatttattagttgtggttttagatatggttatgatattttttataaatttatttaattgtattgtgatttagtttataattttttaatatatgtatagtttaatagttttggttaatattttgttgaaattaaggttaatttttattagatggtatttttttgatttagtagtttggtagttttattaaaaagcgtattagttgatttaatttatttattaaaaagatggaatttaaataaatgagtaaagaaataaaattagtagggtaatttttgtttttagtatgttgatatgtttagaattattattatattttggttaagatttaaaaaatatttattttgttatgaaatttataattagtttatattttaaattttaaagaatttatattttttttttttaataaaaaagtatagaattttttcgttatatttttttttaatgtattttttattattttttaaaataatggatagtggttgttttttgaattatattattggaatataattcgttaaatttggtgatttaattgatttaagtgatttattagttttgttttatattaatatagtgggggatggtatatataattaagagttgagataaatattattttttttatttttatatatatttgaaattttttataataaaaaaattaaaataaatttatttaaggtaatttagtgtttttgtatcgtttttttaagttttttgtatttatgttatagttggaaggaagtaataaataggatagtaaagatatagattgtttatattgttattaatagtagttttttttttttttagttttttttgaaaagattttttttttttttttttttttttgtttttattttttttttttttttttttttatttttttttttttttttattttttttttatttatttatttgtttatttaaataattaattaattaataaattaacgaattagttttatttaatttttggttttagtttttgtattttgaatatttttatataatttttgtatgttttgttttttatattttgatagtttattatatagttatttttgatagttttattaatatatagttattttgatttttaaatattttatttatttaaaagttttgtttaatatatatttttagaataaaaatgaagtttatgatgaatttgttgtttgaattttgttacgttttattattggttttgtgtgtgtgtgtgtgtgtgtgtgtgtgtgtgtgtgtgtgtgtgaaggatggagggagagagagagatattgagagagagaaagagagagatattgataggaagataaaggagtttgggggtaaaaaatgattgttattttaggtagttgagtggaatagagtattttttattgagttaagtaaggtataaatagggaggaataggtttgttgatgggtgaagatagttttgggttaaagagtttgagttgtttgtaagatgtttaagtaagatatttataggatagttggatataaggattagagttttagtatattttagaaattattaataagtatataaaatgtagtagtgtgcgtgattgggttaagattgttaataggagattttgtgtataagtagggttattttatatttttagcgataaaatgaggtataaatttgggaataggagtgttttttttatttttgagttgtgtttagttgtttggtagttgtttaaagatcgtaggttttgggaatattagaaggtagtcgttttggtagggatgataggtatttttgtgatgggtattattagtggagtgataatgagttttttttagattgttttattagtagaatatttgaaaataagtaggtaaggttggaagggaagtttagtttatgtgttgtttattttggataagttggtttatgagaaatgagagttgttttgggggattttgaatatttaagggttatagtaataaaggtaaaggtttgagagaaagataaattgtatatggagataattggttaagaagaaatttttaaattttttgattttagtgtttatagggtattaagagatagaaaaagagaagtagaggggatagaaaaagtaggagattatgttagggtgatgatatagagagaatttttggggtggcgatttatggtgttaatattttaaaaagattgaggagtatgagaaatgaagaagtaagtgaaaatagttatcgtatttatgaatttacggtggtggggttatttatgttatttttttgaatttttgagatcggtttttttaaatttatagtgtgcgttttaaaattatgttttaggtttttttttaatcgtgtatgtgtcgattttagttaatatttttaaggatggtttgtttttaaataatttaatagtatttaggtcgggtatagtggtttaagtggtaattttagtattttgggaggttaaggtgggtgttttatttaagattagaagtttgagattagtttggttagatatggtgaaatttagggtgtttttattaaaaatataaaaattagttaggtgtggtggtgtatttgtagttttagttatttgggaggttgaggtataagaatcgtttgaatagggaggcggaggttgtagtgagttgagatcgcgttattgtattttagtttgggcgatagagtgaaattgtgttttaaaataaaagtaaaaataaaagttaaaaatggtatttgttgagtagttttatttgtttttttttgattttaagttttgtttttgttgataggtcggtggtattatttttatttttttttaggattttttttattttgttaggtagtttttaatgtttttaaagtgtgttttttaattattttttttttattaaaatttatttattttgtgtttaatcggtttttaaataaggtttgatttagtatttaaggggaatggatttgaaggtatatgttttaggtttgtttttaaaaaggagtttatagtagtgagtgttgtggatatgtttataagtaattattatataaggttaagtaaatgtgttttgagagtaaaataatagaaaaggagagtttaattttaagaataaataatttattttgttaaaagatagtttgataaatttatttaagttgttaaatttatatgatggttgaaaaagttaaggtgaggatgatgtttatatttaattagagggtttttttgtttttttgttttttttagttttaatttaaggtattaagtaaattgataattaaggtattattgtgaagagaatttttggttaagggagaatttgtatagaattttttaaattaaagtaggtggttatttaattttttatataaagttatttttttttgtttgttttttagtttatgttttttttaattttatttttttgttgtttttttttgtttttgttgtttatagtaatgagttaagagtgaatgtttaatatatatgtgttgtaattatttgaatttgttaaatttttttatttattttttttattaattgttttttgttttttattttttttaagatttagatttttttaatttgtttaattttagatagattttttttttgttttaggtttttgatttttgtttttttatagtatttattttagaaaattttttattgtaaattttttttttgtttttttgagatgtaaatattttgttaagtttataatttaggaatgttttttttaagaatttgggtgttagttttttgaaatataataattgaaggatttattatttttatttttaagttttattaggagggtagaagtttaatttttaaatgtgataattagtaaatagatggtttaattatattgattaattttttttttgaagttttttagtatttttttttagtgtttaaagtattttttgtttttttttttagggaagttgagtttagttttttttttttgttgtaatagttttggataaaagttttttttgtttgtttaattttggttattataattttttttttatatttttaatttttaaagtaaagaattttattggtatttttttttgttgttttttttttaaatatttttatataatatttagatgagaagatttataagtttagtttttttttgttttttgtttagaaagtatagatttttagaagttattttttgaattttgatgttagttttttttgataagagtttttttttttttttttggtgtgttgttgatatagttgggatatttatatattttttaattatttaatatattcgtagtgatattattttttttttttgtatgatagtttatttgttaaaattaattgttttttttgaaattagttaattgttttatttagtcgaattttatttattgtggatgtgttttatttagtgttgatataaatatgttgtttaaattaatgaattattaaggttagacgtatttagttgtttttgttaatatttgagttggaatatttagggaggaaagatatatatttgtttggtttgtttatttattttgatcgttaattataagaatttatagaattaataaagttgtaagatattattgtgatgtttttatgaaaatataaagttataatttgggaatcgaatgtataatttttttaagtttttgttatttgaagaaaaatttagagttgttttatttttatgtttttaaaaattatatcgagttttttttgagttgggtaattttaatttaatagatatttgtaatatatgtatttgtttgagttaggtattatattaggtttagaaagtattgggatatttaaatttaaagaaggatttataaaattattgaataagtatatttttatagtttttatagtgtgttgtttgatatagtttttagtgttataatgataagtttaaatatttttttttagattttattgtttttttatggtaaatattttttttttattgtgtttgagaagatattgttttatgatgttttataatataagatataattttatgtttttttaatataagaatgtgttgttggaggatatttgtgttgttttggattttgtttagatggataagtatttattaggttttttgttttgttggatttgtaattgtataaaggttataattttaggtgaagatatagtattatatatggggtttaggaaattggaaggtttggttgaaatttttttaaatattttaagtatatttttaaaagtggaaaaagtaaggaatacgattgagattttttatattaattttaatttttttttttttttgttagttttaatgttattttggtattattagattattggggaatgataaaggaaaatatgaattttattatttgggatttttttttttttgttttgatttttatttttgttagttatttttaatttttagtagaaatttaattttgtttattgtttttttagggaaaaaggtttattatttatttttgtttatttttatttcgtatgtaggaagaagagataaaaagatatgaagagaattatgtttttttttttataatatttaatttgagatgtgtggttttttttttaatgttaagttttttttttttatgaataagaaaaatggtttataagggagatgttattaattaattatttatatagtaattgtgtatttatataaattaatagtttttattgaatagattttttattggagttagtaatttagtttggttttttttgtgtagtaggttaattttaagttttttttattttttattttttttagtatttttaaaaaaattagtttgtagaatagattttttttttttatatgaggtttgaatgataagtttatagtttggtttagtaattgtgtttaattttttttttttatataaatatatgatattattttgtagggaagaaagttaataatttattttaaaaattttatttagtgtttataatatgttagttgttgtgatagtttagggtgatgaatatagattttaaagtttagtggattgtattaatgttaatattaaatagtgtttattaattgtttgtgtatgtgtatatatgtgtgaatgtaaatatataaatttataaatatttttttttatataaaatagatagtttaatagtaaattaggatgaattattgattaattgaatttttgttaagtaagaagtaaaaaaggttaaaatgtatattttatgaaaggaattttagattttaaggaaaagtataaatattataaagataaatggttatttttagtttttttatgagtatttaatggaaattatagggtgnttttttaaaagatttatatttatttatttttgtaaatagttgttttttttttgttatggtattttttttttttttattatttttaattattttatgagataaaatagttataatgtgtattatttttacgttattgaggtaagaagttatttttttgtaaacgtatttgttgtatttgtgatataaatatatagaaaatttatttaaaattgtttgttttaaaaagtatagttttagttttattaatttaaattgttgcgtatatttttttatatatattattgttgtagttgttggaggggggataaaatttttattgtttaatataaaaataattattgtagtaaatgattttgtgttataattaaatataataatttattatttgttaggtgattcgttttttatttagttttttttttaattttaagaatatttatgattggagaatagatattgtggattttatttaatagatgatgaaattaagagtttgatggatttggtgaatgaaggatgtagacgtttggattttaagattagtatggtttttattttattttgttgttagttgttttttatatatttaaaattttaatttataaataggtaattttttaaatgtttatttttaagttgagtgtttggaatttgtaatagtttttgtatataataattttatgtaaggtggttagatttaaatatttttttttaattatattattgtttgtagtggaattatttaaaatatattattaaaatgttaatagttaaaatagagaattaaaatgtgatagaaaaaataaattttagtttgaggaaaaagaaaataatgagaaagttaatggatatgtttaattatgtagagggttttgggttaaatattaagagttttagaggttgacggatttgattttttattgtatttaattaaatttttaaaaattaaagtttttttttatgtgtatatatatagatgtatacgtatgtttattatattgatttttgttttgatttttaggtatagttaataaaaggtgtagttgtatggttttttgtttatggttatggtttttgtttttttttaaatttaggattttgtttatgtttttttttgataggattgttttttttttatgttaagttaatttgttgttattttttaaattttagtttgtttatttttttttgaaattttttttaattttttataattgtttgggtttggtgtttgttttttgtatttttatagtatataatgttttttaattttgagtatttatttaataaatagtatgtttattataaaaaataagttggtgaggtgatggatatgttaattagtttgattgattttttttataatgtatatacggattaatatattatattgtattttataaatatatattataattatttgataattaaaaataaacgaatggaaataaaataagtttttattgagtgttttttatattttaggaattttattatattttgagtgttttatagtgattaagttaggattatattgttttatgagcgtattatagtgattaagttaggattacgttgttttttgagtgtattatagtgattaagttatagtgtttgtttttaaggtgtttatattgtagtggtagagatatcgaagtataaaagtaattaagatataatgaggtaattatagttatagaagtggaaagaaaggtgtgattatgagaggggttgattttttgaggataaatttaataaaattatagtagaagattgtttaaaaggtaatgagttgtgtataaaatgatttatttgagggtaaaattaaaaaaaaaaattggtggtaaaagtgatgtttattaaattggtttagtagtttgattagatgtttttatgggtgaagtattatttgtttattgttaggaagggagggaaggacgtagagtagttttggtttatggagttaagggaagagtgtgtatatattaataatgggttagataatatattagggattattttaaataattattggaaaggagtagagttattaatgaagttttattaatttggtaataatttgttgttgaatatggttaaatattttttttttataagattttatatacgtaggtaaagttgatatatagatttagaaaaaaatattttttttttaatttatataattttattttttttattttagaagaagtgggtagataatattgatttttataaaatagtatgaatatagtttttaatttttattttaagggtttagaagtagatttgaggtagtaagagagatagaggatagaataagtgatgtgtttttggatttgtgtgttagaatgagatgaaaagaatgattaaaaataaattataggtcgggcgcggtggtttacgtttgtaattttagtattttgggaggtcgaggcgggcggattacgaggttaggagatcgagattattttagttaaaacggtgaaatttcgtttttattaaaaatataaaaaattagtcgggcgtagtggcgggcgtttgtagttttagttatttgggaggttgaggtaggagaatggcgtgaattcgggaggcggagtttgtagtgagtcgagatttcgttattgtattttagtttgggcgatagagcgagatttcgttttaaaaaaaaaataaaaaataaaaaaaaaaaaaaaataaaataaataaataaataaataaataaattataaaggatggtagtttagggagttttgatagaaaatattagaggtaaagtttggtatttgaatttgtaggttttgttgtttgtattatttgttttgcggggttgtgataattttatttttatttaatattttgtttgtttttttgtaaggtttcgagagtattaattttatatattttaattttttatagtgtttagtaaagtttaattaataaatgatatggttagttagtatttattgaataaatgaatgaaagagaaaaaaaagaggaaagagagaaaatagtaaaataagttaagtttggtttttatgaaatgaatttttaattatattttttaaatttgatttatagaagtgtgaaatttaaattgtattagttttagagattaattatttgaaatgatagaaattaatttatattgtttataatttaggattatatattttaaagtaaaattaagttttatgaagaagttgaaaaatatgtaaagtatattgatgttaatttttgttttattttttatgttttttttgattaattaatttgtaaaagaattattattagttatataataggtattaatttttatttttaggttaaatgtgtattttggaagagatagaaaaatttttgtggtatgaaataatataaggtatagaatataattataaatataagagaaaaataatatattttttattttatttttagagttttttggaaagtagtgtagttagataaaattgagaatatttatttattatttattgatcgtagttataatagtaaaaatgggaggtttgttagattatattttatattgatttaatagagggattttaggataaagtaagtttatgagtttaataggtagggaatattattgtgggttttttggtttttaatttaatttttattaatgggatttgagatatataatgtttgattatatttttattgtttttgaaagagagaagagtatgttattttgtagggaaaggagtaggtgtttttatagagagtagttttatttttgaaatgagggaaattgataaggagttgtgttttttatgaattttagtataataatagttgtttaaagttatatggaggaggtgaagaggaaaataatttatttgtgatgatattaatgtgtattatagggtatatggtttatcgatgagtttaatttggttagtttttgttgtttttttatgtatataagatgtttataattttagattttataagaagattatataaatgttaaaaaggtgaaaagaattaatagtgataaataagtgatgagttttgttagatgttttttttattaaagtttagttttataaattatataggatatatgttgttttcgtttataagaatttatttatttatttatttaagtaatatttataaagtagttatattttgttaaatatattggtagttttttgagatttaaagattaatataatatgatttttgtttttaagaagtttataattttgaaaggggaaataaatttttttaataaataattaaaatttggagtaatatgtattataatgaaaatatgtattgtaagatgtagtagtttatttttggaatgatttgaaataggattaaataaagagggattttgaaatagaatttaaaaggataaacgggaattttttagatgaaaaagagtggaggaagggtaaatagaatcgtgaagaaaagtagggagttttaaaataggtaaggtgtatttgggaataggtagttgtttagtattgttgggtgtaagtgtgagtggagatattttagagattaataggtattaaatttggaaagttatttttgttatgtttagacgataaagggttttttaatcgacgttagatgttatttaaggtttaagtaggaaattgatgtatagagatttaggtttaggaaataattttagtatggtgagtggaaggaagattgggtaggtaggagggtaggcgtgggaatatacgattaacggaagagtttagtgaattggatatttttgtgttttaggagtgagatttatgtgttgtattaaagtattgatttaagagagatttagaagatatatttgataggatttggtgattattagattatatagagaatggtagatgagaggattttagtttttttttttttatattaggaaataattttttggttttatggtattaatgaatttgtaggaggtgaagttattaagttatttttttttagaatggttattaaaagagggttgtatcgttggatagggatggttttaattttttgtttttatgtatggggaaggataaaataatagtaaaatagtttgggaat

SEQ ID NO: 605 - DNA, 5506 bp, Artificial Sequence
  chemically treated genomic DNA (Homo sapiens)
gagagaaaggttattatattttgtaaattaggtattgttaattgttatagaattgtttttttaagttttttttttttttttttttttgagacggagttttgttttgtcgtttagtttagagtgtagtggtgttattatagtttatcgtaatttgtattttttaggtttaagtgatttttttgttttagttttttgagtagttgggataataggtgtttgttataacgttcggttaatttttgtattaataaatagagatagggttttgttatgttggttaggttggtttcgaatttttgattttaggtgatttgtttattttagttttttaaagggttgggattataggtatgagttatcgcgtttagtttttttaagttttttgatagtaatatgatagtaaataatttatgatggatatattggtcggtgtttgaatgtagggtaattgttttaagtttttattttttatttgaggaatttgaggtttgaagagagagatgggtgtgtaatgagggaggaattattttttttttgtgttggttaatatagaggggatggttgtaggggtaaagtttttggtttggagatgttaattatttaaagttataaaaatgggattagaaatagagaaggatggtttgggatttagtatattataaatattttttttttaatattttttggagatgatagggatttttgaaatttttttatttttaaaagtttttttttattttatttatttttattttttattttatttaaatagattttagttttaaataattagatagtagagtttgtttatttttgaatatgtatgaagtacgttatttttaggtgtttagttagtataagaaggtatacgggggttttaaagggtaggtttgaattttaatttaatttagttgtatgtttaaattgtttgattaattgttttagatggggtgagagaagttagtttgggttaagaagtaatgattttttattttgatattttaagtttgggtaattttgggtttatggttagatttatttttaatggaggtgtttttttttatttttttttttaacgtagtagagtttaagggttgtgtaggatttatttttggttagaggggaatgagaaggtagttgaatttttttttttagggggtatagtttttttttgatttttgagtttgagttgtttttttgggttgaggtttttaaaattttgggtggttttgtagatttagtatttttttgataagtatggttattttttagaaaggaatattttatttttgaggatggttagtttatgataaattaatattttatttaagtttttatttaaaaagaaaaaggaaagaaagtaagaaaaaaatttggttataataatcgttgttattgagtaagtatttattatgtgttaggtattatatttcgttttatatatatgatttgattgaattattataaaagttttataataataattattattattgtttttattttttaggtgagtaaattgtaggtaagagaaattgaataatatgtttaaagttagaaagaaaaaaaaattaataaaatttgaatttttaagtatttgatttttaagattgtatttattttattagttgttttgttgtgtttatttaagtatttttttagtttagtgagttagagttttttattattttttagaatagatgaaggattgaaatttagtaaaattgataatgttattttttatagaagtatagagatggcggttgtcgttttatttatttgagtgttgagtttaggagagtataagtttaagtgaacgagggggttttaaattgaggttgagatatttattagttgggtgattttgggatgttattttttaaagttttaattttttaaaatgtagatgatgataatagtgtttagtttgggggatgttgtgaggattaagtaagataatgtatgtgtagtgttgattataggggaattgttattattagtatcgtttttttttaggttttttttattggggagtaagtgttttttttaaattaagaattttggtttagtagtgagttagtagtatttagagttttatggagtttgtttttttagaggtttaggaaattcgtatgggttgggaagtaggatgttagggtttttgttttgtatttgtttttttttgatttattggtggtttagggttaattagtttttaagttttagtttgtttatggttaatagatagttaataaaagtaggtttgtttgtttgaattttatttttttaggattatgtttttggtatttgataatttgatatttagagagtaggtgggggagatttgagtaggaggaggggataatatggaggaattttgtatgatagtgttgttttattgatattttatatgattttgataataatggggtataaaatttagtgtttattttggtttataacgtttttttttatttgttgttagtttttgttttaatattattttatatttttttttttttggtttttttgtttttttttgaatgtttttaatttttttttattttagagtttttgtattatttgtatattttggaatgtttttgttatagatgattttaaatttgattttttttttttatttaggttttagtttatatgttatttgtttagagaaggttttgttaattagtttaaagtgttattttgggtattggaatatattattttatagtatattattgtattttaatttttattttagtagttattattataggatatgtttttttttgtttatttttttaatgtgttgtttgtttattatagaatataagttttgtgaaagtaggttttgggttgttttatttatttttatgtttttagtgttttttaaaaatgtttagttaatgtttatgatataattgagttaatgagattgttttagtatgaattgtgattttttttttttgtttagagatatttaagattttgagaggggaagtgattgttttaaatttaatttaagttttttattttttttttttaggttttttttgtaaaatttggttgatatataaatttagttggggtgaggttttaggtgtgatgaaagtttggagttgttttatgaatgggattgaggttgatgtgggggtgagaaggcggaaggatagagtatgtgaagggagaaaggtaggttggggtaagagagtagggtgtgattttggcgagggtgggggaaagggggtgatttgattatgtgttaggaagtgtttttttttatttttttttggggagagttttgattttaaggtggttttgttttggggaagtaggtggttaggtagttgttgagggagggtaaagttatggtttgggcggtgattatgtattgaggttttaggttcgatatttattatttaaaaggataatttaatagtggtttttagttaaataggtgataggtgagtttttgtttgaaattagtttaattatattataaagttttagatatggtttaggggaaggtaagcgatttagagaagtgagagaaaagaggtttttaaggaaatagagtggttaagtgtttagtgattattattaatagtaataataataatgggttatatttattgagagtttatagtgtgtttggtattatattaattatttttatgtgttttcgtatttattttttaaaaagttttttataaagtagttattattattattgttattattttttttatttgagagacgttaaaattgaggtttagtgaaattaagttttttgtttaaggttatatagtaagtagtaaaggtaggatttaaatttaggtttgtagtgattttagtgtattatggaaatttaggtttaggttattggagtaagttaagagggtagggttagattgatttttgtaaaggtggggatagggagggatagtgggatagattgtgtataaatagtaggtttgtttttatttttatatataggtagaattcggtaagtgttttatttggtataattttagggttttgaaagttaatttagttttgtgttaaataattttttttttagtacgtttttggaaattgaaatatttattgagatatttatttttttgggttaggatagtgattttagaagatttttgtaaaagtatatgggttggaagagaaatatttagtgtttgtgaaatagtaatttaggttagttagttgggttttatgggagggtggtttattttttatgttgaggaaaaaggtggtagttaaaggtaaggaaaagaataaggtttgttttataatttgtgtttttttaattttagaagtttgggaattataatttatagtttaaaaattttaatgttttttgagggaagatgggaggaagttattttagagattaagagagtattaattttttttgtttttgttggattgatattaagtgtttgtaattttaattttggttatttcgggtttatgagaacggttggtatttacgtgtttaatttttaaatgataaatgaattaattattatttgatatttgtcgtgttggtaggttaaaaggtgggtttttgaaatttagagggtgatagggatggagatttttggtatggggtttagatgaagtaagaggttaggttcggaatagaatttagtttagtagttagttataaggttgtagagtgataggcgtttggggaaaggtaggaatcgtttttcgttatttgtcggttagtagttttatttataattaggtcgcggttgtttcggtttggttttaaaaattgtgaacgtcgtttttttttttcgtttagtttttcgtcgcgttcgcggggtcgggggttgcgttgtcggcgtcgcgagtcgggcgagttttttagtacgggaggagggagggggcggcgtcgggcggggcggagttttcgcgttttttggagttttattttcggtcgcgagtcgggtagcgtttattcggtcgaaggagttacgcgggttacgttgttggttggtttgatttaggcgcgcggggtcgggcggtcgcgcgggcgggttgagtgagtaagataagatatttaagaagagcgagttgcgtttgggtttcggttaggtttgtacgtagaggcgggcggtagacggtgttcggcggaattttttgagtttcgtcgtttagttttggtgttagcgtttagtggtcgtcgtttcgaaagtgattggtgtttcgtcgttttttttcggtgcgggattatgaagttgttgtcgtcggtggtgttgaagttttttttggttgtaggtaagagggttgtcgacgttttcggagatcggggggatgggggcgttgtgttgggggtatgggggaaggtcgtcgtagcgtattcggtacgggttatttggtggggtttttgcgttttggcggacgggcgtcggtatcggtgcgtgttggttaggggtttgggcgggtgtttgatgcggtttggtttttcgttcgtagt

SEQ ID NO: 606 - DNA, 5506 bp, Artificial Sequence
  chemically treated genomic DNA (Homo sapiens)
attgcgggcgagaggttaggtcgtattagatattcgtttagatttttgattaatacgtatcgatgtcgacgttcgttcgttagagcgtaagggttttattaagtggttcgtgtcgggtgcgttgcggcgatttttttttatgtttttagtataacgtttttattttttcgattttcgggggcgtcggtagtttttttatttgtagttagaaagagttttagtattatcgacggtagtagttttatggtttcgtatcgagaggaggcggcgaggtattagttattttcgaagcggcggttattgggcgttggtattagagttgggcggcggagtttaggagatttcgtcgggtatcgtttgtcgttcgtttttgcgtgtaagtttggtcgggatttaggcgtagttcgttttttttgagtgttttgttttgtttatttagttcgttcgcgcggtcgttcgatttcgcgcgtttaggttaggttagttagtagcgtggttcgcgtagttttttcggtcgaatgagcgttgttcggttcgcggtcgggaataaggttttaggaggcgcggaagtttcgtttcgttcggcgtcgtttttttttttttttcgtgttgggaagttcgttcggttcgcggcgtcggtagcgtagttttcgatttcgcgggcgcggcggaggattgggcgggaggagagggcggcgtttataatttttgggattaggtcgaggtagtcgcggtttgattgtgggtagggttattgatcggtaggtggcggagagcggtttttatttttttttaaacgtttgttattttgtagttttgtgattgattgttgagttgagttttgtttcgggtttggttttttgttttatttaagttttatattaggggtttttatttttgttattttttaagttttagaagtttattttttggtttattaatacggtaagtattaaataataattaatttatttattatttaaaaattagatacgtgaatgttagtcgtttttataaattcgagataattagagttgaagttgtaggtatttagtattaatttagtaaaagtaaaggaagttagtatttttttagtttttggagtggtttttttttatttttttttaggggatattaggatttttgaattatgggttgtaatttttaggtttttgagattggagagatataggttgtgaaataagttttatttttttttttgtttttgattgttatttttttttttaatataaaaaatgagttatttttttataggatttagttggttaatttagattgttgttttatagatattaggtgttttttttttaatttatgtgtttttgtaggggttttttggagttattgttttgatttaaagaaatgagtgttttagtaggtattttagtttttagggacgtgttggggagagagttgtttgatatagggttgggttggtttttagagttttgaaattgtgttagatagagtatttgtcggattttgtttgtgtgtagggataaaaataggtttgttatttatatatagtttattttattgtttttttttatttttatttttgtaggggttagtttggttttgtttttttaatttgttttagtaatttaggtttaggtttttatagtgtattggaattattatagatttgagtttgaattttgtttttgttatttattgtgtgattttggataagaaatttaattttattgagttttagttttgacgttttttaaatggaaaaaataataataataataataatgattattttgtagggagttttttgagaaatgaatgcgggaatatataaaagtagttagtatagtgttaggtatattataagtttttaataaatgtgatttattattattgttgttgttaataataattattaagtatttgattattttatttttttagaggtttttttttttttatttttttagatcgtttgtttttttttaggttatatttgaggttttatgatatagttgggttggttttagatagaagtttatttgttatttatttggttaagagttattgttagattatttttttgggtgatgagtatcgggtttaggattttagtgtatggttatcgtttaagttatgattttgtttttttttagtagttgtttggttatttgtttttttaaaataaagttattttggggttaaggttttttttaggggagggtggagagaaatattttttgatatatggttaaattatttttttttttttattttcgttagagttatattttgtttttttgttttagtttgtttttttttttttatatgttttgttttttcgtttttttatttttatattagttttagttttatttatggggtaattttaaatttttattatatttggagttttattttagttaggtttgtgtgttagttaggttttataggaagggtttgaaaaaagaagataaaaagtttgaattggatttgggatagttatttttttttttagaattttggatgtttttgagtaaagaaaaggaattataatttatgttgaggtaattttattaatttaattatattataaatattaattgaatatttttggggggtattggggatatagaaataaataagatagtttaggatttgtttttatagagtttatattttatagtagataggtagtatattaaggaaataaataaggaaaaatatattttatagtgataattgttaagatgaaagttaaaatataatgatgtgttgtaggataatatgttttagtgtttaggatgatattttaaattgattagtaaagttttttttgagtaggtgatatgtaagttgaggtttgaatgagaagaagaaattagatttgggattatttatgataaaagtattttaagatgtgtaaatagtgtaaagattttgaaatggaaaaaagttgggagtatttaaggaaaagtaagagggttaaaaaaggagagatatgggatgatattggaataaaggttagtaatagataaaagaggacgttataagttaaggtagatattggattttatgttttattattgttagaattatatgagatgttaatgagatagtattgttatgtaggatttttttatattgttttttttttttgtttaggttttttttatttgttttttggatgttaggttgttaaatgttaggaatatagttttaaggaagtagagtttagatagataagtttgtttttattgattgtttattgattatgagtaaattgaggtttggagattgattagttttgggttattagtgagttagaagggggtaagtgtagagtagaaattttggtattttgttttttagtttatgcgagttttttgggtttttggaaaggtaggttttatgggattttgagtgttgttgatttattgttaggttagagtttttgatttggagagagtatttgttttttagtggggaggatttggaagaaagcggtgttagtggtgataatttttttgtaattaatattgtatatgtattattttgtttgatttttataatattttttaaattagatattgttattattatttgtattttaaaggattgaagttttaaaaggtaatattttaaggttatttagttagtgagtgttttagttttaatttgaaattttttcgtttatttgggtttgtgtttttttaagtttaatatttaaatggatgagacgatagtcgttatttttatgtttttgtggagggtaatattattagttttattgagttttagttttttatttgttttgagggataataagaaattttggtttattagattggaaggatgtttaggtaagtatagtagggtagttaatgaaatggatatagttttgggagttagatatttgggggtttaaattttgttggtttttttttttttttaattttgaatatgttatttaattttttttatttatagtttgtttatttgaaaagtggggataataatagtagttattattatagggtttttgtgatgatttagttagattatgtgtataaagcggaatatgatgtttggtatatagtaggtatttatttaatgatagcggttattatgattaaattttttttttgtttttttttttttttttttttaagtgggaatttgaataaaatgttggtttattatgagttagttatttttagagatgaagtgtttttttttgggagatggttatgtttattaaagagatgttagatttgtaaggttatttagagttttggaaattttaatttaaaaaagtaatttaggtttagaggttagagggaagttgtgttttttgggggagaggatttagttgtttttttatttttttttgattagaagtgaattttgtatagtttttgaattttgttgcgttggggagaggggtaaagaagggtatttttattaagggtaggtttgattatgagtttagagttatttaaatttggaatgttaggatgaggggttattgttttttggtttaggttggttttttttattttatttgagatagttaattaaatagtttgggtatatagttggattagattagaatttaggtttgttttttggagttttcgtgtatttttttatgttggttgggtatttggaagtagcgtgttttatgtatatttagggatgaataggttttgttgtttgattgtttggggttaggatttatttgaataggatgaaggataggaatggatgagatagggggaggtttttggaggtgagggggttttaggaatttttgttatttttagaagatgttgaggaaggaatatttataatgtgttggattttaaattatttttttttatttttggttttatttttgtgattttgaatgattaatatttttagattaaggattttgtttttatagttattttttttgtgttggttagtatagagagaaagtgattttttttttattatatatttatttttttttttaagttttagattttttaagtgaaaaatgagaatttgaaataattattttgtatttaggtatcggttagtatgtttattatgaattatttgttgttatgttgttgttaaaagatttgaggaggttgggcgcggtggtttatgtttgtaattttagttttttgggaggttgaggtgggtaaattatttgaggttaggagttcgagattagtttggttaatatggtaaaattttgtttttatttattagtataaaaattagtcgagcgttgtggtaggtatttgttattttagttatttaggaggttgaggtaggagaattatttgagtttgggaggtgtaggttgcggtgagttgtgatggtattattgtattttagattgggcgataaagtaagatttcgttttaaaaaaaaaaaaaaaaaaaagatttggggagataattttataataattgatagtgtttgatttataggatgtgataatttttttttt

SEQ ID NO: 607 - DNA, 12465 bp, Artificial Sequence
  chemically treated genomic DNA (Homo sapiens)
attttttaggtaggttttatttttgtagaatttagaatttattgtttatattatattgatgttcgtttttttgtatttttttttttattagattgtgaatttttttagggtagaaattgggttttagttattttcgtatttttattgtttaatatagtgtttggtatagagtaggtttcgaggaaatgtttgttagtttgttagttggattttaattagaatattaatattttagttaattttttacggtaggtattatgtattggtttttaaagttgttattttgtgttaatatttatttgattttttttagttttattttatagaagaggagtttggggtttagagaagataggtgatttatttaaagttatatatataatagttagtagatttggttttaaatatttacggggttttttttagaatattatgttgtattttttttttatttatttatttagtaattttttgttttttaaattattaatatttttttttttattataatttatttattatattttaaaattatataaaaaggaatatagtttagtgaggcgtaagtgttttttttatttttgttttttagtttggttaagttttttaatatagttttgtagagatagtttaggtatatgtagtaattttgagatagggttttattgttgtttaggttggagtgtaatggtgtgatttcggtttattgtaatttgttttttttggatttaagtgatttttgtgttttagttttttaagtagttgggattataggtatgtataattacgtttagttaatttttgtatttttagtagagatagggttttattacgttggttaggttggtttttaatttttgattttgtgtgatttgtttattttagttttttaaagtgttgggattataggtgtaagttattgtattcggattttaaatattttttaggttttttttagttttatgttgtttgttttaagaattaggttatatggtttagagttgattggagaagggttagtcgttttttttagtttttttttttgtattgatttatttttttttttaagttttttttaggtttgtaggggtgggtgttttttttttttttttttttttttttgttttaggggtttatttgaattaggggaagggttattatgggtattgttatatatttttttttaggtgtaagagtgaggtggttttgattttgagtaatagtttttattatttatttatttttatgattcggtttcgtatattgaagaatcggttttgtcgttttttttttcgattttttttagtttcgatggttgttgtttttttggtatttgttgattgttttatgttatatatttggagtaaaagggaggtggaatggtttattagtgtcgattatcgtttttgattatacgttatttttatttttttttttttataatattttagtagttattgatttttattgattttattttttgatatatttcgtatttgtgttttttatttttgttgttattagtttaatttaggttttataatttggtgttaggtagtattttaggagttttattgggtttttttgttttaacgttattttttttgtattggatttttttgtattggttattagagtgatttttgggaagtaaatttgattatggtattttttagcgtaaagtttttgaaagtatttttaaagtaatggttttttagtgtttataaggtttaattttttttgttagatttataaggttttttatgatttgatttttgtttatttttttaagttttaaatatatttataatattttttttttattatattttatttagttttttttattttagtaagtggtattattatttattaagttgtttcggttaaaaatttaggagatattttttaatttttttttttttttattttttttttttttaaaataatttttatttaagttattattgttagttttttgaataattataattgtttttatgttggtattttagttttttttattgatttttatagtttaattatagaaattagaagtagtttttttttttgaaatatatgtttttttattttttttttttttttttttttttttttatttttattatttattttttggttaaatgaaaggttagaaagttaaatttgtttgtgtttttttatattttgggaagtttatttttggtatgtaatttagttaaagttgtagttaaaaaaattttagtaaatataaatttgattatgttttttatttgtttaaattttttattagttttttattatatttagaattagatttaaattttttattgtgggtttttaagatttagtttttgtatatttttttaatttgttttaaattattgttttttttgtttatagtgttttaggtaagttgattaagttttttaatatagtaattgtttttatttcggggtttttgtatgtgttgtttttttgtttggagcgtgattttttaattttttttatagttatttggatttttttggtgttttgttttgttttttattttgtaattgtgaagtagttgaatatatatgttcggttgatttttgtatttttagtagagatggggttttatagtgttagttaggatagttttaattttttgattttatgattcgttttttttggttttttaaagtgttgggattataggtatgagttattatatttggttttatttaattttttttaatatagatggggttttattatattgtttaagttagttttgaatttaagtaatttttttgtttcggttttttaaagtgttggtattataggtatgagttattgtgttcggcgttatttaggtttttaatttatttggagttgtattttgtgtatggtgtgagataaggatttaatttaattttttttttaagtgttattttattttttttaaatttaaaattttattttatttttggtcgggcgcggtggtttacgtttgtaattttagtattttgggaggtcgaggtaggtggattaggaggttaggagtttaagattagtttggttaatatagtgaaattttgtttttattaaaaatataaaaaaattagttaggcgtggtagtgggtatttgtaattttagttatttggaaggttgaggtagagaataaaatttattttatttttaatttgttttagatggggtttttttttgttgtttaggatggagtgtagtggtgtaattatggtttattgtagttttaaatttttgggtttaaaggatttttttgttttagttttttgagtagttgggattataggtgtgtgttattatgtttgtttaatttttaaaatttttttgtagagattgggttttgttatgttatttaggtttattattttattttttaaaagggaatagtatttttttatggattatatgagattgttgttttttagttattttatttttttagtttgattgttttttttagttgaattttatttatggtttttttattagattttatttattaagttttttttttttatttatttttgagatagggtattgttttgttatttaggttggagtgaagtggtgcggatattatttattatagttttaattttttaggtttaagtgatttttttgtttcggtattttgggtagattagaggtgagagttgttatatttagttaattttttaatttttagtagagatagggttttattatgttgtttaggttggttttgaattgttggttttaagtgatttttttgttttggtttgttttttttacgatgggattatagttgttagttattatgtttagttatttttttatttttttggatttgttttaagtttttaggattttttttagttttcggatataatttaataaatagttaaaggaataattatggtaattattagattttttttatgtttaagtttgagaatggtattaatttatttattggttttatttgttattatagtataaggttattgaaggggaagatttagttgatattttaagttttttggattgttaaggtttttgttttattaatgatagagagtagagagggaagagaggtaaggtggtattgtggtatagagttgtgggaatgggatgggggagaggtatggaggtagaggtaggtggaggtggagagcgttggtttagggattttgatttttgggggtttatataaaatattttttttagtaaggaatttcgattttgaagtttttaggttggttttgtatgtaattttgtttttgggttacggcggtagtttttgaattttgtttggtataataggagggaggtaggggataggggtagtattttaggtcgtagttttttttagtttgtatttttgttgtttgggagtagttttagttttatttataattcgttcgttttcgtaattcgtttcgttattaattttattttattattagtaaagtttgagtttatttaatattgaattttttcgttggtttttttttttcgtttagtttttcgtttttttcgggtttttttaattttcgattttgtttttgttttagttttgaaagttggttaggttaaagttatagtcgagtttttattttttttttgttttgaggggtataattttgttgtgatttttgttttagtaagcgtgagtttaggtttttttcgtttttttgaattttaagaattgttttgatttcgtttagtaataattttttcggggatttggttcgtaggagtaagtgtttgttgttgttatgtaataagaaaggggggcggaggtattacgttagtcgttagttcgtttttcgtatacgtaatattagttttcgtttttggttttatttttgtcggaaggcgaaaatttcgttaggtttggacgtattttcgcgatatttgtcggtcgttcggtttgtattgcggcgtttttcgcgcgggttattttagttttcgggcgtacggcgcggtttgttttattgtcgtcggcgtcgcggtcgttatggggtttttgaaattgattgagattgagaattttaagtcgtataagggtcgatagattatcggattattttagaggtttatcgttattattggatttaatggttttggtgagataaatttggtcgcggttttgcgtacgtttcggtttggattttttattcggtgtcggagtagtataatttagtttatgtaatttgaaacgtcgcggattttacgggttttttgttcgtttagagggggttttgttcgaatttatttttttcgcgcgggtgttttaattcgaattttttttaggtgttatttgtcgttttttgcgcggttttcgtttcggtttagtggtataggtcgagttgttagttatttcgtttatttttttttttcgttaaaggagtcgcgtttggaattagtttttcgttagtttagtttttcgtcgcgcggtttttcgtcggatcggtcggagtcggttttttagttttatttgatttttttcggagaatgtggggacgttggtagttttttcgtggttttcggttttaaacggtgtatttttgttttagtttagcgttttttttcgtttcgtattggtatattttaatttttttttatttttttttggaggcggtatttttgaattttagatttagcgttttagtttttagaatgtttgaggtgtcgatttttattttttatcgttatgttagaggtagttgtttcgaattcgttttttttttattatcgaaatcgttaaaagtcgaaattaattaatttattaaatttgttgaatgtttattgtttattaggagttatttagttgtaagttgtggaaatagcggagaatagaataaattaattttatgtttatagggaatttatattttagaggggaaagaagataaggagaaaataagatggttttaggttgttataagtgttatataggaaatgagataggtggatgtgataaagtgatttaggtggtgtttttagaaagggtggttaggtaaagtttttattttgtgtttttttaattttaaacgatatatcgtggattttttttattttagatgtttatttggaattttgttgtatttttttattttagagatgttttagttgaatgatattttagtttaagaggttgtttttgttgaagtagtatatattgagtattttttttggagattgagtgttttaatagtggtattattgatatttttagcgagataattttttgttgtgggatgtgttttgtgtattgtaggatgtttaatagtatttttggtatttatttgttagataatagtagtatttttgttttttaggtatgataattaaaattgtttttagatattgttagatgttatagagggtgtgtgtgatttttttaattttttaatttgtttgagaattattggtttggagggttaatgtttggtgtttatttagttttttcgggttttagtgtagtggtttttgttggaagagttaggatgtattttttggtatttagtttttttagtattagtagatttgtatttttagttgttttgaaaagggttatggtatttttttatttgttttcgttttttaaggtttatttttataagttatttttttagtttttttggtgagtgagtttttttttgtggtatatcgtagatatttggtatacgttaatgtttattaagttttatattgatggtgtatgtttttgtatttttattggtttgtgagtattttaaagtagatattttttgaaacgttttattggtgtttagtttataatatatattataaaaatgtttattatattgattgtgattagagaggtttggggttgtgagatgatgttgttttttttggaaatgatgggagaagtttaaaggttggatattggtttttaaaaggttgatttttggtttgtatgatgtgttagttttgttgtgatgagggagatagttgagtttagatttaggataggattaattaattgagtatttattttgtgtgttaagtattttatttattgggattttgtttttttttttttttttttttttttttttttttttttttgagatagttttgttttgttgtttaggttggagtgtagtggtatgatgttggtttattgtaatttttgttttttgggtttaagtgattttcgtgttttagttttttaagtagttgggattataggcgtgcgttattttatttggttagtttttgtatttttagtagagttggtgttttttttagttggttaggttggttttaaatttttgggtttaagtgatttgtttgttttagttttttaaagtgttgggattataggtatgagttattgtatttagttaagggattttttataattaaatttttaaaatgattttaggaggaaaatgttaatagtttcgttttatatatgaggagattaaggtatagaggtgtgataatttgttcgtggtttttagaatttatgtttgtgtttttgttattttaatagagaagtatgtgtcgtatatatttttagattcgtgagttgtggttttttttatttttttttaggtgagggaatggaaggttagttaagtggtagtgaaagtaagattagaatttggtttgttggttttaagtttaagtttgtaagtttttttagatggagttttattttgacgtttatattggagtgtagtggtatgatttcggtttattgtaatttttgtttgttgggtttaagtgatttttttttttttttttttttttttttttttgagatgaagtttttttttgtcgtttaggttggagtgtagtggcgtgattttagtttattgtaatttttgtttttcgggtttaagttatttttttgttttagttttttgaggagttgggattataggcgtgtattattatgttcggttagtttttgtatttttagtagagacggggttttattacgttgtttaggttggttttaaatttttgatttcgtgatttgtttatttgggttttttaaagtgttgcgattataggtgtgagttatcgcgtttggtttattttttttttttttggagttagggttttgttttgttattaaggttggtatatagtggtataattatggtttattgtagttttaatttttcgggtttaagtaatttttttattttagtttttttagtagttaggataattggagtgtgttattatgtcgagttaatttttgtattttttgtagagatgggattttgttatgttgtttaggttggttttaaattttcgaggttaagtgatttatttacgtttgttttttagagtgttgggattataggcgtgagatgtcgtgtttaatttaattatagttttatatcgtttttatggaaggatttgggttgttgtttttatggttgagtagaaaggtgttggaaattagatttttagtttaaagttatatataagttttttagggatagttttgagatagaaattatagagattaaattgtttttttttatttattagttcgattaaatttttttttttttttttttttttttgagatagagtttttttttgtcgtttaggttggagtgtagtggcgcgattttagtttattgtaatttttattttttgggtttaagcgattttcgtgttttagtttttcgagtagttgggattataggtatataatcgtgtttggttaatttttgtatttttagtagggacggggttttattatgttggttaggttggttttaaatttttgattttaggtgattcgtttgtttcggttttttaaagtgttgggattatagttatgagttattgtattcggtttaaatttttaaaataatatttattttttggttaggaacggtggtttatgtttgtaattttagtattttgggagtttaaggtggaggatttttggagtttaggagtttgagattagtttaggtaatatagggagattttgtttttgtaaaaatttaaaaattagttgggtatggtggtttatgtttatgtttttcgttatttgtgaggttgagatacgaggattatttgagttaaggaggttagcgttgtagagagttgtgatattgttattgtattttagtttgggttatagagttagattttgttttagtatgtaaatgaataaggtttgggagtggtagtttatgtttgtaattttagtattttaggagatcgaggtgtgtggattatttgaggttaggaattcgagattagtttggtttatatgatgaaattttaattttattaaaaatataaaaattaattaggtgtggtggtatacgtttgtcgttttagttatttaggagattgaggtaggagaattatttgaatttggtaggtgtaatttagcgtgggcgatagagcgagattttattttaaaaaataaataaaataagtaaatgaaattttttttgttttcggattttaaaatgaataaagtaaaagttgtaattttattattgaaaagatagttattgttaatgttgaaaattttatttatttgaatagttggtatatgtatatggtatataattttaaaaatttttaaggatatatagtagtaaaaagaagatttttttgattttagttgtttagttttttttttagaggtaattattgttgtattgtttacgtttttatatatttgttttttatgttttttttttttttaagttttattatgaaaatttgtaagtatatatgtgtattatttagttatttggaagtaaattatagatttaattatattttatttttaagtgttttagtatttattttttaaaattattatttttttgtattattattatttagttattataattaagaaaatttttttatgttattaattatttagtttatatttaagtttttttaatttgttttttaaatgtttttttgttattttggaattagagtttagttaaagtttgtgtattgtttatttatgttttagaaattttttatgttttggaatggttcgtttattttttttttttttttttttttgagatggagttttgtttttgttgtttaggttggagtgtaatggcgtgattttggtttatcgtaatttttgttttttaggtttaagcgagttttttgttttagttttttgagtagttgggattataggtatgtgttattatgtttagttaattttgtatttttagtagagacgaggtttttttatgttagttaggttggtttggaattttttaattttaggtgattcgttcgtttcggttatttaaagtgttgggataataggcgtgagttatcgtgttcggtttattttttttttttagatattgattttttgaaaagattaggttatttgtttttgagaatattttatattttgtgtttgtgttaagatttttttatgaaaattttattatgtttttttatattgtattgttgtattttttaggaattggaagataagtttgaaggtttgtttagatttagattaggttggatatggtggtttatgtttgtaattttagtattttgggaggttacggcgggaggattatttgaggttaggagtttaagattagtttgggtaatatagcgagattttgtttttattataataaaaaattaaaaaaaggaaaaaaatagatttaggttaaatatttttggtaagatatattataaatgatgttgtgtgttttatattgttttataataggaatatgtattttttttagatggtggtaaaatatatataaaattttttaaattaattatttttaagtgtgtagtttagtagtgttaaatatatttacgtttttgtgtaaacgatttttagaatttttttattttgtaaaaatgaaaatttatgtttattaaaaaataatttttaggttaggcgtggtggtttatgtttgtaattttagtattttgggaggtcgaggtgggcgaattataaggttagaagatcgagattattttggttaatatggtgaaattttgtttttattaaaaatatagaaagttagttgggtgtggtgatgtgtgtttgtaattttagttattcgggaggttgaggtgggagaattttttgaattagggagtcggaggttgtggtgagttgagattacgttattgtattttagtttggtaatagagtaagattttattttaaaagaaaaaaaaattttttatttttttttttttttagtttatttttaaattttattttatattattattattattattattttattttattttattttttttttttgagatggagttttattttgttgtttaggttggagtgtagtggtacgattttggtttattgtagtttttattttttaggtttaagcgatttttttgttttagttttttaagtagttgggattataggcgttcgttattacgtttagttaagttttgtattttttagtagagatagggttttattatattggttaggttggttttgaatttttgattttaggtgatttatttgttttagttttttaaagtgttgggattataggcgtgagttattatgttcggtttattttatattattttaatatcgttgagttttgtgttttgtttgttttatttattgtgggtttttgtttatgttattaaaggttgtaaaattatttattttgtgaatatattatttttttagattgggttttagtttttttttttaaattattttttttttttttttttttttttttattattttttttaaagagagttttgttttgttatttaggttggagtgtagtggtgttattatagtttatgtagttttgaatttttgagtttaagcgattttttttttttagttttttgagtagttgagattataggcgtatgttattatgtttagttaattttttttttttttttttgagatggagtttcgttttgtcgtttaggttagagtgtagtggtacgatttcggtttattgtaattttcgttttttaggtttaaggaatttttttgttttagtttttcgagtagtttatgtttagttaatttttaaagtttttgtagagattgggttttgttttgttgtttaagttggttttaaatttttggttttaagcgatttttttgtttcggtattttaaagtgttgggattataggtgtgagttattacgtttattttgggttttagtttttggttgttatatagtaattgtaaaaggattgttttttttaagtttttgatttagaggtttggttgtgtttagtttttatggggatagaggagtagtttttttttttattagtttgagtattgagtgattaggggatatttttgtttattttaatatttttattttttttttttttttttttattttgattttttttttattgtttcgtttttttttttttagg

SEQ ID NO: 608 - DNA, 12465 bp, Artificial Sequence
  chemically treated genomic DNA (Homo sapiens)
tttaagggaagagggacgaggtagtagagggaaagttaggatgaagaggagaggaaaaggaataaagatattgagatgaataaaaatgttttttaattatttagtatttagattaatgggaagagagattatttttttgtttttataaagattgagtataattaaatttttgggttaaaggtttaggaaaaatagtttttttgtagttattatatagtagttagaagttagaatttaggataagcgtagtgatttatatttgtaattttagtattttgggatgtcgaggtaggaagatcgtttgaggttaggagtttgaaattagtttggataataaggtaaaatttagtttttataaaaattttaaaaattagttgggtatgagttattcgggaggttgaggtaggagaattttttgaatttgggaggcggaggttgtagtgagtcgagatcgtgttattgtattttagtttgggcgatagagcgagattttattttaaaaaaaaaaaaaaaaaattagttgggtatagtggtatgcgtttgtagttttagttatttagaaggttgaggagggaggatcgtttgagtttaagagtttaaagttgtatgagttatgatgatattattgtattttagtttgggtgatagaataagattttttttaaaaaaaatagtgaaaaaaaaaaaaaaagaggaaagaatagtttaaaaaaagaagttagaatttaatttaaagaaatggtatatttatagaatggatagttttataatttttaatgatatggataaaagtttataataggtgaaataaataagatataaaatttaacgatgttaaaataatataaagtgggtcgggtatggtggtttacgtttgtaattttagtattttgggaggttgaggtaggtggattatttgaggttaggagtttaagattagtttgattaatatggtgaaattttgtttttattaaaaaatataaaatttagttgggcgtggtggcgggcgtttgtaattttagttatttggaaggttgaggtaggagaatcgtttgaatttgggaggtggaggttgtagtgagttaagatcgtgttattgtattttagtttgggtaatagagtaagattttattttaaaaaaaaaaaataaaataaaataaaataataataataataataatgtaaagtaaaatttaaaaataggttgggaggaggggaaaatgggaggttttttttttttttgagatggagttttgttttgttgttaggttggagtgtagtggcgtgattttagtttattataattttcgattttttggtttaagggatttttttattttagtttttcgaatagttgggattataggtatatattattatatttagttaattttttgtatttttagtagagatagggttttattatgttggttaggatggtttcgattttttgattttgtgattcgtttatttcggttttttaaagtgttgggattataggtatgagttattacgtttggtttgggagttgttttttaatgggtatagatttttatttttgtaagatgaaaaagttttagagatcgtttgtataaaaacgtgaatatatttaatattattgaattgtatatttaaaaatggttaatttaggaaattttatgtgtattttattattatttaaaaaaagtgtatatttttgttgtgaaataatatgaaatatatagtattatttatgatgtattttattaaaaatatttaatttgaatttattttttttttttttttaattttttgttataataaagataaggtttcgttgtgttgtttaggttagttttgaatttttggttttaagtgattttttcgtcgtggttttttaaagtgttgggattataggtatgagttattatatttagtttaatttgaatttaaataagtttttagatttattttttagtttttaggaaatatagtaatataatatagaggaatatagtaaggtttttatgaggaaattttaatataaatatagaatgtgggatgtttttaaagataaatggtttggtttttttaaaaagttagtgtttaaaaagaaagggtgagtcgggtacggtggtttacgtttgttattttagtattttgggtggtcgaggcgggcggattatttgaggttggggagttttagattagtttgattaatatggagaaatttcgtttttattaaaaatataaaattagttgggtatggtggtatatgtttgtaattttagttatttaggaggttgaggtaggagattcgtttgaatttgggaggtaaaggttgcggtgagttaagattacgttattgtattttagtttgggtaataagagtaaaattttattttaaaaaaaaaaaaaaaaaaaaagtgagcgaattattttaaaatatgagagatttttgagatataggtaaatagtgtataaattttgattggattttggttttaaaataataaaaagatatttggggagtaagttaaggaagtttaaatataaattggataattgatgatatgaggaaatttttttagttgtgataattgaatagtggtagtataggagaatgatgattttaagaggtgaatgttgaagtatttaggggtgaaatgtaattgagtttgtaatttatttttaaatgattaagtaatgtatatatatgtttgtaaatttttataataaaatttgggagaagagaaggtataggaaataaatatatgaaaacgtaaatagtgtagtagtgattgtttttgaaaaggaaattaagtagttagggttaagggagttttttttttattattgtatatttttaaggatttttaaaattgtatattatgtatatgtattagttatttaaataaataaggtttttaatattaatagtggttatttttttagtagtggagttatagtttttattttgtttattttagaattcgaaaataaaaaaggttttatttatttattttatttattttttgagatggagtttcgttttatcgtttacgttagattgtatttattaagtttaagtgatttttttgttttagttttttgaatagttgggacgataagcgtgtgttattatatttagttaatttttgtatttttagtagagttggggttttattatgtgagttaggttggtttcgaatttttgattttaagtgatttatatatttcggttttttaaagtgttgggattataggtataagttattatttttagattttatttatttatatattgagatagagtttgattttgtaatttaggttggagtgtagtagtagtattatagttttttgtagcgttgatttttttggtttaagtgattttcgtgttttagttttataagtagcgggaagtatgggtataagttattatgtttagttagtttttggatttttgtagaagtagggtttttttatgttgtttaggttggttttaaatttttgagttttagagattttttattttggatttttaaagtgttggggttataggtatgagttatcgtttttggttaaaaaatagatattgttttaaaagtttaggtcgggtgtagtggtttatgattgtaattttagtattttgaaaggtcgaggtaggcggattatttgaggttaggagtttgagattagtttggttaatatggtgaaatttcgtttttattaaaaatataaaaattagttaggtacggttgtgtgtttataattttagttattcgggaggttgaggtacgagaatcgtttaaatttaggaggtggaggttatagtgagttgagatcgcgttattgtattttaatttgggcgatagagagagattttgttttaaaaaaaaaaaaaaaaaaaaaaaagtttagtcgggttggtggataaggaggaatagtttagtttttataatttttattttaagattgtttttaaagaatttatatatgattttgaattgaagatttgatttttaatatttttttatttagttataaaaatagtagtttaagtttttttatagagacggtataagattatgattaggttggatacggtattttacgtttgtaattttagtattttgggaagtagacgtgggtggattatttgatttcgggagtttgagattagtttggataatatggtaaaattttatttttataaaaaatataaaaattggttcggtatggtggtatattttagttgttttgattattgggaaggttgagatgggagggttgtttgagttcgagaagttgaggttgtagtgagttatgattgtgttattgtatgttagttttggtgatagagtaagattttgattttaaaaaaaaaaaaaataggttaggcgcggtggtttatatttgtaatcgtagtattttgggaggtttaggtgggtagattacggggttaggagtttgagattagtttgaataacgtggtgaaatttcgtttttattaaaaatataaaaattggtcgggtatagtggtgtacgtttgtaattttagttttttaggaggttgaggtaggagaatagtttgaattcgggaggtagaggttgtagtgagttgagattacgttattgtattttagtttgggcgatagagaaagattttattttaaaaaaaaaaaaaagaaaaaaaagaaaagaattatttgaatttagtaggtagaagttgtagtgagtcgaggttatgttattgtattttagtgtgggcgttagagtgagattttatttaaaaaagtttgtaaatttgggtttagaattaatagattaggttttaattttatttttattattatttagttgattttttatttttttatttggaaaaagatgaaaaaaattataatttacgggtttaaaaatatgtgcggtatatatttttttattggagtggtaggagtataggtatgggttttgagaattacggataagttattatatttttgtgttttagtttttttatgtataaaacgaagttattggtattttttttttagggttattttgagaatttaattgtaaagggttttttggttgggtgtagtggtttatgtttgtaattttagtattttgggaggttgaggtaggtagattatttgagtttaggagtttgagattagtttggttaattgggagaaatattaattttattaaaaatataagaattagttagatggggtggcgtacgtttgtagttttagttatttgggaggttgaggtacgagaattatttgaatttaagaggtagaggttgtagtgagttaatattatgttattgtattttagtttggataatagagtaagattgttttaaaaaaaaaaaaaaagaaaagaaaaagaaaaagaaaaaatagggttttaataaataaagtatttgatatatagagtaggtatttaattaattagttttattttaagtttggatttagttgttttttttattatagtaggattagtatattatgtagattaggagttagttttttaggaattaatatttaatttttgggttttttttattatttttagggaggataatattattttataattttaagtttttttaattataattaatatggtaaatatttttgtaatatatattatggattgaatattagtaaaacgttttaaggaatgtttgttttagggtatttataggttaatgaagatataaaaatatgtattattaatataggatttaataaatattaacgtgtattaagtgtttacggtatgttatagaggaagatttatttattaaagggattaaaggaatggtttgtagaggtgggttttgaagaacgggggtaagtgggggagtgttatagttttttttagaatagttgggaatataaatttattaatgttgaggggattgaatgttaagaggtatattttagtttttttaataggggttattatattaaaattcgaggaaattgggtggatattaagtattagttttttaggttagtggtttttaaataagttggggggttgggggaattatatatattttttgtgatatttagtaatgtttagagatagttttgattgttatgtttggggagtaggggtgttattgttatttagtaggtagatgttagagatgttgttaaatattttataatgtatagagtatattttatagtaaaggattatttcgttggaaatgttaatagtgttattgttgagatatttagtttttaggaaaggtatttagtatgtgttattttagtaagggtagttttttaggttaggatattatttagttagaatatttttggggtggaagaatatagtaggattttaaatggatatttgaggtgagaggaatttacggtgtatcgtttagagttgggaagatataaaatagaggttttatttgattattttttttaaagatattatttaagttattttattatatttatttgttttattttttgtatagtatttatgatagtttaaaattattttattttttttttatttttttttttttttggaatataagttttttgtgagtatggagttggtttattttatttttcgttgtttttataatttgtaattgaataatttttgataaataataagtatttaataaatttggtaaattagttaatttcggtttttgacggtttcggtggtaggaaaagggcgagttcgaggtaattatttttgatatagcggtggggggtggggatcgatattttaagtattttaaagattggagcgttgggtttgaaatttaaaagtgtcgtttttagagaagagtagaaaggagttggagtgtattaatgcgaggcgagagaggacgttgggttgaaatagaagtgtatcgtttgggatcgaaggttacgggagagttattagcgtttttatatttttcggagggggttaagtaaggttgggaagtcggtttcggtcggttcggcggggagtcgcgcggcggaggattgagttggcgggaagttggttttagacgcgatttttttggcgggagggggaagtaggcggggtaattggtagttcggtttgtattattgggtcggggcgggggtcgcgtaggaagcggtaagtgatatttggaaggggttcgagttagagtattcgcgcggggagagtgggttcgagtagaattttttttggacgggtaaggaattcgtaaggttcgcgacgttttaggttatatgggttgggttgtattatttcggtatcggataaggggtttaggtcgggacgtgcgtagggtcgcggttaggtttattttattagagttattgggtttaatgatggcggtgaatttttgaaatggttcgataatttgtcgatttttgtacgatttaaagtttttaattttaattagttttaggaattttatgacggtcgcggcgtcggcggtagtaggataggtcgcgtcgtacgttcgagaattgaggtagttcgcgcgggaaacgtcgtagtgtaagtcgggcgatcggtaaatgtcgcgagaatacgtttaggtttaacgggattttcgtttttcggtaggagtgggattaggggcggggattgatgttgcgtatacgaggagcgagttgacgattggcgtggtgttttcgttttttttttttgttgtatggtaataataaatatttgtttttgcggattagattttcggaggagttgttgttgggcggagttagagtagtttttgaggtttaaggaggcgggggagatttgagtttacgtttgttgagatagaagttatagtaggattatgttttttagggtaagaggaaggtgggagttcggttgtggttttagtttggttagtttttaaggttaggataaggatagggtcgggaattggaaggattcggggggagcggagagttggacgggaaggaggggttaacgggaggatttagtgttaggtgagtttagattttgttaatggtggggtgggattggtggcgggacgggttgcgaaggcggacgggttgtgaatgggattggggttatttttaggtaatagggatataggttggggaaggttacggtttgagatattatttttattttttgttttttttttgttgtattaagtagagtttagaaattgtcgtcgtaatttaagaataaagttgtatgtagagttaatttaagagttttaaaatcgggattttttattgagaaaggtattttgtgtgaatttttaggagttagggtttttaagttagcgttttttatttttatttatttttgtttttatgttttttttttattttatttttatagttttatattataatgttattttattttttttttttttttgttttttattattaataaggtaggggttttagtaatttaagaagtttaaaatgttagttgaatttttttttttagtgattttatattgtaatggtaggtgaaattagtaggtaagttggtgttatttttagatttaaatatggaaaggatttggtggttgttataattatttttttaattatttattaaattatgttcgaaggttagaaagagttttaaagatttaggataagtttaggaaagtgaggaagtggttgggtatggtggttgataattgtaattttatcgtgagggaggtaggttaaggtaggaggattatttgagattagtagtttaagattagtttgggtaatatagtgagattttatttttattaaaaattaaaaaattagttgggtgtggtagtttttatttttggtttatttaggatgtcgaagtaggaggattatttgagtttgggaggttgaggttgtagtgagtggtgttcgtattattttattttagtttaggtgatagagtaatattttgttttaaaaataaataaagggaggaagtttggtagatggaatttagtaggggagttataaatgaagtttagttgggagaaataattaggttgaggggataaaatggttaaaagatagtaattttatgtaatttatggggaaatattgtttttttttaaaagatgagatggtgagtttgggtaatatagtaaaatttaatttttataaaaaaattttaaaaattaggtaggtatggtggtatatatttgtagttttagttatttaggaggttggggtaggaagattttttgagtttaggagtttgaggttgtagtgagttatgattgtattattatattttattttgggtaatagagagagattttatttaaaataaattaaaaataaaataaattttattttttgttttagttttttaagtagttaggattataggtgtttattgttacgtttggttaatttttttgtatttttagtaaagatagggttttattatgttggttaggttggttttgaatttttgattttttgatttatttgtttcggttttttaaagtgttgggattataggcgtgagttatcgcgttcggttaaaaataaaataaaattttaaatttaaaaaagatgagatggtatttggggggaaaattaaattggatttttattttatattatatataaaatgtaattttaagtggattaaaaatttaagtgacgtcgggtataatggtttatgtttgtaatattagtattttgggaggtcgaggtaggagaattgtttgagtttaagattagtttgggtaatatagtgagattttatttatattaaaaaaaattaaatggggttaggtgtggtggtttatgtttgtaattttagtattttgggaggttaaggagggcggattataaggttaggagattgagattattttggttaatattgtgaaattttatttttattaaaaatataaaaattagtcgggtatatatgtttaattattttatagttataaaatggaaaataaaataaaatattaaaaagatttaaatagttataggaggaattaaagaattacgttttaaataaaggaatagtatatataaaggtttcggggtgggaataattattgtgttggaggatttgattagtttgtttggagtattgtaagtaagggagatagtggtttgagataaattggagaggtgtgtaggaattagattttgaaagtttatagtaaggagtttggatttgattttaagtatagtgggaagttagtggaggatttaagtaggtgagagatatgattagatttatgtttgttaaagtttttttggttgtagttttggttgggttatatgttaaaagtgagttttttaaaatatgaaggaatataggtaaatttagttttttagttttttatttgattagaaaataagtaataaaagtaaaaaaaaaaaaaaaaaaaaaaaaagggtggggggatatatattttagaaaagaaagttgtttttggtttttgtgattgggttataggagttaatagaggaagttggaatattaatatggagatagttgtggttatttaggaagttggtaatggtggtttggataagggttattttgaaagaagaaggagtgagggaaaggaaggattaaaggatgttttttaggtttttgatcggagtaatttggtgaatggtggtgttatttattgaaataaggaaaattgaatagagtataatgaaaaaggagtgttgtagatgtgtttgaggtttagaaaggtgagtaggggttagattatgaagaattttataaatttggtaaagggggttgggttttataagtattggggagttattgttttaaaggtgtttttaaaggttttacgttgaggagtgttatggttagatttgttttttaaagattattttggtagttagtgtagagaaatttagtgtagagagggtaacgttggagtaagagaatttagtggggtttttgagatattgtttgatattagattgtgaggtttgaattaagttggtgatagtagagatggagggtatagatacgaaatatattaggaagtaaaattagtaggaattaataattgttgaaatattatagggagaaaggaatgggggtggcgtgtagttaaagacggtggtcggtattgatgggttattttattttttttttgttttagatgtataatataaaatagttaatagatattaaggaagtagtagttatcgaggttagaagaaatcgagaaaaagagcgataaaatcgattttttaatgtgcggaatcgagttatgggggtgagtgggtagtagggattgttgtttaggattagggttattttatttttatatttggagaggaatgtgtaatagtgtttatgatagttttttttttgatttaagtaggtttttagggtaggaaaggaaagagagggagagaaggtatttatttttataggtttgggaagagtttgggaagagggataggttagtgtaggggaagagattaggggagacggttgatttttttttagttagttttgggttatgtgatttggtttttgagataggtaatatggagttaaaagaggtttaaagaatatttggagttcgggtgtagtggtttatatttgtaattttagtattttaggaggttgaggtgagtagattatataaggttaggagttaaagattagtttggttaacgtggtgaaattttgtttttattgaaaatataaaaattagttgggcgtggttgtgtatgtttataattttagttatttgggaggttgaagtataagaattatttgaatttaggaggagtaggttatagtgagtcgagattatattattgtattttagtttgagtaatagtgagattttgttttaaaattattgtatatatttaaattatttttgtaaggttatgttgagaaatttaattaggttgagagatagagatggaagggatatttacgttttattaaattgtatttttttttgtatgattttgaaatgtgataaatgaattataataaaagagaaaatattgatagtttaagaaataaaagattgttaggtgagtggatagaggggggatgtagtatggtattttggaaaagatttcgtaagtatttaaggttaggtttgttgattgttatgtgtgtggttttggataaattatttgttttttttgagttttaggttttttttttgtaaaatgaggttgaaggaagttaggtgagtgttaatatagagtggtagttttgaaaattagtgtatagtgtttgtcgtaagaagttggttagggtattagtgttttgattgagatttagttgataagttgataagtattttttcggggtttgttttgtgttaagtattgtgttgggtagtggggatacgaaaatgattaaggtttagtttttgttttgaaagggtttatagtttggtggaggagagaatatagagaggcgaatattaatataatgtagatagtgggttttagattttataggagtagaatttgtttgaggggt

SEQ ID NO: 609 - DNA, 5308 bp, Artificial Sequence
  chemically treated genomic DNA (Homo sapiens)
gattataggcgttcgttattatgattggttaatttttttttgtatttttagtagagacggggttttattatgttagttaggatagtttcgattttttgatttcgtgatttattcgtttcggttttttaaagtgttgggattataggcgtgagttatcgtatttagttataatgaagttattttaaaatgattataaattttttttagaatatgtagggtttagtcgtacggggtttagtgggtgtttttttcgtgtgcggagatgagagattataataaataaagatataagataaagagataaagagaaaatagttgggttcgggggattattattattaagaggaggagatcggtagtggttttaaacggttgatatttattgtatataagataaggggatagggtaaggagggtgaattttttgagtgattgataaggtgaagtatgttacgtgattataggataggggtttttttttttttaggtagttgaagtagagagggaaggtagtaaacgttagcgtttttttttatgtatttttaagaaagattaaatattttaagattttaattattttttttatcgttatttattgtgaattttaaagaggaattaggagtatgggaggagtatgaaagtggataaggagcgtgattagtgaagtattatagggagggggttaggttttcggatgattgcgggtaggtttggaaaatatttagttttttataagaagttggtggagtagagtgttttttgatttttttaaagaaaggagattgtttttcgtagtttgttaagtaacgggtgtttttttagatattggcgttatcgtttgattaaggagtttttaaacggtttttatatgggcgtgatagacggtttattttttgttttttaggttattttttataatgtttttttagtatttgattttatattcgtcggtgatttttaggttatattaatgatgtaataaagagtaatattaaaagttaatgattaatgtttatattaatgattgataatgtttatggttatttttatatttaatttgtatgataattatttttattgtaattattttttttattatattgaaatagtttgtgtttttagttttttgtttcggtatttgggtaatttttcgtttataagaatatagttttagttgttttttgtaggagtttagtaggaagggaatttatttttgtagtgtttgatatgtagttttaaggaaggagattattttttatatatatgttttatgtttaatttttgtttttaaagaaagaaaaagtaaaatttaaaagatagaaataaaatttataggtagatagtttagtgtcgcgttttgggtttggtagttaaagagggatttttgatttaatcggttatgttatttgtagattttagatattgtatggaaaagtattgtgaaaatttttgttttgttttgtttcgttttgattattcggtgtacgtagattttagttacgtattttttgtttgtttaatcgattatgattttttacgtagatttttttagagttgtgagtttttaaaagggataggaattgtttatttagggagttcggtttttgagataggagttttgtcgatgttttcggtcgaataaattttttttttttttaatttggtgtttgaggagttttgtttgcggttttttttgttatagtttgtaattagattatttttgataagttttgatttagggtttttttttaaagatttgttaattttaaaatatttgtttgtttttgttttttgttttttttttttttttttttttttttttttaagataaggttttattttgttatttaggtcggagtttagtggtgggattattgtttattgtaggatttaatttttagatttaatagattttgtcgatttagttatcgattttatagttgggaatatagatgtatattattatatttagttaatttttaaagttttttgtcgagatgggttttattgtattgtttaggttgagtttttttttttttttttttatattttgtttgtttagaattgtatttgattgtaattaaattatgtgttatattttttttttaatttgtgtgattattttgtggtttaatatatgattttttttgcgaatattttatggatttaaatagataagttttttttttatatataattaaatggagtgtgtgttttgtattatttagtttttttatttttatttttgtttttgtttgtagatttgttttattttagaatgggtatattgaaatttgggtaagggtgaggttagcgttttgggtggtttaggttattattttattcgtgttatagaatttatatagaggtttagcggcggtattgggtggtggggaagggggaggcggatttaggttgggggggtaggtagttagtgcggttgttaggaagcgggaaagggttataatggggtttgggaggtgggcggggcggagcggggatgtttagttacgtcgttttgtttttttacgttaggagttattataataggttagtgtatttcggggtatcgggttttttacgtaggtttttttcggggtatttttttttaatagtacgaaaattttttgtttttattttatttttaggtgattttttttattaagtttgggtttagatttggttttcgcgagtttacgtttttgtttaatgcgtttggagttcgggtgatggttttggattcgttttcggttttaagttttatatagtcgggaaggaagttcgcgtttgttttgttggcgttagggatacggtttaggtttcgtttcgtttcgcgttgattttagggtagtgggaaagtgcgttttttaagaatttgcggtgtaggggtcgcggttatcgttttttgttcgtaggtgttgcgagtcgtaagcgttttttattcgcgttatgggttcggacgtttgggtgggtttttggcggttatatcggtttcgcggttttatcgcggcgtattacggaggtttcgggtttaaatataagttgtcgtttaatatcggtagaaggggtaggtttcgggattgaggggtgggacggcgtttgggggagggaaggggaagagattagggaggtttgcgttcggggttgaatcgtgtttgttagaggggagagggggtttgtgtcgggggagggttcgtgttgtagatggggtttggggttgggttcggttagacgttaattcggatgtttttaggttacgttttgtatgattcgtcgcggtcgcgcgttttcgtttttattttcggcgcgcgtttttttacgtagtagacgacgtgcggtttcgggttaggttatttggtgttcgttcgtatgatcgtgcgcggtatcgacggcgttttcgtttattttatttacggtcgtttacgtcgtttagcgtttttttttatttcgggatttggttaggattttcgggtttttggttattttaacgtcgaattgtttttagggaggtttatttgggaattttcgatttgaatttcgagtttttttcggatattttaatatcgtatattcggtatttttatattcggattttaaattttaaatttcgaattttacggggttttgataaatcgtggtttagattttttattagttttaggattttatttcgggtatttattaggtttttacgtagttttagttttttatatttttgattcgtttcgtaggtaggtatttttcggagcgagcggggaacgcgacgtattttagtgcgtttcggtatattattgtttttcgaaattggggtgtttaggcggaatagtagagtttaggtgaggttagaacggtttattttagaattgtgggtttttttattcgagatcggggatcgtttttcgggagttgggattattttgcgtttgttcgcggagatttattattttcgagttttgttttttttttaggtttcgcggtttatacggtgttttcgtttttgggttcgcgcgttatcggtaaagttttcgttttaatttgttttatttacggtcgtagagcggttggtagttttttcgaggattttagtaaggtgggggaggggtcggggcggacgtagggggtttttggttcgcggtagtggaggcggtagttagtattttttgttttttcgtagatttcgggtttttgcgtttattaggtcgtgagtttaggggtttataagtttcgggttttttagtttacgattttggcgcggatttcgtttttttaagataatattcggaagttagggttcgcggtttataacgtggattaggtggtttggagtttagggttaagggttagagttaggagagtggggagggtttgaggtcggagtgatgggattagagttttcgggggtttaggggtttcggcgcggagaggatgtcggtttcgcgaggttagcggtgttttcgggttcgtagtatcggaagtttcgcggttggagtttcgggattcggtattcggattatttggtttcgttggtgatcgacgcggataattgattcgttaggcgggagcggttttatacgtgtttgtttaaagtttgcgagttcgtatcgtgttcgtttttttttttttttttttgcgcgttttggcgtaaggtttggggtggagttacggttggggtcgtgttttaatttcgaatttagcggggcggggttcgagcgtcgggcgaggtcgggattttagcgttgcgtcgcgttcgaacgtcgagattttatcgagggcgggagggggattttcgggagttatagacgttcgagatttacgtcgggcgggatcggttagggattattttcgtcgacggtttcgggtttcgacggttcggaagtttcgcgtgttcgggggtatcgggggattggtcggggcgcggcgtgtaaggtttttcgggggcggcgattgtcgagtttcgttttttaggcggttttattcgtttgtcgttttggggcgtcgtcgtttcgtcgtcggtagtggatcgttgtgcgcgaattttgaattttacggtttcgattcgcgggcgaggtcgggtatttgggttgggattcggagtaagcgggcgagggtagcgttttaagtaggtacgggcggggtttaagtcgcgaggcggggaagcgggaggtagatacggacgagggcgatatagatacgggatcgaggggcggatatcggagagatacgggaaaggggtcgggataggagtacgtggtttagatatcgacgtcgggaggtcgtagatttcggacgtgttaggtattttcgtagg

SEQ ID NO: 610 - DNA, 5308 bp, Artificial Sequence
  chemically treated genomic DNA (Homo sapiens)
tttgcggggatgtttgatacgttcggggtttgcggtttttcggcgtcggtgtttgagttacgtgtttttgtttcgatttttttttcgtgttttttcggtgttcgtttttcggtttcgtgtttgtgtcgttttcgttcgtgtttgtttttcgttttttcgtttcgcgatttgagtttcgttcgtatttgtttagggcgttgttttcgttcgtttgtttcggattttagtttaggtattcggtttcgttcgcgggtcgggatcgtagggtttagggttcgcgtatagcggtttattgtcggcggcggggcggcggcgttttaggacggtaggcgggtggggtcgtttggagggcggagttcggtagtcgtcgttttcgggaagttttgtacgtcgcgtttcggttaatttttcggtgttttcggatacgcggaattttcgggtcgtcggggttcggggtcgtcggcgggggtgatttttggtcggtttcgttcggcgtgggtttcgggcgtttgtggttttcgagagtttttttttcgttttcggtggggtttcgacgttcggacgcggcgtagcgttggggtttcggtttcgttcgacgttcgggtttcgtttcgttgggttcggagttgggatacggttttagtcgtggttttattttaggttttgcgttaggacgcgtagagagagagagagagaggcggatacgatgcggattcgtagattttaagtaaatacgtgtggggtcgttttcgtttggcgggttagttgttcgcgtcggttattagcggggttaggtagttcgagtgtcggatttcgaaattttagtcgcggggttttcggtgttgcgggttcggagatatcgttgatttcgcggggtcggtatttttttcgcgtcgggatttttggattttcggggattttgattttattatttcgattttaggttttttttatttttttgattttgatttttgattttgggttttaggttatttgatttacgttgtaggtcgcgggttttggttttcgagtgttgttttgggggagcgaagttcgcgttagaatcgtgaattggggggttcgggatttgtagatttttggatttacgatttgataggcgtaggggttcggggtttgcgagagggtagagggtgttggttgtcgtttttattgtcgcggattagggattttttgcgttcgtttcggttttttttttattttgttgaggttttcgaagaaattgttagtcgttttgcggtcgtagatggagtaagttggggcggagattttgtcgatgacgcgcggatttaagagcgagggtatcgtataggtcgcgggatttggggaggaggtagggttcgggggtagtgggttttcgcggataggcgtagggtggttttagttttcggagggcggttttcggtttcgagtgggaaggtttatagttttgggatgggtcgttttgattttatttgggttttgttgtttcgtttggatattttagtttcggggagtaatggtgtgtcgaggcgtattggggtacgtcgcgtttttcgttcgtttcgggaagtatttgtttgcggggcggattaagggtgtggggggttagaattgcgtgggagtttggtgggtattcgagatggggttttgggattagtggggagtttgagttacgatttattaaagtttcgtggggttcggggtttgggatttgagattcggatatgggggtatcgaatatgcggtgttagggtattcgagggggattcggggtttaggtcgggggtttttaggtgggtttttttggaggtagttcggcgttggggtggttaggggttcgggggttttgattaggtttcggagtgaggaagggcgttgagcggcgtgggcggtcgtagatggagtaggcgggggcgtcgtcggtgtcgcgtacggttatgcgagcgggtattaggtggtttggttcggggtcgtacgtcgtttgttgcgtggggaagcgcgcgtcgaaggtgaaggcgggggcgcgcggtcgcgacgggttatgtagggcgtagtttgggagtattcgagttagcgtttggtcgggtttagttttaagttttatttgtaatacggattttttttcggtatagatttttttttttttttagtaggtacggtttagtttcgagcgtaggtttttttggtttttttttttttttttttttaggcgtcgttttattttttaatttcggggtttgttttttttatcggtgttgggcggtagtttgtatttgggttcggggttttcgtagtgcgtcgcgatggggtcgcggggtcggtgtggtcgttaaaggtttatttaggcgttcgagtttatagcgcgggtggggggcgtttacggttcgtagtatttgcggatagaaggcggtggtcgcggtttttgtatcgtaaatttttggggagcgtatttttttattattttgggattagcgcggggcggggcggggtttggatcgtatttttggcgttagtaaaataaacgcgagtttttttttcggttgtgtggagtttggggtcgggagcggatttagggttattattcggattttaggcgtattaggtagggacgtgaattcgcgggggttaagtttagatttagatttggtgaagggaattatttgggggtggggtgggggtaggagattttcgtgttgttgggaaagggtgtttcgggaagggtttgcgtgggggattcggtgtttcgaggtgtattgatttgttgtggtagtttttagcgtgggaaaataaagcgacgtggttggatattttcgtttcgtttcgtttattttttagattttattgtggttttttttcgttttttggtaatcgtattgattgtttgtttttttaatttgggttcgttttttttttttttattatttagtgtcgtcgttgggtttttgtgtggattttgtggtacgggtgggatagtagtttgggttatttagaacgttggttttatttttatttaagttttagtatatttattttggaataggataaatttgtagataaaagtaaggatgggaataaaggaattgaataatgtaaagtatatattttatttaattatgtgtagagagaggatttatttatttaagtttatgaaatattcgtaaaaaaaattatgtattgggttataaaataattatataaattgaaaaaaagatgtgatatatgatttgattataattaaatataattttaggtaaataaaatgtaaaaaaaagaagaagaaaatttagtttgggtaatatagtgagatttatttcgataaaaaattttaaaaattagttgggtgtgatgatgtatatttgtatttttagttatggggtcggtggttgagtcggtaggatttgttgagtttgggagttggattttgtagtgagtagtgattttattattagatttcggtttgggtgatagagtgagattttgttttaaaaaaagaaaaaaaaagggagagagagaataggaagtaggagtaaataaatattttgaaattgataaatttttaaaaaaaaattttggattaaaatttgttagaaataatttggttataaattgtagtaggaagagtcgtagataaaattttttagatattaggttaaagaaggaagggatttattcggtcgggggtatcggtaagatttttgttttaagagtcgagttttttgagtgagtaatttttgttttttttaagggtttataattttaagggggtttgcgtgagaggttatgatcgattgagtaagtagggggtacgtgattggggtttgcgtgtatcgggtaattagaacggaatagaataggatagggatttttatagtgtttttttatgtaatgtttggaatttatagataatataatcggttaggttaggggtttttttttaattattaggtttagggcgcggtattgggttgtttgtttgtggattttatttttgttttttaggttttattttttttttttttggaggtagaaattgggtataagatatatatatgaggggtggtttttttttttaaaattatatattaaatattataaaggtagattttttttttattgaatttttataggaggtagttaaagttgtgtttttgtgggcggaggattatttaggtgtcgaggtaagagattgaaggtataaattgttttagtataataaagaaaatagttatagtaagaatagttattatataaattagatatagagatgattatggatattattaattattagtgtagatattagttattaatttttaatattattttttgttgtattattaatataatttaggaattatcggcgggtatagggttaggtgttgaagggatattgtgagaagtgatttagaaggtaagaggtgagtcgtttgttacgtttatataagggtcgtttgagggttttttggttaagcggtaacgttagtgtttgggaaggtattcgttatttagtagattgcgaaaggtagttttttttttttgaaggagttagggaatattttgttttattagttttttgtgggaggttggatattttttaggtttgttcgtagttattcggaggtttaattttttttttgtggtgttttattggttacgttttttgtttatttttatgttttttttatatttttggtttttttttgaagtttatagtagatagcggtagaagaaatagttaaagttttaaagtatttgattttttttagaaatgtatagaagaaaacgttgacgtttgttgttttttttttttgttttagttatttaaaagggaaggggtttttgttttgtgattacgtgatatgttttattttgttaattatttagaagatttattttttttattttgtttttttgttttgtatgtaataaatattagtcgtttggggttattatcggttttttttttttgatggtagtggtttttcgggtttagttgttttttttttatttttttgttttgtgtttttatttattataattttttattttcgtatacggggagaatatttattaagtttcgtacggttggattttatatgttttgaggaaaatttatagttattttaagatgattttattatggttgggtgcggtggtttacgtttgtaattttagtattttgggaggtcgaggcgggtggattacgaggttaggagatcgagattattttggttaatatggtggaatttcgtttttattaaaaatataaaaaaaaattagttagttatagtggcgggcgtttgtagtt

SEQ ID NO: 611 - DNA, 6650 bp, Artificial Sequence
  chemically treated genomic DNA (Homo sapiens)
ttaattgttatgaattttttttttggaaattttattaattagggaagattaaattcgtattataagagaggagattggaggttgatattatgtttagataagttttattatagggtgttatttatttttttgaggttttatttatttttttttaaaattatttattttttttagaggtttattttttttttttttttttttttatgaaaagggtttataagtttttagattttattgggttgggtatttattttttttttatgtgatgtttttatgtatgtaaaaaaaatgtgtatgtttgttatagtttggatgtggtttgttgtttttattaaattttatgttgaaatttgatttttaatattggaggtggtgtttaatgggaagtgtgttagttatgagagtagattttttgcgaatagattaatgttttttttggggatgaatgtatttttgttttgttagttttttttagaattggtttttaaaaagagtttgtttttattttattttttttgttttttttttttttatgtgatttttgtatatgttagtttttttttattttttgttatgagcgaaagtagtttgaggtttttattaaatgtttagttttaaattttttttagatattagaattatgagttaaataacgtttttttttttataaattatttagttttaggtatttttttatagtaatataaaatagattaagataatatatttttttttattaatttgtttgttgttaatttattttatagatttagttattaaattatttgaggatagaggaaagtttttttttttttatatattttgtttaagtatagttgttttgtaaaatatatattgttattttcgttttgtagataagaaaattgaggttttgtaagagaagtaaaaattatttgttttaagttatatagtttataagtgaataaggtgggatttaaattaggatttaagtttaaagttcgtgttttttttaattatttgattatcgttaagtaggttagagagttatttgatttttatgttaattatttattttgtggattaattagagttaagaggtatttaaaattagtttttgtttaattttttagtatattttatttaattggtgggtatttaggggttgataatatattttggatttttattatttgggggttgttaattaatattgttttattttattttattttattttattttattttattttattttattttattttattttattttattttattttattttattttttgagatagagtttcgtttttgttatttatgttggagtgtaatggtataattttagtttattgtaattttcgtttttttggtttaagcgatttttttgttttagttttttgagtagttgggattataggtgttcgttattatatttaattaatttttgtatttttagtagagatgggtttttattatgttggttaggttgatttggaatttttgattttaggtgatttgtttattttagttttttaaagtgttgagattataggtatgagttattacgtttagttatattattttttagggttagataaataaaagtaggaagggaaatttgatgagatagataggttagtgaaatattataaattaattatattttaatttttggattatttatttttttggattatttataatttttatagtagtataagtaagaggataattttataatttttatttggttttattttttttgtaattttttataatgtattatgtagttttttatttaggaaatgttttataagtggtacggataggtattttttggataagttttttttttggaattttaggtagtttaagttatcgtgagtgattttatgttttatttatttgataaataatattggtgtttattatgtggtaggtgttatgttaggtattagaaatattaaaataaaataatattggtgtttattatgtggtaggtgttatgttagagattagaaatagtaaaatagaaaggatataatttttattattaaggagtttatagtttagtggtaagaaatttatgtgaaatatttaaaatgtagtgtggtaagtgatattattaaagtatgtttagggtgtaatgaaagtataaaggaagtttggttggagtgagttgtggggttatattagatagaatatgtgaattgatttttgaagaatttattaggtttttaaggtaggggtaattttgataaagaaattagtttgtttaaaggtacggtggtgtgagaagtgttagtaaatttagtagtgtgtaagtatgatttttttgtaaaatggtggaagataatgttggagagatagattagagggtatgttaaggagtttatattttgtttttcgtagtatttgggattaaagaggtaaggtgaatgagtgataaggatagtaatgaaggatagaagaaagaggtggtgatggttgtggaatttgattgtttatgtttattttaaggagatagttttagttgagtgtagttatatgggaatgtgaatttagagttatagggttttttggttttttaatagaaaagtaggaaatttggattttttaaaaatgtgaaatttttagagttttaatagttgataattgtttttttttttttttaatttaaaggtttagttgatattgtatcgaatataatatatttgtttgttggatgtggtttgtaggttgttattgagatttgtgttttaggggataggatacgtatggaagtatagaagttaattgaaataaaattttaaaatatttaaaaaataattatatatatttttttttggattgttttattttaatatttttattgtatatgatgatatatgttttttttttggggaagtaaagagaggttttaggttaaatgtaatttttagggtttttgagggtaatggtgtaatttagagttttagttaagtttggtagaatatggtaaggtgagattagtgtggtttttgagtattattattattattaggagatggttgttatttgttttttttttattttagaggaagaaagggtagtttgtttaaattgtgtatgtaagaaagttaatatggttagtgataatatagataaaatatagtgtaaaggttgttaaagtttaaattttttattttattgtcggagaaattaaggttttgaaaaagtatagtgatttgtttagagggatttagtaatttagtggtaggatgaagttttttgatttttggtttagtattttttttaataatttcgggttgtgataattaaagtaaattagtttggtagtttttttagtatttagaatttttggattggataagtaggatttgagagtagttgttaaatattttttttttttttagttttaggatgatgatattttttgtgaattttatattttatgggtaggggttaaagagacgatataaagatgtttttgaagtattgagattatttataaagtgtatagagaaaagttgtttgtggttaatatatttaaggtttatgatttttgtgttttttggattgatttgttagtagatgtttttggttttgtgttttattttttttattttgtttttttttttatttttatttatgtttttttttttttttattagtttaggttttaggtttatatataagtgttttcggtattgttgagtttttatgatgatatttaagatgtttgttgtaagttaataaaattgttaattatttattatttaataatacggaatgagagtgcgtagtgattatgaagtatatatggtttttttgttatggttatttcgttttttataattttagattagtaatttttgttaattgtgatttttgatttaattttttttattttttattttagggtttattgttttgttttttgttatttttttttttttatttgaattcgtttttgattggtgtagttgttgaagatgttgtagttgtagtagtgtatatttggaatatttggttgatttgttgaattttttttagggagtattttaggagaaggatgggaggggtggagaggttagaatagttgtttgtaaataaagatgttagtagtgtttggttattttgtggattatatttgtataaatttattttattttggttttcggtttttttgtttatttattgaagatatacgttttttaattaaaattgttgtagtggaagaaatttattttggttgtggatgtttttatatagtattttttgtattgtatagggatcgatagatatttgttgaattaattaatatattaagaaattttaggagattgttttattttttaagggataatattattttagtttcgtttggtatggggcggtttttttgttatttagattgagtttttagagttattttaggagtgaggttgtttgagttttatttatttttatagtttttaggtttttgggttttttttttttcgggcgagttattgaattgtaaatatagtaggtatggttttattttaaatttagagttgttttaattagtttaacgtttgttaaacgttttgaagattggaagtaatagataagtattggatgatgttattaataattgtagttaattgtaaatatttttattaatgttagtttttgtttttttttttttgttttattttttttttaaggtttttaaatttttagttttttttttttttttttttcgtattggcgttatagggttaaattggggcggagtttagggatgaacgatagcgttagttattaattggtacggggtaagcgggaagagttgggtggggcggttaggtagaggcgaatttttacgtttttaggtttcgtttcgcggttggaggttcggttggaacggtacggggcggggcgttaaggtttggcggtttcgtggttgggcgtttcggtagtcgtttgagggatggggcggggtcggtcgggatttttttttttattttttcggcgggtcgagttttttttttttttcgttttttttttttttttttttatttttcggagtagagttgtatatgcggttgttttttgtttcgtttcgtttagttattgtcgcgtaggaacgggtttttgtagtttttagtcgatggtaggatagtagtcgtttgttagaggtcgtgaacggttgaggtagacgtagcggttttcgggttttaagagagtgggtgttttcggaggttatgggttattcggaggtggagcgtagggaatttttgtttgtagtagcgtcgcgggagcgagggagttagggttgcgggtgtggcggggtttttgttcgggcgggcgaagggaatagttgtttgttttttttgggtttttttggtttttcgttggttttttatttgttgacgttgtgttgttatttagagttgcgttcggagttgcggcgggaacgtggagtcgagtttcgttttggcggttcgggtatttttggtatttttggtattttaagtagtttcggtggtttcgattttgatagttttattattagttattttgggtagtcgttatttaagtagtagttattggaatcgggagaagtcgtattttattttgatttttaggacgggtattaggtgagttatttagtaggggcggcggcggtttttttttttcgcgggtagggcgagggtttttcgttataggggtttgggagtatttagtaatttcgagttaatttagagggtaggattagggagggattaggcgagtaagggagaagttgtttagggtaggttgttttcggtttttggtttagttaatttagattttttggggattttttgatttggaaagtttcgcgcgcgttcgcggtttttggttgcgggttgtttcgagaaaagttggcgacgttttcgtcgaggaggtgtttgcgttgtttttcggtcgattaacggtttggtttttttgttcgtgatgaggttttttgttcgcggtgtttgttttttcgtgtttagagttgatgttagaattagtaggtttttttttggagttggagttgtaaatagttgtaataattgttttacgttcgttcgttgaaataatttttaatcgtatttttagcgcgggtttttgtgcgttgattagaacgtgggtttgtttatatttatttgtaatttgagattgattgttttcggcgttttagtgaggattagcgtttttgaggaattttggtagaaatatgtcgttttgttagataatttttgaatagtaattttaaaaatttatggaaataaaatttattttttgtatgtcggttttgatttttaagcggggtaggtgtgcggtgggaagggtgggtgggaagcgtttttattattgttagtttgagaacgggaatttgttaatggaataattatttaggattcgttttttaagagtagttttgtttgtttttgtaatttttatggtgtttgtgttttaataagtaaattattagttttggtgtttgttttttattttattttttttagttttttatttaagtaaatttcgtttatttaacgtaaatattgttttggttgttatatgtgaaatttaggagaagtatttaaggattttttcgaggtggttaaagaataataataa

SEQ ID NO: 612 - DNA, 6650 bp, Artificial Sequence
  chemically treated genomic DNA (Homo sapiens)
ttattattattttttagttatttcgaaaggatttttggatgttttttttaagttttatatatggtaattaagatagtatttacgttaagtgaacgaaatttatttgaataaaaagttagaaagaatagaatagaaaataaatattaaagttaatagtttgtttattagggtataaatattataaagattgtaaaaataaataaaattgtttttgggggacgagttttgagtaattattttattggtagattttcgtttttaagttaatagtagtaaaagcgttttttatttattttttttatcgtatatttatttcgtttaagaattagaatcggtatgtaaagggtgagttttatttttatagatttttaaaattgttgtttagaagttgtttagtaagacggtatatttttattagaattttttaggggcgttgatttttattagaacgtcgaggataattagttttaaattgtaggtaagtgtgaataagtttacgttttggttagcgtataaggattcgcgttgaaaatgcggttaaaagttgttttaacgggcgggcgtggaatagttattatagttgtttatagttttaattttaaaggggagtttgttggttttggtattagttttagatacgaaaaaataagtatcgcgggtagagaattttattacgagtagaagggttaagtcgttagtcggtcggggggtagcgtaggtattttttcgacgggagcgtcgttaatttttttcgaggtagttcgtagttaggggtcgcgggcgcgcgcgagattttttaagttaaggggtttttagggagtttggattagttgggttagggatcgaagataatttgttttgggtaattttttttttgttcgtttggtttttttttggttttgttttttaaattggttcgaggttgttgagtgtttttaggtttttgtggcggagggttttcgttttattcgcgaggggagggggtcgtcgtcgtttttattaggtgatttatttggtgttcgttttgggagttagagtggagtgcggtttttttcggttttaatggttgttgtttaggtgacggttgtttaaggtgattggtgatggggttgttagggtcgaggttatcgaggttgtttagggtgttagaggtgttaggggtgttcgagtcgttaaggcgggattcggttttacgttttcgtcgtaatttcgagcgtaattttaggtagtagtataacgttagtaggtggagggttagcgagaggttaaagaaatttaggaagagtaggtagttgtttttttcgttcgttcgggtaggggtttcgttatattcgtagttttggttttttcgttttcgcggcgttgttgtaggtaggagttttttgcgttttattttcgggtagtttatggttttcggagatatttatttttttgaggttcgggagtcgttgcgtttgttttagtcgtttacgatttttgataggcggttattgttttgttatcggttgggggttgtagggattcgtttttgcgcgatagtggttgggcgggacggagtagggagtagtcgtatgtgtagttttatttcgaggggtgggaaagggaggaggaggggcgggagagaggggaggttcggttcgtcgagggaatgaaggaggaggtttcggtcgatttcgttttattttttaagcggttgtcgggacgtttaattacggggtcgttaagttttggcgtttcgtttcgtgtcgttttagtcgggtttttagtcgcggggcggggtttgggggcgtgagggttcgtttttgtttggtcgttttatttagtttttttcgtttgtttcgtattagttggtgattggcgttgtcgtttatttttgggtttcgttttagtttaattttatagcgttagtacggggaggaaaggagggggaggttaagaatttgggaattttggaaagaaagtagagtaaagaaaaggaggtagaaattagtattaatagaaatgtttgtaattaattgtagttgttaataatattatttagtatttatttgttgtttttaatttttaaagcgtttaatagacgttaaattaattaaaatagttttgggtttggaatgaaattatgtttgttgtgtttgtaatttaatggttcgttcgaagaaaaggagatttaggagtttgggaattatgggaatgggtgggatttaagtagttttatttttggagtgattttgaaggtttaatttaagtaatagagaagtcgttttatgttaagcggaattgaaatgatgttgttttttgaagggtaaaatagttttttaggattttttgatatattaattaatttaataaatatttatcgatttttgtataatgtaaaaaatgttgtatgagagtatttatagttagaatagattttttttattgtagtagttttgattggagaacgtatgtttttagtgagtagatagggaaatcgagggttagaatgaagtggatttgtataagtgtggtttatagaatggttagatattattggtatttttatttataggtaattgttttggtttttttattttttttattttttttttggagtattttttgggggaagtttaataagttagttaaatgttttagatgtatattgttgtaattgtagtatttttaatagttgtattaattagaaacgggtttagataaaaaaaaaaaagtggtaaaaggtagaataatagattttgaaatgaaggatggaaaggattaaattaagagttataattgataagagttattagtttgagattatagaaagcgaaatgattatagtaggggaattatgtatgttttatagttattacgtatttttatttcgtgttattgagtaatgaataattaataattttattgatttgtagtaggtattttgagtgttattatggaggtttagtaatgtcgggggtatttatgtgtaggtttaagatttaggttggtggaagagaagaaaaatatagatagaaatagaaaagaagataaaataagagaaataaaatataaaattaaaagtatttgttggtaggttagtttagagagtatagaggttataagttttaaatatattagttatagataatttttttttgtatattttgtgaatggttttagtgttttaaaaatatttttgtgtcgtttttttaatttttatttatgaaatataaagtttataaagaatattattattttagagttaaggggaaaaaaggtgtttaatagttgtttttaagttttgtttgtttagtttaggaattttagatgttaggaaaattgttaggttgatttattttaattattatagttcgggattattggaaagaatgttagattaggagttaggagattttattttgttattaggttgttgggtttttttgagtaagttattgtgtttttttagggttttagttttttcggtagtaaaatgaggagtttgaattttaatagtttttatattgtgttttgtttgtgttgttattggttatgttgatttttttgtatatatagtttaaataggttgttttttttttttttaaaatgaaaaggaaataaatgatagttattttttggtggtgatggtgatgtttaggggttatattggttttattttattatgttttattaggtttgattgagattttggattatattattgtttttagaagttttgagggttgtatttgatttgggatttttttttgtttttttagagaaagaatatgtgttattatatgtagtagaaatgttggaatggggtaatttagagaggaatgtatgtggttattttttaagtgttttaaagttttgttttagttagtttttatgtttttatacgtattttgttttttaaagtataggttttaatgatagtttgtaggttatatttagtaaatagatgtgttgtgttcggtgtagtattaattaaatttttgaattaaaaaaaaaaaaaagtaattgttagttattggaattttggagattttatatttttaaaaaatttagattttttgtttttttgttaaaaaattagaagattttataattttggatttatatttttatgtggttatatttagttagaattgtttttttgaaataagtatgaataattaagttttatagttattattattttttttttttattttttattattgtttttgttatttatttattttatttttttgattttaggtattacgggagataagatataagttttttaatatgttttttagtttgtttttttaatattattttttattattttataaggaagttatgtttgtatattattaaatttgttgatattttttatattatcgtgtttttgaataaattagtttttttgttaagattgtttttattttagaaatttgataaattttttaagaattaatttatatgttttgtttggtatggttttataatttattttaattagattttttttgtgtttttattgtattttgagtatattttgatgatattatttattatattgtattttgaatgttttatatggattttttattattaaattatgagttttttgatggtaagaattgtgttttttttattttgttatttttaatttttagtatagtatttattatatagtaggtattaatattgttttattttgatatttttaatatttagtatggtatttattatatagtaggtattaatattgtttgttaaatgaataagatatgaagttatttacggtaatttagattatttagaattttaaaaagggaatttgtttaagggatgtttgttcgtattatttatgaaatattttttgggtgaagagttatatgatatattatggaaagttataaaggaaatagaattaaatgaaaattgtgaaattatttttttatttgtgttgttatggaagttgtgagtaatttagaaaaataaataatttagaaattaaaatatagttggtttgtaatattttattgatttgtttgttttattaagtttttttttttatttttgtttgtttggttttaaaaaataatatagttgggcgtggtggtttatgtttgtaattttaatattttgggaggttgagatgggtagattatttgaggttaggagttttagattagtttggttaatatggtgaaaatttatttttattaaaaatataaaaattagttggatatggtggcgggtatttgtaattttaattatttaggaggttgaggtaggaaaatcgtttgaattagagaggcggaggttgtagtgagttgagattgtgttattgtattttagtatgggtgataaaagcgaaattttattttaaaaaataaaataaaataaaataaaataaaataaaataaaataaaataaaataaaataaaataaaataaaataaaataaaataaaataatattagttgataatttttaaataataaagatttaaaatatgttgttaatttttgaatatttattaattgagtggaatatgttaaggagttaggtagggattggttttaaatattttttagttttggttaatttatagaataaataattgatatagagattaggtgattttttggtttatttagcgataattagatagttggaaggaatacgaattttggatttagattttggtttgaattttattttatttatttataagttatgtgatttaggataagtgatttttgttttttttatagagttttagtttttttatttgtaaaacggagatgatagtatatattttgtaagatagttgtatttaaataggatgtgtaggagagggaaggtttttttttatttttagatggtttggtaattgagtttgtgaaataaattgatagtagatagattaataggagaaaatatattattttagtttattttgtgttgttataaaggaatatttgaggttgggtaatttataaagaaaaaaacgttatttggtttatgattttgatgtttgggaaaagtttaggattgaatatttgatgaggattttaggttgttttcgtttatggtagaaggtgaaggagagttagtatgtgtagagattatatggggagagaggaagtaagagagatggggtgggggtaggttttttttaaaaattagttttggggggaattaatagagtaaaaatgtatttatttttagggagggtattaatttattcgtaaggaatttgtttttataattaatatattttttattaggtattatttttaatgttggggattaaattttaatatgagatttggtagggataataaattatatttaaattatagtaggtatatatattttttttatatgtatggggatattatatgaaaaaaaagtgaatgtttaatttagtgagatttagaagtttatagattttttttatagggaagaggggaggggggaagtaggtttttaggaggaataaatgattttggggaaagataaatgggattttagaagaataggtgatattttgtgataaagtttatttgggtatgatgttaatttttagtttttttttttgtaatacgggtttaattttttttggttgatgagatttttagggaggggatttataataattga

SEQ ID NO: 613 - DNA, 6531 bp, Artificial Sequence
  chemically treated genomic DNA (Homo sapiens)
attttatgttagttagaatggtgattattaaaaagttaggaaataatagatgttgaagaggatgtggagaaataggaacgtttttatattgttggtgggagtataaattagtttaatattgtggaagatagtgtggcgattttttaaggatttagaattagaaatattatttgatttagtaatttttttattgggtatatatttaaaggattataaattattttattataaagatatatgtatatatatgtttattgtggtattatttataatagtaaagatttggaattaatttaaatgtttattaatgatggattggaaaaggaaattgtggtatatatatattatggaatattatgtaggtataataaaggatgagtttatgttttttgtagggatatggatgaagttggaaattattatttttagtaaattaatataataatagaaaattaaatattgtatgtttttatttataagtgggtattgaataatgagaatatatggatatagggaggggaatattatatattggagtttgttgggggtggggggttaggggagagatagtattaggagaaatatttaatgtaggtgacggattgacgggtgtagtaaattattatggtacgtgtatatttatgtaataaatttgtatattttgtatatgtgttttagaatttaaagtaaaataataataataataataataataataataaaagatggaggtggtggatgggtgaagtattttttttgtagtgtagggaatttttataggtatgtagttttttaatttttataatgaaagaggtaaatattattattttattttatagatgaggatattgaggtttaaggaagttaaaagaatttgtttaaagttatatagtttagaattggtaatattaaggttgaatttaagtgtttgttttaaggtttagttatgttttattaattttgaatgttggtaaacgaggagagagagatattgggatttaggatgaagggaagaaagagtttttggtagagaaaatatataaatatttatgtaagttgaaagtaaagagtttttagaagttaagaattgaaagtataagggagaataagaataattgagttaagttttagaaagtttggaggaagtagtatgttgatttgggtaagagtttgttttggaaaggagtaaagttgtttttatttttgaaataggtgggaaggaggtaagggtgggtaaagttgttattaagttggagtttggagaggagggaaattgagatggttatattattttttttttgaaataagaggttagttatttttttgtgaatagataagtaagggaaagtttggatttttattagtgattgggttaggggagggaagaggggagaaaagggagttggaaagtgattggagtaattaggaaagagagtaaggtttaggtttgtaattttagtattttgagagtttaaggtgggaggattgtttgagcgtaggagtttaagattattttgggtaataaagtgagatttttgtttatataaaaaataaaaataataattattaggatatggtgattggtgtttgtagttttagttgtttgggaggttgaagtaggcggattttttgagggcgggagattaaggttgtagtgagttatgatttcgttattgtattttagtttggatgatagagtagagttagattttgttttagttgaaaaaaagaaaaaaaaaaaggaaagggaaaagagtagagttgtaatatttagtagataaaaaatatagtttatggttgggttcggtggtttatgtttgtaattttagtattttgggaggttaaggtaggtggatcgtttgaagttaggagttcgagattagtttggataatatggtgaaattttatttttattaaaaatataaaattagttgggtgtggtggtgtatgtttgtaattttagttatttaggaggttgaggtaggagaattgtttgaatttgggaggcggaggttgcggtgagttgagattacgttattggattttagtttgggtaatagagtgagattttgttttaaaaaaaaaaaaaaaaaaaaaagatagtttatatagttatatttgaatggtatatttatgataaatttttgtttagtgtatgttttaaagattgtgtggtattttatttgtaaatttttaaagagaaatattaaagtatgtgtaaagaataataaagttattttgaaattaaaaattggaaatggagtaaatttaaggtaggaatgttgggtttgatttttaggtagtagtagatagggagttgtattggtagttaggagatagtttgagaatgtaatttttagggtttttttggagagtaatgggaagagatttatatgggaattagagatttggaattggttaggacgttattgttggaaatatttgtttattatttaattttatttaagttgattatttataattatattttataggtgtgtattaaagatgaatattattaaataataatttgaaaggtttttggattttgtaaaatattttattaatattgaatgttaaaaattagtggtatttataagaaaataattgatatttttaaggaaatttttgaatttgtttgaggtttattatggtggtttggagtagtggttaagagtttgtagtttgttttatattaagtaagttgtttaatatgtttgggagttaatttttttgtttgtaaaattagaataattatagtgtttaatttgttagattaaatggattaatatgtgtaatattatgtgtaaatattaaaagtataatgttatatgagatattataggtagataatgagaagttttagaaaatatttattaatatgtatatgtatatattttgtatgtttacgtagaaaatgagtggttttaaaaggatatttattagtatatttttatatgtattttgtagatttgtatagttagaaatgtagtaaatgtaaaattttaaatttagaagtttgtttttttttaggaatatatattttaattttttaattatttattgattgatagcgtttgagttataaggtaaggtatttgtaatatttaggttttggaatttagttttgttatttattagttgggaaatttataagttattttagttgtttgaatgatattttttttaataataaaatggttagtaatgtttatttattttatagagtagtaaggttaaattaatttagtatatgtttgatatagattaggtgtgaaattttattttgatttttttggttttaaagaatgtataaattagtgtgggtggaggcgggagaagggggggaatgttaagtttttcgttttgttgtgttgggtagatataatatatttttttttttttaagtgaaataagtttttaaatttaattaggatttattttggagttttagaggatcgttattttggtttttatattatatgtattgtattgttgttgaagttgtgggtatgtattgggtgcgtcgttgtcgatgaatgttttaaaatagttgtgaattaattgttattttttttttttttttttttggtaaatttataaaattttagaagttaggggtttgttgtttgtttattttgtttttttttgagttatttaggtatagggtgtgtttgttaattgaaattgtatagcggaggaagtttttgagtttatatttgtcgggatgggaacgtagtgcgattagggattgggtggaaatttttataatagtaatgtaagggtagaagcgttttgttttgagtttgttacgtaggtagatttgattaagttcgttttttagttttacgtttttaagtagtatttaagtaaaagaaaagggtgggtaaagtgttagtaatgagatttgaggtttttgagtcgatttttaagtagaatgtgagagaagggtgtcggtttttgttgggtagttgtagttgtttcgtagtttttggtcgagaatttttttttttggaaatttttgagttgtttaggcgttttgaattttttaggatttagtagtagtttatttttttaacgatttttttattggttagaatttgggatatatagtttgattttgtgtttagttgagggaaatttttcgtttaatattaaaatcggcgttggtttatttttttgtgtattttgggaaagttattgttttttagatcgtagttgcgagtagtacgaggatttggggtggcggggggagtataggaatttttcggtttattttttttttcgggttgtttgtttttttcgtatttttcgtagtttttttttagttttttttttttagagcgtcgtcgatattcgtcgggtcgcggtttaggttttttgttgttcgcgcgaaagtggttcggggagtttttggttataagtttagtatatcgatttttttagggttgcggggggtgtgggattagggcggtgcgttacgagatttcgggtcgttttttgtttttttagatttttcgagagaaaagtttttaaagtttttttatttttttttttttttaggggttcgggagaattttttttatagttagggattagcgtttatttgggcgagggtagtgatttatatagtagaatttaggggttatcgggtttcgtttttttttttttttttttttttttttttatttgttgtttggggaggaggggtttttttttttttttttttttttttttttgtttttgttttagattttttttggatagtgcgttttagtagtttagattcgggggtttttagttgatagagggcgtggggggttaaggtattaattttttttagtttttttttgaagaaattatttagttttggcgcggcgttgggtgatttcgcgtagtaggtagggaattggtcgcggcgagcgggattggttattggagtgtttcgttgcggagggaggggatttcgattcgagtaagtttgcgagagtattacgtagttagtcgggggtagtagtaagatgcgaagcgagtcgtatagatttcgggtttttcgaacgtaatttcgttttgtttgagcgaggtagggggcggcgaatggcgggggtcgcgggcgcggggagttcggttgtggtagggtttaggtgttagaaacgaatttttaagtcgaacgaggtaaataaaaatttagaaaatatgtattttcgggcgttgaaaatttgtatttttgggttattaaggagtttatttcgattagattgtttttgggtatttgtgatttatggagtttagaaaaaaggttaatttttaattgtggaatttacgggtgtaggggtagtgaaaattgtagttggtcggaggaataggagggaaggcgttaaattttggaaattttatagataaagaatatggtgggtggtgtggagcgtgggtaatggtttaaattagtattgtttaggagtagggtataaaattagttgggggaaaatgcggagttttttggtttgagtagtttttgttgttcgcggagttgttgggattgtttttatttttattattttattttattgtattgttgtattattttgaaatatttaagtaatttagaagtagatttttgttgattagtgtcgttttagaaagtttttttgtaattttttagttttaggagaggagttaacgtgttgggggattgtagtaaataaaattgtttacgtaaatttagtaatgtattagggagtagtttaatgtgagtttttgaagagtagttttgtaatcgaaattagaaatgtggtagtatgtattatggttgttatgagtagtttgattttttttttttgtgtatgttttggttaaattaaataaagtaaaaaatatttatgtaattaattaatgtacgaaatttttgggatttgttgtaatttgttatgaatggttttaattgaatatttttaaatttatttgttttggtttggggtgaggtgtggtgagaggtgaggataggagtagaaatgaaatgtagtgttgtattataggtattttatttattttacgttttgttttttattatattatttttttttgtagataagttggtgattgttttagagaattttatggttggaaattcgggggtgagggggtgtggggtggtgagagggtaggagtggagttaaaatggggtgtagttttttaggttttttattttttttatttcgtgtttttttttttattatttttttttttttgttaatttatagttaatatcgtaatttttatttttttttgagtgaatgtggttatagagtttttttttttttttttttttttttttttttttttttgaaaaaagaaaaaaaaggaagaaaaaagataatttgatttttaaaaaaaatttttttttttgagttttttttaagtttttttaaaataaattaataataatataattggagtagtgttttagttagaatgaattatgttagtatgttgtggttttttttttgatttttttttttgatttgtttaagg

SEQ ID NO: 614 - DNA, 6531 bp, Artificial Sequence
  chemically treated genomic DNA (Homo sapiens)
ttttaaataagttagaggagagagttagggaaagagttatagtatattggtataatttattttagttaaggtattgttttaattgtgttgttgttgatttgttttaaagaaatttggggagagtttagggagagagattttttttaaaaattaaattatttttttttttttttttttttttttttttaaaaaaggaagagggggaagaaaaagagagggagaaattttatggttatatttatttaaagggaaatgggaattacgatgttggttgtgggttgataaaaaaaaaaagatgatgaaaaggaaaatacggagtgggaggaatgggaaatttagagaattatattttattttaattttatttttgtttttttattattttatatttttttattttcggatttttagttatgagattttttgaagtagttattagtttatttgtaaaaaaagatgatgtgatggaaagtaagacgtggagtggatggaatgtttataatatagtattatattttatttttatttttgtttttattttttattatattttattttaagttagggtaagtaaatttaaaggtatttagttaaaattatttataatagattgtagtaaattttagaagtttcgtatattagttgattgtataaatattttttgttttgtttagtttagttaaaatatatataaaagagagaaattaaattatttatgatagttataatatatgttattatatttttaatttcgattgtaaaattattttttagaaatttatattaaattgttttttggtgtattgttaaatttgcgtgggtagttttatttattgtagttttttaatacgttgattttttttttaggattagaaagttataaagaaattttttaagacggtattggttagtagaagtttatttttaagttgtttaaatattttaaggtaatgtagtaatgtaataaaatgaggtaatagagatgagaataattttagtaatttcgcgaatagtagaggttgtttaagttaagaagtttcgtatttttttttaattaattttatattttgtttttgggtagtattaatttaagttattatttacgttttatattatttattatattttttgtttataggatttttaaaatttaacgtttttttttttattttttcgattaattgtaatttttattgtttttatattcgtaggttttatagttgggaattaattttttttttgaattttataaattataagtgtttaagaataatttgatcgagatgggttttttagtagtttagagatgtaaatttttagcgttcggagatgtatgttttttaagtttttgtttgtttcgttcgatttaaaaattcgtttttgatatttaagttttattataatcgggtttttcgcgttcgcgattttcgttattcgtcgttttttatttcgtttaagtagggcgaagttgcgttcggagagttcgggatttgtacggttcgtttcgtattttgttgttgttttcgattgattgcgtagtgttttcgtaaatttattcgagtcggggtttttttttttcgtagcggagtattttaatggttagtttcgttcgtcgcggttagttttttgtttgttacgcgaagttatttagcgtcgcgttaaggttgggtggtttttttaggaagaggttgggaggggttaatgttttaattttttacgttttttgttagttgggggttttcggatttgaattgttgagacgtattgtttaggaaagatttggggtagaagtaaaaaaaaaaaaaaaaaaaaaaaaaagaattttttttttttaaataataaatgaaagaaaaaaagagagagagagaaggggcggagttcggtaatttttggattttattgtataaattattgttttcgtttagatagacgttgatttttggttgtggagaggattttttcgagtttttgaaaaaaaaaaaaggtggagagattttgaaaatttttttttcgaaaagtttgaggaggtagaggacggttcggagtttcgtagcgtatcgttttggttttatatttttcgtagttttaggaggatcggtgtgttgagtttgtggttaggagtttttcgagttattttcgcgcgagtagtagaaaatttgagtcgcggttcggcgagtgtcggcggcgttttggggaggagaggttgggaaggggttgcgagaggtacggaggagataagtagttcgggagggagaatgaatcgggaggtttttgtatttttttcgttattttagattttcgtgttattcgtaattgcggtttgaggggtagtggtttttttagagtgtatagagaaatgaattagcgtcggttttggtgttgggcgaggggttttttttagttgagtataaagttaggttgtgtgttttagattttggttaatggagaggtcgttgagggggtgggttgttgttgagttttgagagatttaaaacgtttgggtagtttaggaatttttaaagggggagattttcggttaggagttgcggagtaattgtagttgtttagtaggagtcggtattttttttttatattttgtttgggagtcgatttagaggttttaaattttattattagtattttgtttattttttttttttgtttagatgttatttaagaacgtgaggttgagaggcggatttggttagatttgtttgcgtgataagtttaggataggacgtttttgtttttgtattattgttgtaaaagtttttatttagtttttggtcgtattgcgtttttatttcggtagatgtgaatttaaaaatttttttcgttgtgtagttttaattggtagatatattttgtatttgaatgatttagaaggaggtagaatgaataaataatagatttttgatttttgggattttgtgagtttgttaaaaaaaaaaaaaaaagaagtgatagttaatttatagttgttttaaagtatttatcgatagcgacgtatttaatatatatttatagttttaataatagtatagtgtatataatgtggaaattaagataacggttttttaagattttagagtagattttaattggatttgaagatttattttatttaaaggggaagaggtatattgtgtttatttagtataataaaacgggggatttggtatttttttttttttttcgtttttatttatattaatttatgtattttttaaagttaaaggaattaaagtgaaattttatatttagtttgtattaagtatgtgttaggttaatttaattttattgttttgtgaagtaagtaagtattgttggttattttattgttgagagaagtgttatttagataattaaggtgatttgtagattttttagttagtgagtggtagagttgggttttaaaatttaaatattgtaaatgttttgttttgtggtttaaacgttattagttaataaatagttaaggaattgaaatatatgtttttagagggaaatagatttttagatttaaagttttatatttgttgtatttttgattgtataagtttataaaatgtatataaaagtatgttaatgaatgtttttttaaaattatttattttttacgtaagtatataaagtgtatatatatgtatattaatgaatgttttttgaaattttttattgtttgtttatgatattttatgtaatattgtatttttagtatttgtatatagtgttatatatattaatttatttaatttgataagttaggtattataattattttaattttataaataaggaaattgatttttagatatattaagtagtttgtttaatgtgggataggttgtagatttttaattattattttagattattatgataaattttaaataggtttaagaatttttttggggatattagttgtttttttgtgaatattattggtttttaatatttaatattgataaagtgttttatagagtttaaaaattttttagattgttatttaataatatttatttttagtatatatttatgagatgtaattgtagatgattaatttaggtaaaattagatagtaggtaaatgtttttagtaatggcgttttggttaattttaagtttttagtttttatataagtttttttttattgttttttaaggaggttttaaaaattgtatttttaagttattttttgattgttagtataattttttgtttgttgttgtttagaagttaagtttaatatttttattttaagtttgttttatttttaatttttgattttaaagtggttttgttgttttttatatatgttttagtgtttttttttaaaagtttatagataaaatattatataatttttggagtatatattaaataaaaatttgttataaatgtgttatttaaatgtaattgtgtgagttattttttttttttttttttttttttgagatagaattttattttattgtttaggttggagtttagtggcgtgattttagtttatcgtaattttcgttttttaggtttaagtaatttttttattttagttttttgaatagttgggattataggtatgtattattatatttagttagttttgtatttttagtagagatggggttttattatgttgtttaggttggtttcgaatttttgattttaggcgatttatttgttttggttttttaaggtgttgggattataagtatgagttatcgagtttagttatgagttatattttttatttgttaaatattgtaattttatttttttttttttttttttttttttttttttttttaattgagatagggtttggttttgttttgttatttaggttggagtgtagtggcgaaattatagtttattgtagttttgatttttcgtttttaaaggattcgtttattttagttttttaagtagttgggattataggtattagttattatgttttgataattattatttttattttttgtatagataggagttttattttgttgtttagggtgattttgaatttttgcgtttaagtagtttttttattttggatttttaaagtgttgggattataagtttgagttttatttttttttttaattgttttagttattttttaattttttttttttttttttttttttttttgatttagttattggtaaaaatttaggtttttttttatttgtttatttataggagaataattagttttttattttaaggaggaaatagtatgattattttaattttttttttttttaagttttagtttaatagtaattttatttatttttattttttttttatttgttttagaaataaaagtaattttatttttttttaaggtaaatttttgtttaggttagtatgttgttttttttaaattttttgagatttggtttaattatttttatttttttttgtatttttagtttttagtttttgaggattttttatttttaatttatataaatgtttatgtgttttttttattaaaaatttttttttttttttattttaggttttaatattttttttttttcgtttgttaatatttaaaattagtggaatatgattgagttttggaatagatatttaggtttagttttgatattgttagttttaagttatgtgattttaggtaagtttttttaatttttttgaattttagtgtttttatttgtaaaatgaaataatgatatttgttttttttattgtgaggattaaggagttatatatttgtgagaattttttatattatagagaaaatgttttatttatttattatttttattttttattattattattattattattattattattttattttaagttttggggtatatgtgtagaatgtgtaggtttgttatataggtatatacgtgttatggtggtttgttgtattcgttaattcgttatttatattaggtattttttttaatgttattttttttttagttttttatttttaataggttttagtgtgtgatgtttttttttttgtgtttatgtgtttttattgtttaatatttatttatgagtgagaatatgtagtgtttggttttttgttgttgtgttagtttgttgagaatgatgatttttagttttatttatgtttttgtaaaggatatgaatttattttttattatgtttgtatagtattttatggtgtatatgtgttatagtttttttttttagtttattattggtggatatttgggttggttttaagtttttgttattgtgaatagtgttataataaatatatgtgtgtatgtgtttttatagtagaatgatttataattttttgggtatatatttagtaagggaattgttgggttaaatggtatttttagttttagatttttgaggaatcgttatattgttttttataatgttgaattaatttatatttttattaatagtgtaaaagcgtttttatttttttatattttttttagtatttgttgttttttgattttttaatgattattattttaattggtatgagat

SEQ ID NO: 615 - DNA, 6167 bp, Artificial Sequence
  chemically treated genomic DNA (Homo sapiens)
tattatgatttgaaattattttttttatttgtataattgtttatttttgtttattttattaaatggtattttttatgagagtaaagttttattgtagaatttttaagatttagtattgtatttaatatatatagtgggtaataaatttttttaaaagaatgaatgttttatttaattttattttttgttattttttaagaggaaatttttttattttagtttatttcgtttttttttagttttattttttttagatagattatatatgggcgtttttggttaatttatttttaagtttggtttgaaatagttttttatttttttattataaagtttgggtttttttacgtttttttttttttaaaatttttttattgtttttgatcgttttttagttttttggaatttttttttttttttattttttatgttttttagtgttattgagttttgttggttaatagggttgttttttttttattttttatttttttgtaatatagaatttaggtttttttttatttagttgtaagatttttagaggtaaaggtttatgttatggattttatttttaaattttgattgtagttagtttttagggaagtttttattgttgttgataatgggtgtttaattggttaggttgtgagtgagagaaattaattgaggatgttttattttatttaataaaaaaggaatttattggtttgtataattaaaaagtttaggttgagtttagggattttttgtacgtttgttttttttttttgtatgttttttttttttgattttttttgtattggttttatttttaggtaggttttttaggtttgtgggcgaaacggtttttaggtttatattttattggtttagtattattagggaaagggaattttttttttttaagagttttggaaaaagtgatttttattggtttggtttgggttatgtgtttattttgatttaattattatagttagggaaatgaattatttttaggttaggttatttttgggtggatggttaggtttagggaatatatttatttatagatgtagagtaggggttatttgtttttaattatatggattagggtggttttttaaaggaaattgttggttggggaatagtaataaaaagaaaggggaattgatgttggttatgtaaaataaaagatgtagacgtagattatgagaattttttatgttgagttttagtaagaatttgataaatacgttaggtgagttgtataggataattatcggggaattggtttgttttggttggggtagaggatgtttttttttagtttgggcggttttttagtgatagtataagaattttaggtcgatattttggtttagtgttgttattcgtaagttcgggaagattgtgatgtagttggtttagggtaaaagttgttttttttagatttttataggcgattttgttgtatagttaaggttgaaaaatgttgttttagtaaacgttttattgtagtaagatgggtttagattaatttttagggattacgttttttgtgataggattggtatgtttttttttatttgtatagttttttagaaaagggttattggagtttttttggaggttgaggatgggtgggtgaattgtggatgattttatggatttaaagtttttgaaaagaataatagttattgtttgttgaatgttaattgtaaggtaggtattgtgtgttgggatttgatatatggtagttcgtataagttttagtttttataataatatttttatgtgggtattattattattatttatttatttgagatagagtttcgttttgtcgtttaggtttgagtgtagtgttgtgatttcggtttattgtaagttttatttttcgggtttacgttatttttttgttttagttttcggagtagttgggattataggtggttattattacgttcggttaatttttttgtatttttagtagagatggggttttatcgtgttagttaggatggtttcgattttttgattttatgattcgtttgtttcggttttttaaagtgttgggattataggtatgagttattgtgttcggttttatgtgggtattattaatattagttttattttatagttgaagaaagtgagatataaaaagtatggttggttgggtacggtggtttacgtttgtaatattagtattttgggaggttaaggtaggtggattatttgagattaggagtttaagattaggttagttaatatggtgaaatttggtttttattaaaaatataaaaattagttaggtgtggtggggtgtatttgtggttttagttattagggaggttgaggtaggaaaatagtttgaatttaggaggcggaggtcgtagtgagttaaaattgttttattgtattttagtttgggtgatatagggagattttgttttaaaaaaagtaaaaataaataagtaaataaaaagtttggttggttgggtgttgtggtttatatttggaattttagtattttgggaggtcgaagtgggtgaatcgtttgagtttaagagtttaagattagtttgggtaatatagcgaaatttttttttacgaaaatataaaaaaaaaaaaaaaaaaaaaaaaagtaaaagttaggcgtggtggtaggtatttgtagtttaagttattcgagaggaggaggttggaggattatttgagtttgggaggcggaggttgtagtgagttcgcgttattgtattttaatttgggtgttagcgtgagatttcgttttagaaagaataaaaatattaaaaaaaaaatttggttaaggtattttattagggagtggtaaaatggatatttagatataaggttatttgcgttgtaatagtttggtttttttgtttttgcggtaggagttttttgagaggcgtattatttttgttttaatggataattcggtagatagtgggagtgagttttttatttttttagcggatttgagacggtaggtttcgagacgagggagttttggtttattaagttggtttttataagaaaatatgtttggaggggggatagttatagagggattaagtttaagaaagttatatttttatttatttaatttttttgatttcgatttttagaggttgttggggtttatagaggtttttatttttttttttttttttcggtgtcgttaagtattttttttttttatattttttttttgttttttttttaaatttagaaaaaatagtattttttttggatttagagttagagtaggaggagtttttttttttcggaatttttgttttttttggggtgagtaattgattgcgtcgtgggggcggggagggtttttttgttcgcgttcggttttagggagatttgcgggaatcgttttttttcgttattatttattttttgtttttttttttttttcgttttggttaggttcggggtgaggagtgttatttcggagtttgggcgtttcggtagtgacggttttttagggattgtagggggagttcgggttgtagcgtttgtttagttcgtgtttattgcgtcgaaggttttttcggtttggtttcgcgtttagcgtcgtattcgggaggaggagcgaggaggcggcggaagagttcgcgcggtcggagttcggggttgggagtggagagggaatttttagggggtagtatcgagtcgttaagtcggtttttttttcgcgtttagttcggggtttttagatagtttatagggaagtttttttttcggattttcgtagtgtgggtcggttttttatttggattggataaaggggggaaagtgattttttattataaggattattattttttggtgagaataagaattaggttttttttggggtaattagtttttttatttcggttttttaaaggtgggttttttgtcggcggggattagggaatagtttttcggtttcgggggagtataggggattttaggtattagtagttttattttatcgataggtggtagaggtaaggtagtttattgttatatagtgttttaagaattaagtggtcgtgattttttatttttaattttttagcgatattcggaaagatatcgtgttatagatcgaggttcggggttaaggttaaggtttcgttttttttgggcggtttttgtttaggcgggtttagtcgtttttttttcgtattttcggttcgtttttacggtttttgaggtgggcgggcgggttttggatgatagcgatagaatttcggttcgattcgttttcgttttcgttttgggtttgggtttttttagtttagtttacgtttaggagtcgtttgagtagtcgcgcgtttagcgttatacgttacgagtttttttcgtttgggcgttttcggatttcgcgagcgttcgggttttcggtttggaattagggaggagggagggagcgagggagtaattagttgcgattcggaaatgttatataaggagtaggaaggatttttcgtcggaataatttttatttgggtagtattttatttggagtggttcgatatggttcggtcgttttcggttttgggaggagggaagaaggcggagggaggggtaacgcgggaatttcggagttgcgcgggtttcggaggtttcggcggcggttagagttttaggttttttcgaagtttgggcgtttgggatgcgggcgcgggcgcgggttttagggtgtaggatggaggtgtcgggcgttgtcggatggggggttttacgttatttcgggttttttcggtcggttttgttatattagggttttttgttttttatatatggttatgtacgttacgacggaggcggattcgtgtcgttttagattttttaaatagaggcggattcggggagtcgcgagagattttagcgcgtagaatttggggagtcgtcgtcgttattcgtcgtcgtagttagttttcgtcgtcgtaggatcggtttttgttttagttttcgtagtcgcggcgcgtttacgttcgttcgcgtttagggcgagtcggggtcgtcgtttgtacgttttttagtgtttttcgcgtttcgtatgtaattcggttaggttttcgtaattgtgttttttgtagttttagtttcgggttgtattttttcgtttcgatattagttttttagtttgttcgtttaggatggtcgcggttaaggtcgagatgtagttgatgttttcgttgtagatttttgattcgttcggattttttttttattcgtttattatggataattattttaagttggaggagatgatgttgttgagtaacggggttttttagtttttcggcgtcgtcggggttttagagggtagcggtagtaatagtagtagtagtagtagcgggggcggtggaggcggcgggggcggtagtaatagtagtagtagtagtagtatttttaatttttaggcggatacgggcgagtagttttacgagtatttgatcgtaggtaagtagtggtttacgtcgagggggaattttttcgttattattttggcgttttgttttttatcgtaggagtgtttttggattttagaatgagagtcgggttttttttttatttttcgtatttttagagttatgtgttagagggatgttaaggaattttatatagtttattttttgtttttatttttagcggagcgtagaggatcgagtttttgttttggatggagagttttggagttgcgtgggtgggtggagggggagggtttgttttgatgagcggggttgcgttttttatttttagtaagatttgttttgttttgtttgtcgtttgtttttaaggaaggatcgtgatttttggtcgtggatgtttcggtagttcgggtttgggggcgcgtattagtcgcggttatgggggtgttggcgggaatttttcgttcgtatagtcgtcgttgcggagcgttgcgagttgtagtggagggggatttttcgtatttgcgttagttgttgttgaaatgggttttgttattggtgcgggtttaggaatattgtaatgtgttgttattaattattaattatttcgggagttaatggtagtcggttcggttttttgtttggtagttcgggtcgttttcgttttttagtgattgttttttagtaattaggtttttcgttttttttttttttgttaga

SEQ ID NO: 616 - DNA, 6167 bp, Artificial Sequence
  chemically treated genomic DNA (Homo sapiens)
tttggtaggagagagagaagcgggaggtttggttattggaaagtaattattggaggacgaggacgattcgagttgttaggtaagagatcgggtcggttattattgattttcgaggtagttaataattgatagtagtatattgtaatgtttttggattcgtattagtggtagagtttattttaataatagttgacgtaaatacggagaatttttttttattgtagttcgtagcgtttcgtagcggcggttgtgcgggcgagggattttcgttagtatttttatggtcgcggttagtgcgcgtttttaaattcgggttgtcgggatatttacggttaaggattacggtttttttttggggataggcggtaagtaaggtaaggtaagttttattggaggtggggggcgtagtttcgtttattaaaataagttttttttttttatttatttacgtagttttagagttttttatttaaaataaaagttcggttttttgcgtttcgttagggatgagggtagggggtgggttgtgtggggttttttggtatttttttaatatatgattttggggatgcgaggaatgaaagggaaattcggtttttattttaagatttaggagtatttttgcggtgaaggataggacgttaggatggtggcgaaagggttttttttcggcgtaggttattgtttatttgcggttaggtgttcgtagggttgttcgttcgtgttcgtttgagggttgaaggtgttgttgttgttgttgttgttgttgtcgttttcgtcgtttttatcgttttcgttgttgttgttgttgttgttgttgtcgttgttttttggggtttcggcggcgtcgaggaattggggagtttcgttgtttagtagtattattttttttagtttagggtagttgtttatggtgggcgagtgaggaaaggattcgaacgggttagagatttgtagcggggatattagttgtatttcggttttggtcgcggttattttggacgagtaggttggagagttggtgtcggggcggggggatgtagttcggggttggagttgtaggggatatagttgcgggggtttggtcgggttatatgcggggcgcggggaatattgagaagcgtgtaggcggcgatttcgattcgttttgggcgcgggcgggcgtggacgcgtcgcggttgcggaggttggggtaggggtcggttttgcggcggcggaagttggttgcggcggcggatggcggcggcggttttttaagttttgcgcgttgggatttttcgcgatttttcggattcgtttttatttgaagggtttggaacggtacgggttcgttttcgtcgtgacgtatatggttatatatgggaagtaggaagttttaatatggtaggatcggtcgggaggattcggagtgacgtgaagttttttattcgatagcgttcggtatttttattttgtattttagggttcgcgttcgcgttcgtattttaggcgtttaggtttcggggaagtttagagttttagtcgtcgtcggggttttcgggattcgcgtagtttcggagttttcgcgttgttttttttttcgtttttttttttttttttagagtcggaagcggtcgggttatatcgggttattttaaataaggtgttgtttaaataagggttgtttcggcgggggattttttttgttttttatatggtattttcgggtcgtagttggttgttttttcgtttttttttttttttttggttttaagtcgggagttcgagcgttcgcgggattcggggacgtttaggcggggagggttcgtggcgtgtggcgttgggcgcgcggttgtttaggcggtttttaggcgtgaattaggttggggaagtttagatttagagcgggggcgagggcgagtcgggtcggggttttatcgttgttatttagggttcgttcgtttattttagggatcgtgagagcgaatcgggagtgcgggggaggagcggttgggttcgtttgggtaggggtcgtttaggagaggcggggttttgattttgatttcgggtttcgatttatggtacggtgttttttcgggtgtcgttgggaaattgaggataggaagttacggttatttggtttttgggatattgtatagtagtgagttgttttgtttttgttatttgtcggtgggatggggttgttggtgtttggggttttttgtgttttttcggaatcgaaaggttgttttttagttttcgtcggtaaagagtttatttttgggggatcgaagtggggaagttgattgttttaagagaggtttgatttttgtttttattaggagataatggtttttgtggtgaggggttatttttttttttttatttagtttaggtggagggtcggtttatattgcgggaattcgaaagaggggtttttttatgggttatttggggatttcgggttgggcgcgaagagaggatcggtttggcggttcggtgttgttttttggaggttttttttttatttttagtttcggatttcggtcgcgcgggttttttcgtcgttttttcgttttttttttcggatgcggcgttgggcgcggagttaggtcgggggagttttcgacgtagtgagtacgaattgagtaggcgttgtagttcgggttttttttgtagtttttggggagtcgttattgtcgaggcgtttagatttcgggataatattttttatttcgagtttggttaaggcgagggggagaaggaagtagggggtgggtggtggcgagggagaacgattttcgtaggtttttttggggtcgaacgcgaatagggaagtttttttcgtttttacgacgtagttagttgtttattttaaagggaatagggatttcgggaagggaaggttttttttgttttagttttgaatttagaggaggtgttgttttttttggatttaaaaagaaagtagaaagagaatgtggggaaggagggtgtttgacgatatcgagagggaagggaggaggtgagggtttttgtgaattttaatagtttttggaggtcggggttagggggattaggtgggtgagggtgtaatttttttggatttaatttttttgtggttgttttttttttaaatatgtttttttataaaaattaatttaatgaattaggattttttcgtttcggagtttgtcgttttaagttcgttggggaggtggggggtttatttttattgtttatcgagttgtttattggggtaggagtgatgcgttttttagaggatttttgtcgtaagggtaggaaggttaggttgttgtagcgtagatggttttgtgtttgaatgtttattttgttattttttggtagggtattttagttaaattttttttttaatgtttttattttttttgagacggggttttacgttggtatttaggttggagtgtagtggcgcgagtttattgtaattttcgttttttaggtttaagtgattttttagtttttttttttcgagtagtttggattataggtgtttgttattacgtttggtttttattttttttttttttttttttttttttgtattttcgtagagaggggtttcgttgtgttgtttaggttggttttgaatttttgagtttaagcgatttatttatttcggttttttaaagtgttgggattttaggtgtgagttatagtatttagttagttaagttttttgtttatttgtttgtttttgttttttttaagatagagtttttttgtgttatttaggttggagtgtaatggggtaattttggtttattgcgattttcgttttttgggtttaagttatttttttgttttagtttttttagtagttgggattataggtgtattttattatatttggttaatttttgtatttttagtagagattaggttttattatgttggttagtttgattttgaatttttgattttaggtgatttatttgttttggttttttaaagtgttggtattataggcgtgagttatcgtgtttagttagttatgttttttgtgttttattttttttaattgtaaaatggggttaatgttaataatatttatatggggtcgggtatagtggtttatgtttgtaattttagtattttgggaggtcgaggtaggcggattatgagattaggagatcgagattattttggttaatacggtgaaattttatttttattaaaaatataaaaaaattagtcgggcgtggtggtggttatttgtagttttagttatttcggaggttgaggtaggagagtggcgtgaattcgggaggtggagtttgtagtgagtcgagattataatattgtatttaagtttgggcgatagagcgagattttgttttaaataaataaataatagtaataatatttatatgggagtattgttgtgaggattgaaatttatgcgggttgttatatgttaagttttaatatatagtatttgttttgtaattggtatttaataaatagtggttattgttttttttagaggttttggatttatagagttatttatagtttatttatttatttttagtttttaagaaaattttagtgatttttttttggaaagttgtgtagatggggaaaaatatattaattttattataggggacgtaatttttaagagttgatttgaatttattttgttgtagtagagcgtttattagagtagtattttttaattttgattgtgtagtagaatcgtttgtggaagtttgaaaaagatagtttttattttggattagttgtattataattttttcgagtttgcgagtggtagtattgagttaaggtatcggtttgggatttttgtgttgttattggagagtcgtttagattgggagagaatattttttgttttagttagggtaaattagtttttcgatgattattttgtgtaatttatttaacgtatttgttaggtttttgttgaagtttagtatgggaaatttttatagtttacgtttatattttttgttttgtatgattaatattaatttttttttttttttattattattttttagttagtagttttttttggggagttattttaatttatgtggttgggggtagatagtttttattttatatttataagtaggtatgttttttgggtttggttatttatttaggggtggtttagtttaggagtggtttatttttttagttgtagtgattgagttaggatgggtatatgatttaaattaggttaatgagaattattttttttagaatttttgggaaagggaaattttttttttttgatggtattaagttaataggatgtaagtttggaggtcgtttcgtttataggtttggagagtttgtttgagaatgaagttaatgtaggggaagttagagagaagagatatatagaagagagagataaacgtatagaaggtttttggatttagtttgagttttttagttatgtaggttaatgaattttttttttattgaataaaataaaatatttttagttagttttttttatttataatttaattagttgaatatttattattaataataataaaaatttttttgaggattaattgtagttaaggtttgggaataagatttatggtataggtttttgtttttaaggattttatagttgggtagaagagagtttggattttatgttataagagaataaagaatagaaaggaagtagttttgttagttagtaaaatttagtgatattaagggatataggagataagagaagggagagattttaggaggttgggagacggttagggataatgaagagattttggaggagaaggaacgtgagaaggtttaaattttgtggtggggaagtgagaagttgttttaggttaggtttgggggtgggttggttaggagcgtttatgtgtggtttgtttggggaaaatgaggttggaaggggacgaaatgggttagagtagagagatttttttttgggaagtagtagaaggtaaagttaaataaaatatttatttttttgaaaaggtttattgtttattgtgtgtattgggtgtagtgttgagttttagagattttgtagtgaggttttgtttttatggaaaatattatttagtgggatagatagaaataaatagttatgtaaataaaaaggataattttagattatggtg

SEQ ID NO: 617 - DNA, 5415 bp, Artificial Sequence
  chemically treated genomic DNA (Homo sapiens)
  unsure 1327, 4092: n is a or g or c or t
ttttgtttaagagttagtatagtatggataagcggagattgaggtaggaagtataggggataaaagagaaataaaaaggtaaaaataaaggaatttagaagtttttggatgagtggtaaattgtagtgtagttgtaagaaaaaaggtaataggtttgagagggtttttatttaaagtttttttttttaaaatttttgaggtttttttataatgattttattttttaaatatttatgatgatgattatgttgatatttttcgagtgtttgttatgtgcgagatattgtgttaagttttttaattgtttaattattataagtacgtatttagatattgcgatttttttagtttttatagataagaaaattgagatttagagaggttgagtaagttgtataaggatatattagttaataagtagtagaattggcgtagtggtttatatttgtaattttagtattttgggaggttgtagtaggtggattatttgaggttagtagttcgagattagtttggttaatatggtgaaattttatttttattaaaaatataaaaaattagttaggcgtggtggtaggtatttgtaattttagttatatgggaggttgaggtaggagaattgtttgaatatgggaggtggacgttgtagtgagtcgagattatgatattgtattttagtatgggtgataaaagcgaaattttattttaaaaaaataataataagtagtagaattgggtttggaatttaggatggtttgatttaaaagtttgtggttttaattatattaatatatagggaaattgaggtatgtagcgaggaggttacgtgtttgagttagtatagtagagttaggtttagagtttagattttttggttttgtttttaggatttttttagaaggttatgttgtttttttttatgttagtttattgtttttaggtttaagaagtatgggttttttaatgggttttatgatgtttaattgaattaaatgaaaaagaataaagtagatatttgttataaatttaaaaattagaagagaagaagtttttgaggaattaattaataaaagtataaagaattagaagtgataagaatataaaagattagtatttaaaatgtttttataggtttgaagataaaataggtagtcgtttaattaagtttaggaggggaatatttagataagagagagaaaatattggagattatttaggaattcgtgtaattggagatcgttgtgtcggttaataagtaatttatttagaggttatttacggagaagtaagagaaaggttagagtggcggttataggtagggtttttnaagatttttgaggtatattggtttacgtttgtaattttagtattttgggaggttgaggcgggtagattatttgaggttaggagttcgagattagtttggttaatatggtgaaatgtcgtttcgattgaaaatataaaaattagttgggtttggtggtaggcgtttgtaattttagttatttgggaggttgaggtaggcgaattatttgaattcgggaggtagaggttgaagtgagttaagattgtgtcgttgtattttagtttgggggataagagcgagattttttttaaaaaataaataaatgaataaaataaaattaaaaaataaataaaaatttttaaaaagtataaagaagaaaatgaaaatttaaaattttaatatttaggaataattattgttgattttggtataattatttagattttttttttgttgttatagatatgtatgattggggttattatgtttttttggttataaataatagaaattatttttaataagattaattaaaaaggaaaatgtatttagatgatggagggggtttgaagaacgtggggcgtttggttttttgaggttggaattaggagttaggaagttgtttttgaataggattgaggataatggatttgttgatcgttttttatgttttttttattttgtttcgttttggggattttttttttagtttacgtggttttggggattgttaattatagagtttttattttttttaatttgtagatttttatagatatcggggtgttttttggtttatttattaatttagggttgaagcgtgtttcgagcgttcgagttttttttgggataggtttatggatagtatggaaggagtttttatttttttagttggtgatagagtttggtttttttgaaggtttttataattataatggggtaataattaaatttaagtagggtaaggaagtggagagaggaataaggtaatattatatttatttagtagttggtaagtttaagttatttttttttgtttaagttgattggatttgggtttttattatttgtttttgaataaggtttgaataatattatttattttggtttatttgttatagttttttttttttatttgtttgtttgtttgagatgaatttttattttgtcgtttaggttggagtgtagtggcgtaattttagttgattataatttttgtttttcggtttaagcgatttttttgttttagttttttgagtagttgggattataggcgtgtattattacgtttggttaatttttgtatttttagtagcgatggtgttttaatatgttggtaaggttgttttcgaatttttgattttaagtgatttatttgttttagttttttaaagtgttgggattataggtgtgagttatagtatttagttttatttatttttttataattttatgaggtaggtgttgtaattatttaattttatagttgaggaaatagaggtattgagaagtgaagtaattattattattattatgtattgagtttttttttttttttttttttttttttttttgagatgaagttttattttgttatttaggttggagtgtagtggtgtgattttggtttattgtagtttttgtttttcgggtttaagcgatttttttgttttagttttttaagtagttgggattataggtgtatattattatgttcggttaatttttgtatttttttttagtagagatggggttttattatgttggttaggttggttttgaatttttgattttaggtgatttgtttatttcggttttttaaagtgttgggattataggtatgagttattgtgtttagtcgagttttttgtattgataaggtattatatgaatatttgttttagtttttcgatagttgggattataggcgtgtgttattatatttagttaatttttgtgtttttagtagagatggtgttttattatgttgattaggttggtttcgaatttttggttttaagtgatttatttgttttagttttttaaagtgttgagattataggcgtgagttattacgtttggttttgttttaattaaaaatataaaaattaggtttggtgatgtatttttgtaattttagttattcgggaggttgaggtaggaggatcgtttgaattcgggatgtggagattgtagtgaattaagattgtgttattgtattttagtttgggtaatagagtgagattttattttaaaaaaaaaaaaaaattaaggggaaaaaagaatttatttattttggagatagtttgttttaaggaattaatttttttttattttgagtttagtttataatgttattttgtttttttgtttttttgtaaagggttggagataggaattagatttaagttaaatggaatagggttggtagattttttttttttattattagttaaagatttggttttgttttaggtttagagtatgtgtgtatatgttgatagcgggtggggtatatatacgagagtaatttgtacggtggaaggatagatataagtttttttggttattggtgtgtggtaggaaagagtgtttgtttacgaggggtgtgtgtgtgtgtgtgtgtgtgtgtgtgtgtgtgtgtgtttgtgtgtgtgtgtgtgttaggtatttttgtaaacgtagtttagattgttttttaatttttgatagatatttaattttttgggggaggagggtagggtagggttaagggtaaggggtcggttgtgggtggtgagaggttntggggtgggaggtgttaggtaggtattagtatatggttgggttttgacgttattattattttttttcgtttttttttttttaagttggcgtttattatttagtttaaggggtgtagtagttttttattggcgtggtttttattttagttttgatgaattagttattttagattgtttttaagagggagcgtaagacggtgagtagtagtgaggggtttcgggatatttgggaaggggagaattaaggttaggtgttgttgggatattgtgtcggaaagagtagtgatttgaggaggaaggagttgagagtgggtagagaatggtgtttgtggagggtttaggttttttgtaagatgttaagattttagtatagaagtaggttatgggaagattgaagtgtttagcgaggaagtttttgcgagatttgggtgttggggggttggaagaattatgtttggttttgggtttttagtggtttgttttggaaatggtttgttttttgtggttttagtttttatttttttttgtttttttagttttggaagtttttaaggttttcgtttttgtttagtttttaagttttgggcgtggtgtttagaatagggtgttagagttggggaagtcgttgagttattttggttttatttattggatttgggttttgtttttagagattaggtatattagttataagtgagtcgattgggttttagatgggggttttgggttttagggtgtgtagttattgatttggggattgttggtggggtagggatgagggagggaggggtattgtgatgtatagggttgttttgtgagattaagggttttttaagggtgggagttggggtagggattacgagagtagttagatgggttgaaagtggaatttaaggggtttttggtatttatttatttgtttttcgttggggggtggggagttggtttagagttttaagattggggtagggtggagaggtgggttttttttgttttttatttattttatagttttttttttttagattcgaattcgagatttaaattaaggaggaaaggatattatagaggagattatgtttggggttcgtattgtttttatatttatttttttttaggtattgtttgtttttcgagtgatattttggttgggatgtttgttttgttttggatttttaagtttttggatttttttttttaattaagggatttatttttttgtttttttggatttttaggtagagttaaagtagaaatggttttagtaaagaagggttgtgggattttttagtgtaaatttggtaattttttgtgttttgtaga

SEQ ID NO: 618 - DNA, 5415 bp, Artificial Sequence
  chemically treated genomic DNA (Homo sapiens)
  unsure 1324, 4089: n is a or g or c or t
tttgtaggatataaagggttattaagtttgtattgaagagttttataatttttttttattagagttatttttattttagttttgtttagaaatttaggaaagtagggaaataaattttttagttgaaagaaaagatttagggatttgggagtttagggtagaatagatattttagttagggtattattcgaaaagtagatagtatttggggaggggtgggtgtggaggtagtgcgggttttagatatgattttttttgtgatatttttttttttttggtttggatttcgaattcggatttggggaaagaaagttataagatgagtgggaagtaggaagagtttatttttttattttgttttaattttaagattttgggttaattttttattttttagcgggaagtaggtaggtaggtgttagaaattttttgagttttatttttagtttatttggttgttttcgtagtttttgttttagtttttatttttaagagatttttgattttatagagtagttttgtatattataatgttttttttttttttatttttattttattagtagtttttaagttagtggttgtatattttggggtttaggatttttatttagaatttaatcggtttatttgtggttagtgtgtttgatttttgggggtagggtttagatttagtaggtggagttagggtgatttagcggtttttttagttttggtattttattttgggtattacgtttagggtttgaggattgagtagaggcggaggttttgagagtttttaggattgggggggtaggggggaatgggggttggggttatagaaaataaattatttttaaggtaagttattagaaatttaaaattaagtatagtttttttaattttttagtatttaggtttcgtaggaattttttcgttaggtattttagtttttttatgatttgtttttatgttgaaattttagtattttataaagaatttgagttttttatagatattattttttgtttatttttagtttttttttttttaagttattgtttttttcggtataatgttttagtagtatttgattttgatttttttttttttagatgtttcggagttttttattgttatttatcgttttacgtttttttttgggagtaatttggggtggttggtttattaaaattggggtgggggttacgttagtgggaaattgttgtattttttgggttggatagtaggcgttagtttgggggaggggggacggagaagaatggtggtagcgttagggtttaattatatattaatgtttgtttgatattttttattttanaattttttattatttatagtcggttttttgtttttggttttgttttgttttttttttttagggaattaggtgtttgttaaaaattggggggtagtttgaattgcgtttataagaatatttaatatatatatatatataaatatatatatatatatatatatatatatatatatatatatttttcgtaggtaggtatttttttttattatatattagtgattaggaggatttatgtttgtttttttatcgtataagttattttcgtgtgtgtattttattcgttattaatatgtatatatatattttgaatttgaaatagaattaggtttttggttggtaatgagagaaagagatttgttaattttgttttatttaatttgagtttagtttttgtttttagttttttataaaggggtaaagaaataaagtaatattatgaattaggtttaagatgaagaaaaattaattttttaaagtaaattatttttaaagtgggtgagtttttttttttttttaatttttttttttttttgagatggagttttattttattgtttaggttggaatatagtggtataattttggtttattgtaatttttatatttcgggtttaagcgatttttttgttttagtttttcgaatagttgggattataagagtgtattattaggtttaatttttgtatttttagttgagatagggttaggcgtggtggtttacgtttataattttagtattttgggaggttgaggtaggtggattatttgaggttaggagttcgagattagtttggttaatatgatgaaatattatttttattaaaaatataaaaattagttgggtgtggtggtatacgtttgtaattttagttatcgggaggttgaaataggtatttatgtagtattttattaatataaagagttcggttgggtatagtggtttatgtttgtaattttagtattttgggaggtcgaggtgggtagattatttgaggttaggagtttaagattagtttggttaatatggtgaaattttatttttattaaaaaaaaatataaaaattagtcgggtatggtggtgtgtatttgtagttttagttatttgggaagttgaggtaggagaatcgtttgaattcgggaggtagaggttgtagtgagttaagattatattattgtattttagtttgggtgatagggtgagattttattttaaaaaaaaaaagaaaaagaaaagagaaagagtttaatatatggtaatgatggtaattattttattttttagtgtttttgtttttttaattgtaaaattaggtgattatagtatttattttataggattgtagaagaataaatgaggttgggtgttgtggtttatatttgtaattttagtattttgggaggttgaggtaggtggattatttgaggttaggagttcgagaatagttttgttaatatgttgaaatattatcgttattaaaaatataaaaattagttaggcgtgatggtgtacgtttgtaattttagttatttaagaggttgagataagagaatcgtttgaatcgggaagtagaggttgtggttaattgagattgcgttattgtattttagtttgggcgatagagtgagagtttattttaaataaataaataaataaaaagaagggattgtagtagatgagttaagataaatggtattgtttaggttttatttagaaataagtggtagaaatttagatttaattagtttgagtaaaaaagaatgatttgagtttattagttgttaagtaggtgtggtattgttttgtttttttttttatttttttattttatttggatttagttattgttttattgtaattataaaagtttttagaagggttagattttattattagttagggaaatgagaattttttttatgttgtttatgggtttattttaaggaagattcggacgttcggagtacgttttagttttgagttaataagtgggttaaagaatatttcgatgtttgtgagaatttgtaggttggggggggtggaaattttgtgattgatagtttttagggttacgtggattgggagaggaatttttaaagcgggatagagtggggaaaatatgaggagcggttaataaatttattgtttttagttttgtttagagatagttttttgatttttggttttagttttagaaggttaagcgttttacgttttttaaattttttttattatttgagtatatttttttttttggttaattttattagggatgatttttgttatttgtgattaaaagagtatgataattttaattatgtatatttataatagtagaggaagagtttaggtagttatattaaaattaatagtagttatttttgggtattaagattttagatttttatttttttttttgtattttttaaaaatttttatttattttttaattttattttatttatttatttattttttgagagaagtttcgtttttgttttttaggttggagtgtaacggtataattttagtttattttaatttttgtttttcgggtttaagtgattcgtttgttttagttttttaagtagttgggattataggcgtttgttattaggtttagttaatttttgtatttttagtcgagacggtattttattatgttggttaggttggtttcgaatttttgattttaggtgatttgttcgttttagttttttaaagtgttgggattataggcgtgagttagtatattttaaagattttnaagagttttatttgtggtcgttattttggttttttttttgttttttcgtgggtggtttttgaatgaattatttattagtcggtatagcgatttttagttgtacgggtttttaagtagtttttagtgtttttttttttttatttgaatgttttttttttgaatttaattgggcgattatttattttgtttttaggtttgtaaggatattttgggtgttaattttttatgtttttattatttttagttttttgtatttttgttagttggttttttaaagatttttttttttttgatttttaagtttgtaataaatatttattttgtttttttttatttaatttaattagatattatggaatttattggagggtttatattttttgggtttgggaatagtgaattgatatggagagggataatatggttttttgaaagaattttgggagtagggttaggaaatttgggttttgggtttgattttgttgtgttgatttaggtacgtgattttttcgttgtatgttttagtttttttgtgtattaatatggttaaggttataggtttttgagttagattattttagattttaggtttagttttgttatttattattatttttttgagatggagtttcgtttttgttatttatgttggagtgtagtgttatgatttcggtttattgtaacgtttattttttatgtttaagtaatttttttgttttagttttttatgtagttgggattataggtgtttgttattacgtttggttaattttttgtatttttagtagagatggagttttattatgttggttaggttggtttcgaattgttgattttaagtgatttatttgttgtagttttttaaagtgttgggattataggtgtaagttattgcgttagttttgttatttattagttagtgtgtttttgtgtaatttgtttaatttttttgaattttagtttttttatttataaaaattaggaggatcgtaatatttaagtgcgtgtttgtgatgattaaatagttgaagagtttagtatagtgtttcgtatatagtaagtattcgaaaaatgttagtatgattattattatggatgtttgaggagtaagattattgtggaaaggttttagaggttttgggaagaagggttttagataaaagtttttttaggtttattatttttttttttgtaattgtattgtagtttgttatttatttaaggatttttaagtttttttatttttgtttttttgttttttttttgttttttatgttttttgttttagttttcgtttgtttatgttatattggtttttaggtagag

SEQ ID NO: 619 - DNA, 6544 bp, Artificial Sequence
  chemically treated genomic DNA (Homo sapiens)
gggatgtttgggttttaataattgtttttttatttggagaaattttttttattttttttaaattttagttttttttttttgggatttgttttagttataaatgttgtaattttttataatgttttgatttgttatagtggttttgaaattttgattgtatattggaattatttagagagttttaaaagttattgatggttagattttattattaaagatttagatttatttggttttaggtgtagtttggatattgagatatttaaaagttttttaggtgattttaatgtgtagttaaggttgagattaatttatgtagaaaatagtgaagtattaagatttttaagtatggtaataatatgttaaaatttagtttagtttttttgttttttttgttttttttaagacggagttttgttttgtcgtttaggttggagtataatggtatgattttaatttattgtaatttttattttttgggtttaagcgatttttttgttttagtttttcgagtagttaggattataggtgcgtattataacgtttggttaattttttgtatttttagtagagatagggttttattatgttggttagggtggtttataatttttgattttgtaatttgtttgttttagttttttaaagtgttgggattataggtatgagttatcgcgtttggttgaaaaaaggtattttaagaaagattaataggaatatatagattagtagggaaagattatagaagattaattagaattttgtaataatttaggagaaaagtttagtaagggttggattagtatatatgtaatgatgttgtagggaggaagatgaatgtaagaaatatttggagagaaggagtattaggatttagtaagtgattgaatgttaaatttgagtaaaaggaaaaaaaatatggttaagtttttagtatagaagaataatagattttttaataaaattaaagtagttgtgaaatagttggttaattaatattattgagaatatggaaattaatattaaattttaagtcggggtttaatttacgtgttttatatatattattttatttaatttttataattattatataaatattattattatttcgattttatagttttagaaattgagtaagagtaattaaattatttgtttaaagttatatagtaaatggtagagaagatatttgattttaattggtttaattatttttttttataggaagatgattagtttatatatggaatttgttgaatttgagtaaataatttaaaaaagtaaaatggttatagaggttagatgggaatataaatgagtgaattaagttagatgtaattgtggagaaattaaaatatcgagagaaggtagttttatttagttatgtttgaatgttgttttatgagaattttaggtttagtattgttatattttaagattttttatgaaaagatggaaatttggatttgtatgtaaaaatttgtgtgaatattaaatttaagtgtttaaaattattgtggtttaaattatggttttaagtttgtatttttgagtaaaaggttgttggaaatttagaattggatgtaaagtgagagatttgggttgaaggtaaatgattagggaatttataagtatagagaggatggtagatgtttttaaaatagtatgtgttagaatagtaattagtatttgatatgattagttaaaataaggtaaaaatatatgagttaataagttagttaggatttagagaaaattgataaaattagtagtggaaaattagtagatttaagtgggtatatttaaaatttaatttttaatgaattaaaagttaaattttagataatgattttgtgtgtgtgtgtgtgtttaagataggatttcgttttgttatttaggttggagtgtagtgatatgattatggtttattttagtttcgatttttagggtttaagttattttattgttttagttttttaagtagttggtattataggtatgtgggatataggttaatttttgtattttttgtagagataggtttttattacgttgtttaggttagttttaaatttttgagtttaagttatttatttgttttagtttttaaaagagttgggattgtaggtattagttattatgtttagtattttattttttttgagataggattttattttattgttttggttggagtgtagtggcgtgattatggtttagtgtagttttaaagttttgggtttaagggattcgtttatgttagttttttaagtagttgggattatagatgtatgttattatatttggattaatttttaattttagagatgggggggtttttttatgttgtttagattggtttttaatttttgggtttaaagaatttttttagtttggtttttaaaagtgttgttgaatttttatatatttatgacgtgatggaaatatttagaaagttttaatgtttattttttttatttaaatatatttcgatttgaaaaaaaattattgtttagattttaaagagtatatttatttagttttaaaagttagatgtttttataattaagatatttaaaatttaataattaaaaattttttatattgggtatagtggtttatatttgtaattttagtattttgggaggtttagacgggtggattatttgaggttaggagtttgagattagtttgggtaatatggtgaaattttattttaagtagaaatataaaaattagttgggcgtggtggtatatgtttgtaattttagttatttaggaggttgaggtacgagaattgtttgaatttaggaggtggaggttgtagtgtgtagagattatattattatattttagtttgagtgataaagtgagattttgttttaaaaaaaaatttttttttttaaaggttttatttaatgtttttatttaatttttgttaattgtgaatttttttgtaatgggttttgtaggtacgattttaattttaaatttttttatttaagtgagagaaaggtaattgaaagattgttttattaatatttttattttttttattttaggttatttttttttaggttaattttttatataaatttatatttgtaaagtttatattaaaagggtttttaattagtaaagattaaataaaatattaagtaaaattttttttaaatttttaattattgaattttaagtgttttaattataagaatattcgatttttacggttaggtgaatattttttttgaagtttagataatagtttttgaatattattttttttagtaaattaatgtattcgtttattattagataaatggaatgtaaattagttatgtaaaaatattatatatattaatgtatttttttaaattttaaagttttatagaaattataaagaaatattattttcgtgttattatgaagttagaagggtttaaagaaatataaagtgaaattttttgtatttaaaataaaatttgtattattattattattttaaaatagtttttttttttttttagaatattttttttaagttttaaagtttaagtaaaattgatgtaatagtaataagtgtagtaatagtaaagtagggaatggtgattattttatagtaaagatttatagatgttggaattgtgttaaaaatttttagagttatattatagttttttattatatttaaatgtcgtaggaaaaattgtaatttttcggaaaattgtattaaggattaggtgttttaatattaagagttgttttgatatattaaaggttaagtttgggtttttgaaaattttgttttttattgaatattttaaaagttatttatgttaaaatatatatatttttgtttttgattatatattgtaaaagtattatatgttaaaatggagatggggatatttttgttgtttaagtttatggaagtatgattttattttagtatagttataatgtcgtaaacgatggaataaggtatttattaatatattatttggtaagtataaatagtttaatttgtcggttttgaaaagtttaattttattttttatggtgaattttaaataaaatgaaaatatataattgataatgtttaacgtgtatttaaataaataaaaaataaaaaaaaataggagttagtaattcgaaattttttaaatattcgcggaagtttgatatatagggtgtttttttcggtgatcgttagtcggatatttttatgggaaaagtagttttttttgtgcggttcgaagaaaattaattttttttttttattatttttttatttattttgtagggggtgggttaataaggagttgaatgaagtttttttttggtattcgggcgtacgtttcgttttttttttattattttttgggttttttaaggttgtcgaagtcgaggatttggagtcgggtagtgtttcggcgttgcgttcgggggttttaggttttaattcgaagggtttagtttcgggagaggttaggtacgcgagggtagttatagttttaaggggcgttaagaaaagtaatgtttattcgttacgtatagggttcgggggaggtaagggtgcgttttttttttatattttcggtgagaaaacgaggtcgagggaaaaggggatgatataattggagtatggtatatggatttagtgaataaagggattggagtaagaagtagtagttacgttaacgtagatttaaaagggtttttcggttttacgtacgtaatttttatttcgatagcgttcggcgttttttacgttattggtttagttttagagatttcgcgaatatggttttgcgtattgcggcggggttgcgtcgtaatcgagtttagttttgtggttttttttcgttgttttgcgcggattggtggtagacggtaatcgggtcgttgattgggcggcgaaggagttattcggggagattttggtgggttcggttgttttaagagtgataagttcggttttagatacgttttagcgttagtagtgagtcggagttttatggaggtggtagcgggtatcgagtggcggttgtagtagcgatttttttgagttgagtttgaggtcgttttcgatttttttttttttttttttttttttttttttttgtttttcgtttttttttttttttttttttttattttcgacgatcggattttgaggaggtagttgcggtggtagttgttgagttttcggtgaaggtgagttgagtcgttgtcgtcgtcgagtggagcgttttaaaatggtcgtcgtttttggtcgttttttttcgagtggtataaaatggcggtcgtaggcggagtcgggtggggcgatttttttttagtattttttttgcgttttagatatttggaaagttttggtttttgttttttttttttgttgttgacggagtagaaggaaaacgttagtgttggttaggtcgtcgtgcggttatggtcggatggtcgacgtttgtagggacgaggtcgtggcggatcgaggtacggttgtgttcggacggcgagggagcgtggttcggatcgttagcgtcgtggcgggaggtacgcgggtcggtagggaaggttaggtcgttggcgcgggattagggaatcgtaggcgtttcggagtttggtttttcggcggggaggtgtgtaggatttggagtcggtaggggttgtttttcgtcggggaggaaagagagagtgatgatttttgttttttttgttagtagaggaggtcgtggcgaggcggttgttagtttcggggggatttatggtgtaggagggggttcgtttggaggcggcgggtgggtaggaggtcgtttttttgtttggagaataaagagttgggcgtcgggttggcgggggtggttttagttgttttttttcgtcgagcgattcgggtttcgcggggaggttgtcggaagtatttttttaatttgcgtttgggtgggaggaatgtttcgtttttttgtttttaggaagggaaaaacggggcggaggtttttgttgttatgttgtggttttggtttttcgtttgtaagtgttagttttgtatattcggttttttttcgcgcgtttttttacgagttttttacggggaggaggcgaaagggtggataggggaaaattgttgaagagttttcggagagattttatttagtcgttggtttcgttaaggtagtaaaaatttttagggtagatattttttacgtgatgttgttcgtgtttgtagttagatttttttattgattttagtgtttagttttaaagatagtagaatgtggtttttttaaaagattcgttttgagtcgtttaaaatgtttttgtgttttacgaagtttttttgtatttttgaatatcggggaatttttaggtggttaaataaaatgtaattgttagtgttttgagtatattttaggttagttttatagatttgtaatgtagtgatagtgttaggatttgaaatacgttgtaattgaatgaaggtttatagatttgtatgttagtagtgtttaattttggtgttttttttcgttttagg

SEQ ID NO: 620 - DNA, 6544 bp, Artificial Sequence
  chemically treated genomic DNA (Homo sapiens)
tttggaacgagaaagagtattaaaattagatattgttaatatatagatttataagtttttatttaattataacgtattttagattttggtattgttattgtattgtagatttgtaagattaatttaaaatgtatttaaaatattgataattatattttgtttagttatttggaaatttttcggtgtttaaggatgtaaagagatttcgtagaatataagagtattttaaacggtttagaacgaattttttgaaaaagttatattttattatttttaaaattgagtattgagattaatagaaaagtttaattatagatacgagtaatattacgtggaaaatgtttgttttaggaatttttattgttttgacgaggttagcgattagatgaggttttttcgaaagttttttagtagtttttttttgtttattttttcgtttttttttcgtggagagttcgtggaaagacgcgcgagagggggtcgggtgtataggattagtatttgtaggcggaagattagggttataatatggtagtaggaattttcgtttcgtttttttttttttgggaataaaagagcggagtattttttttatttaggcgtaagttagggaagtgttttcgataattttttcgcgaggttcgggtcgttcgacggggaggagtagttgaggttattttcgttagttcggcgtttagttttttgttttttaagtaggaaggcggttttttgtttattcgtcgtttttaagcgggtttttttttgtattataaattttttcgggattgataatcgtttcgttacggttttttttgttgataaaaggggtagaaattattattttttttttttttttcgacgaagggtagtttttgtcgattttaggttttatatattttttcgtcgggaggttaggtttcgggacgtttgcggttttttggtttcgcgttaacggtttggttttttttgtcggttcgcgtgtttttcgttacggcgttagcggttcgagttacgttttttcgtcgttcgagtatagtcgtgtttcggttcgttacggtttcgtttttgtaggcgtcggttattcggttatgatcgtacggcggtttggttaatattgacgttttttttttatttcgttagtaataggaagagagaataaaagttaagattttttaggtatttgaagcgtagaggaaatgttaaaaaagggtcgttttattcggtttcgtttgcggtcgttattttgtattattcgagaagaagcgattagggacggcggttattttagagcgttttattcggcggcggtagcggtttaatttatttttatcgagaatttagtagttgttatcgtagttgtttttttaggattcggtcgtcggggatagggaagggaggggaaaggggaacggaaaataaaaaaaagggggagggaagggggaggaaggagtcggggacggttttaaatttagtttagaggagtcgttgttgtagtcgttattcggtattcgttgttatttttatagagtttcgatttattgttggcgttaaggcgtgtttgaagtcgaatttattatttttggggtagtcgaatttattagagttttttcgaatggttttttcgtcgtttaattagcggttcggttgtcgtttgttattaattcgcgtagggtagcgaggaggagttatagggttgagttcggttgcggcgtagtttcgtcgtagtgcgtaaagttatattcgcgaagtttttgaggttgagttagtggcgtaaggggcgtcgagcgttgtcgagatgagggttgcgtgcgtaaagtcggagagtttttttgagtttgcgttggcgtggttgttgttttttgttttagtttttttgtttattgagtttatatgttatgttttagttgtattatttttttttttttcgatttcgtttttttatcgggaatatgggaagaaaacgtatttttatttttttcgaattttgtgcgtggcgagtgagtattgttttttttggcgttttttggagttgtggttgttttcgcgtgtttggtttttttcggggttgagtttttcgggttgaggtttggagttttcgggcgtagcgtcgggatattattcggttttaggttttcggtttcggtagttttagggaatttagaaagtagtggggaggaggcgagacgtgcgttcggatgttaaaggggagttttatttagttttttattggtttattttttgtagagtgaatgagaaagtgatgaaaggaaggggttgatttttttcgaatcgtatagaagaagttgttttttttataggaatgttcggttggcggttatcgaggaaaatattttgtgtgttagattttcgcgggtgtttggaggatttcgaattgttagtttttgtttttttttgttttttgtttgtttaagtgtacgttaaatattgttagttgtgtatttttattttatttaaggtttattataagaaataggattaagttttttaaagtcggtaagttgaattatttatatttattaggtaatgtattgatgagtattttattttatcgtttgcgatattgtagttatattaaaatggagttatatttttataaatttaaataataaaaatgtttttatttttattttaatatgtagtatttttatagtgtatagttaaaggtaagaatgtgtgtgttttaatatgaatgatttttaaagtgtttagtaagaggtaggatttttaaagatttaaatttaatttttgatgtgttaaaatagtttttggtattagagtatttggtttttaatataatttttcggaaaattgtagttttttttacgatatttaaatgtaatagaaggttgtggtgtggttttgaaggtttttaatataattttaatatttgtagatttttgttatagaatagttattattttttattttattgttattatatttattgttattatattaattttatttgaattttaaaatttggaagagatattttaaaaaaaaaaaaaaattattttggggtggtggtggtggtgtaagttttgttttaaatataagaggttttattttgtatttttttggatttttttagttttatgataatacgagaataatgtttttttataatttttgtagggttttaaggtttggaaaaatgtattagtatatgtgatatttttatataattggtttatattttatttatttgataatgaacgaatatattagtttattaagaagagtagtatttaaaaattattgtttagattttaaagagaatatttatttagtcgtaaaagtcggatgtttttataattaagatatttaaaatttagtaattaaaaatttaaaaaaggttttatttaatattttatttaatttttgttaattgggaatttttttggtatgggttttgtagatatgagtttatgtgagaaattgatttggaagggaataatttaaggtagaaaaagtaaaaatattgataaaataattttttaattattttttttttatttaaatagaaagatttgaagttgaaatcgtatttgtaaagtttattgtagaagggtttataattagtaaagattaaataaaaatattaagtaaaatttttagaaaaaaaaatttttttttgagatagagttttattttgttatttaggttggagtgtagtggtgtgatttttgtatattgtagtttttattttttgggtttaagtagttttcgtgttttagttttttgagtagttgggattataagtatgtgttattacgtttagttaatttttgtatttttatttgagatggggttttattatgttgtttagattggttttaaatttttgattttaagtgatttattcgtttgggttttttaaaatattgggattataggtgtgagttattgtgtttagtgtaaaaaatttttaattattgaattttaagtgttttaattataagaatatttagtttttagggttagatgaatatattttttgaagtttagataatagtttttttttaaatcgaaatatatttaagtgagggaaataaatattgaaattttttaaatgtttttattacgttatggatatatgaaaatttagtagtatttttggaggttaagttgggaggattttttgagtttaggagttggagattaatttgggtaatatagggagatttttttatttttaaaattaaaaattaatttagatgtggtgatatgtatttgtagttttagttatttgggaggttgatatgggcgaattttttaagtttaggattttgaggttgtattaagttatggttacgttattgtattttagttagggtagtagagtgagattttgttttaaaaaaaataaaatgttaggtatggtggttgatgtttgtaattttagtttttttggagattgaagtaggtgggtagtttgagtttaggagtttgagattagtttgggtaacgtggtgaaaatttgtttttataaaaaatataaaaattagtttgtgttttatatgtttgtagtattagttatttgggaggttgaggtagtaggatggtttgagttttggaggtcgaggttgaagtgagttatgattatgttattgtattttagtttgggtaatagagcgaaattttattttaaatatatatatatatatagagttattgtttggaatttagtttttagtttattgaaaattgaattttaaatatatttatttaagtttgttagttttttattgttagttttattagttttttttaagttttgattaatttgttaatttatatatttttgttttattttaattaattatgttaagtgttggttattattttaatatatattgttttggaagtatttattattttttttgtgtttatgaattttttaattatttatttttagtttagattttttattttatatttagttttgaatttttaatagttttttgtttagagatgtaaatttgaagttatagtttgagttatagtagttttaaatatttgaatttgatatttatataaatttttgtatataaatttagatttttatttttttatgaaaaattttaaaatatggtaatattgggtttgaaatttttatagggtaatatttaagtataattaagtagaattattttttttcgatgttttgatttttttatagttgtatttgatttgatttatttatttatgtttttatttggtttttatagttattttgtttttttgagttgtttgtttaaatttaatagattttatatgtaaattggttatttttttatgaggaaaagtagttagattagttgaggttaaatgttttttttattatttattgtgtaattttgggtaaataatttaattatttttatttagtttttaaaattgtaaaatcggaatgatagtagtatttatatggtggttgtaaagattaaatgagataatgtatgtaaggtacgtaggttagatttcgatttagaatttaatgttagtttttatatttttaataatattgattaattagttgttttataattattttaattttgttaaggagtttattatttttttatgttagaaatttgattatattttttttttttttgtttagatttaatatttaattatttattgaattttggtgttttttttttttaaatgttttttgtatttatttttttttttataatattattgtatgtatgttaatttagtttttattaaattttttttttggattattgtaaaattttagttgattttttgtagtttttttttattagtttgtatatttttgttagttttttttaaaatatttttttttagttaggcgcggtggtttatgtttgtaattttagtattttgggaggttgaggtaggtagattataaggttaggagttatagattattttggttaatatggtgaaattttgtttttattaaaaatataaaaaattggttagacgttgtggtgcgtatttgtaattttagttattcgggaggttgaggtaggagaatcgtttgaatttaggaggtggaggttgtagtgagttgaaattatgttattgtattttagtttgggcgatagagtaagatttcgttttggaaaaaataaaaaaaataaaaaaattaaattaaattttaatatattattattatgtttaagaattttagtgttttattattttttatatgagttgattttaattttggttgtatattagaattatttggagaatttttaaatattttagtgtttaggttgtatttaagattagataaatttgaatttttggtagtgagatttagttattagtagtttttaaagttttttaggtgattttagtgtgtagttaaggttttagagttattgtagtaggttagagtattatagaaaattataatatttatagttgaagtaaattttaggaaaaggaaattggggtttaaaaaagataaggggagtttttttaagtagggaaatagttattagaatttaggtatttt

SEQ ID NO: 621 - DNA, 5586 bp, Artificial Sequence
  chemically treated genomic DNA (Homo sapiens)
agcgagattttgtttcgagagaaagatagttagttattcgggaggtcgaggtaggagaattatttgaattcgggaggtagaggttgtagtgagtcgagattacggtattgtattttagtttgggtgatagagcgagattttgtcgtaaataaaataaaaataaaataaaataaaataaaaggagaaagaaagaaagagatagagagagaaagaaagaagaaagaaagaaaaagagagaaagaaagaaagaaagaaagaaaaagaaagagagagagagagagagagagagagaaagaaagaaagaaagttttatattggaagtattttattttgaaatagttgtggttattttagttttttttttggttgtttggggttagttcgggtgattggttgtttttattttttcgggagatttaggtggtttttgatgggtgattggtcgtttttattttttagggagatttaggtggtttttgatgggtgattggtcgtttttgttttttagggagatttaggtggttttttgatttgtgatggtattatttaaggaatagattttttcgtgatttggggatgtgttattcgttttttttttgatttttttacgcgggtagttttttacgtggattggattcgttttacgttgcgtcgtgtggaggttaagggtcgtttttgaatcgttttttttatagcgttggtcgggatttcgagtttggttttaaattttcgaggcggatttttggatagaagtagttttttttcgaatattgtggcgttcgggacggttttattcgtttttttatatttttttttacggggtttcgggagataggtcggttttgtattttattttatcgtgattttaataaacgttgaaattttttttggtttttgtttgttttttttatatagggaggggagggggaattgtttatcgtgattttaataaacgttgaaattttttttggtttttgtttgttttttttatatagggagggaattagggagaggttttttgggtttaagttttcgagttttaaatttaggatggggggagtcggagcgggggatgggggtttaggttgtagggggttttttttttggatgttcgtggttgtgggttttaattcggttttattagggtggttttgggtaggttgttatttattttcgtgttttagtttttttatttggaaaatggattcgttttagacgttttttagaattgtttttgttggtttagggattttttgaggaaggggatggggatggggaagtagtttggggggttttttggaggaggtggtagtgttagagttgtatattaaggtgtgaatagaaatattcgaagggttgttaggtagggggtatagtttaggtagagatttgagggttagaggttaggggacggggaggagggtaggtaggggagggatgtgggtgtaggggaggggtaatggggttggagcgttatttttcgtaggaggggtaggtagggtaggagttttttggtagaagtatgagtaatgaattgggtgggggggtggttagaggggaggttcgaggcggggaagaggtgggatttatagtttagtttaaagacgggtaagtggttattagaaggaggtattagttatagagaggggacgatttgttttaggatacgtgtagagaagaaatgaagtttattgttggtgttttttttttttttttaatatttttttgagatagagtttcgttttgttatttaggttggagtgtagtggtgtgatttcggtttattgtaagtttcgttattcgggttgaagcgatttttttgttttagttttcggagtagttgggattataggtatagattattacgtttagttaatttttatatttttagtatagatagggttttattacgttgtttaggttggtttcgaatttttgattttaggtggtttattcgttttagttttttaaagtgttgggtttataggcgtgagtttatttatttatttatagttggtttatttatttatttttgagatagggttttattttgtcgtttagtttgtagtgtagtggtgtaattttggtttatcgtagttttaattttttgggtttaagtgatttttttattttagtttttcgagtagttgggattataggtgttattatatttagttatttttttagtttttgtagagacggggtttggttgtgttgtttaggtgggtttttagtgattttttatatatgaatatttttaggttattgtaattttagtaattttttggttttttagaagattttacgtttttttcggagtttatattcgttgtgattataatatttttattttttttgttatagttaatggtgaattagtttttaaagtaatattttttttttttttttttttttttttttttttttgagacggagtttcgttttgtcgtttaggttggagtgtagtggtatgatttcggtttattgtaattttcgttttttaggtttaagtaatttttttgttttagtttttcgagtagtcgggattataggtaggtattattacgttaggttaattttgtatttttggtagagacggggtttgtttatgttggttaggttggaatttttaattttaggtgatatattcgttttagttttttaaagtgttgggattataggtttgagttatcgcgttcggttagataatatttttttagttaagaattttatgaacgtgaatttattttatttttttgataggtttatgtgatggattttacgattataattttatagaggaggaaattgagttacggagagtttattttaggggtttgaagttatatagtggttaaatggttatattagaattaggatatgaatttagcgtcggtatatttaataatgattgtacgtgagaatgtagtatatagttggtgtttaataaatgtagttgacgttaagtttgattttcgtgttggaggttaagttttttttaaagatacggcgttttttatttttgaaatttttttattttcgatttgaaatagggttgtgtagatagtaggcgtttattaagtgtattgtggtgatgttaaggtagtaaggtgggaattttgttaaaaggggaggggagaaggtagggtagtgtgtgtttgattaagttgaggatagggtagatatggattgagcgtttgttgtgtgttaggttttgggagggtagggttattgtttttttaattcgagagttatgggggtttatttgtttgtggttacgttaggattttagtttggtttaggttttgcgtgttttcgggtgttttcgtttcgtttatttttggagataggttcgttggttttttttttttttttttgttttggagttaggaggacgttggtttttgcgatagttttggttcggtcgttgtagttggaatatcgtgggggagatgggaagaggaacggggttcggagttcggggttgggttttgggaatttttttttcgtagttgggattttagtttttttgttagtttttttaggcggaagtttttaggtttggtttttattttagtttttcggtttggataggaattttttttttagtagttttgttagatgttcgtttagtttttgttttaggcggggagggttttagggaagtttattaaggtagaagggcgggagagattgttagagttttagttggtgtttagggattgatcgtgagtttgggtgaaagtgagtttttcgttggaggtaatagacgaggagaggatggaaggtttggtttttaagaatgagttttgaggtttagggagcggttggagtgagtcggttttagattttcgtttagttgcgggttttagaggtttgggttatattcgtagtttttgggggaggtttttgacgtgttttagtttttaaataggaattttgggaaggattagagaagtgtttattgcgtagtgagtgttcgatatagttgtatgtggtcggtattatagggttttgggtaaattgaggtaggcgatatagttgtatgtggtcggtattatagggttttgggtaaattgaggtaggcgatatagttgtatgtggtcggtattatagggttttgggtaaattgaggtaggcgatatagttgtatgtggtcgtattatagggttttgggtaaattgaggtaggtgatatagttgtatgtggtcggtattacggggttttggataaatagaggtaggcgatatagttgtatgtggtcggtattacggggttttgggtaaattgaggtaggcgaggttatttttattaagttttttaggtttaggtttggtaggtttggtaaaaatatagtaacgttcggttaaatttgaatttcgggtaagtatattttgggttttatttggaagagatttagattaaaaaaaaaacgtcgagattagttcggttaatacggtgaaatttcgtttttattaaaaatataaaaaattagttaggcgtagtggtttacgtttgtgattttagtattttgggaggttgaggtaggcggattattcgaggttagatgtttaagattagtttggtcgatagggcgaaatattgtttttattataaatataaaaattagtcgggagtggtggtaggtgtttgtaattttagttatttaggaggttgaggtaggagaattatttgaatttgggaggcggaggttgtcgtgagtcgggattacgttatcgtattttagtttgggcgatagagtaagattttgtttttaaaaaaataaattaaaaaatttatattgattatttgatatttgaatgcgattgtgtattttgaattttgtttggaggttttattcgagttaatttagcgttttgttttttttttttttttttttattaacgttttgtgttaggggagaggaagtggagggcgttggtcggtcgtggggtaatgtaacggttttttagtatagggttataagaggagtcgggcgggtacggaggggtagagatttcggagttttagttttattatgattttcggtcgtcgattcgcgtgtttttttttcgtttgtgttttgtcggttttgttgttggggggtgagtttttgagtttaatttttcgttgttttttttgtttcgggttttgtttttatttttttatagagggttttattagtgtgggttttttatttttataggggaggtgttagttgggataaggagattagaagagattgaggttttgagcggtgaagttattattaggagtttagagttggggtttgaaaatcggggagggggggggggtcgtaggtcgttttttgggtttaagtttaggtttgtttgtgttttggaggggtatcgtggggaggtttttttgttttttcgtgttttagtttttttatttgaataataggggtgcgaacggtttcgatttcgtgggttttcggtgggggatttcgtgggttttcggtgggggatttcgtgggtttttggtgggggatttagaggtttcgtggtcgggaggggataggttttttggtaggtatttagtattcgtattcggtgtgtttttagg

SEQ ID NO: 622 - DNA, 5586 bp, Artificial Sequence
  chemically treated genomic DNA (Homo sapiens)
tttggggatatatcgggtgcgggtgttgagtgtttgttaaggagtttgttttttttcggttacggggtttttggattttttattaggaatttacgggattttttatcgggaatttacgggattttttatcgggaatttacgggatcggggtcgttcgtatttttgttgtttagatgaggaaattgaggtacggagaggtaaagggatttttttacggtgtttttttaaggtatagatagatttggatttgaatttagagggcgatttgcgatttttttttttttttcggtttttaaattttaattttgggtttttggtggtggttttatcgtttagaattttagttttttttggtttttttgttttagttggtattttttttgtgaggatgagggatttatattggtggggttttttatggagaggtgggaatagaattcgggatagagggagtagcgggaggttggatttaaaaatttattttttagtagtaaggtcggtaggatataggcgaggaaaagatacgcgagtcggcggtcgagggttatggtggggttggggtttcggggtttttgttttttcgtgttcgttcggttttttttatagttttgtgttgggaggtcgttgtattgttttacggtcggttagcgttttttatttttttttttttggtatagggcgttgatgaaaagggggagaagggggataagacgttggattggttcgggtggggtttttagataaaatttaggatgtataatcgtatttaaatgttagataattaatgtgggttttttaatttatttttttggagatagagttttgttttatcgtttaggttggagtgcggtggcgtgatttcggtttacggtaattttcgttttttaggtttaagtgatttttttgttttagttttttgaatagttgagattataggtatttgttattattttcggttaatttttgtatttgtagtagagatagtgtttcgttttgtcggttaggttggttttgaatatttgatttcgggtgattcgtttgttttagttttttagagtgttgggattataggcgtgagttattgcgtttggttaattttttgtatttttagtagagacggggttttatcgtgttggtcgggttggtttcgacgttttttttttaatttaagttttttttaaatgaggtttaggatatatttattcgaaatttagatttaatcgagcgttgttgtgtttttgttaaatttgttaaatttagatttgagggatttgatgggggtggtttcgtttgttttagtttatttagggtttcgtgatatcggttatatgtagttgtgtcgtttgtttttgtttatttagggtttcgtgatatcggttatatgtagttgtgttatttgttttagtttatttagggttttgtgatacggttatatgtagttgtgtcgtttgttttagtttatttagggttttgtgatatcggttatatgtagttgtgtcgtttgttttagtttatttagggttttgtgatatcggttatatgtagttgtgtcgtttgttttagtttatttagggttttgtgatatcggttatatgtagttgtgtcgggtatttattgcgtaataggtatttttttggttttttttagggtttttgtttgggaattgaggtacgttaagggttttttttaggagttgcgagtgtaatttaggtttttgggattcgtagttggacggagatttggggtcggtttattttagtcgttttttgaattttagggtttatttttgggggttaggttttttatttttttttcgtttgttgtttttaacggggaatttatttttatttaggtttacggttagtttttggatattagttggggttttgataatttttttcgtttttttgttttggtgagtttttttgaagtttttttcgtttgaggtaggggttgggcgggtatttggtagggttgttggagagagaatttttgtttaggtcgggaggttggagtgaggattaagtttgagggttttcgtttggaggaattggtaggggagttggagttttagttgcgggaaagggatttttaggatttagtttcgggtttcgggtttcgtttttttttttattttttttacgatgttttagttgtaacggtcgggttaaggttgtcgtaagaattaacgtttttttggttttaggataaggggaggggaagggaattaacgggtttgtttttaggaataggcggggcgagggtattcggggatacgtagagtttgggttaggttggagttttgacgtgattataggtaagtggatttttatggttttcgggttagggagataatggttttgtttttttagagtttggtatatagtaggcgtttagtttatgtttgttttgtttttagtttaattagatatatattattttgtttttttttttttttttttggtagggtttttattttgttgttttaatattattatagtgtatttagtaagcgtttattgtttatatagttttgttttaagtcgggggtggggggattttaggggtgggggacgtcgtatttttggaaggggtttggtttttagtacggagattagatttggcgttagttgtatttattgagtattagttgtatattatatttttacgtgtagttattattaagtgtgtcgacgttgggtttatattttggttttggtgtggttatttggttattgtgtaattttaggtttttgaaataaatttttcgtgatttagtttttttttttgtaaaattataatcgtaggatttattatataaatttgttaagaggatgaaataaatttacgtttataaagtttttagttaagaaagtgttgtttggtcgggcgcggtggtttaggtttgtaattttaatattttgggaggttgaggcgggtgtattatttgaggttgggaattttagtttgattaatatggataaatttcgtttttattaaaaatataaaattagtttggcgtggtggtatttgtttgtaatttcggttattcgggagattgaggtaggagaattgtttgaatttaggaggcggaggttgtagtgagtcgagattatgttattgtattttagtttgggcgatagagcgagatttcgttttaaaaaaaaaaaaaaaaaaaaaaaaaaaaagaaagtgttgttttgagagttggtttattattaattgtggtagggaaggtaggggtgttatggttatagcgggtgtagatttcgagggggacgtggggttttttgggaggttaggagattgttaagattatagtgatttggaggtgtttatatgtaaagagttattgaggatttatttgggtaatatagttagatttcgtttttataaaaattaagaaaatagttgggtgtggtggtatttgtagttttagttattcgggaggttgaggtgggaggattatttgagtttaggaggttgaggttgcggtaagttaagattgtattattgtattatagattgggcgatagagtgagattttgttttaaaaataaataagtaggttagttgtaaataagtaagtaggtttacgtttgtaaatttagtattttgggaagttgaggcgggtggattatttgaggttaggagttcgagattagtttggataacgtggtgaaattttgtttgtattaaaaatataaaaattaattgggcgtggtggtttgtgtttgtagttttagttatttcggaggttgaggtaggagaatcgttttaattcgggtggcggagtttgtagtgagtcgagattatattattgtattttagtttgggtgatagagcgagattttgttttaaaaaaatattaaaaagaaaaaaaaaatattagtaatgagttttattttttttttatacgtgttttggagtaggtcgttttttttttgtggttaatgtttttttttagtggttatttgttcgtttttgagttggattgtgagttttatttttttttcgtttcggattttttttttggttatttttttatttagtttattgtttatgtttttattagggaatttttgttttgtttattttttttacgagaaatagcgttttaattttattattttttttttgtatttatattttttttttgtttgttttttttttcgttttttggtttttagtttttaggtttttgtttggattgtgttttttgtttggtagtttttcggatgtttttgtttatattttgatatgtagttttggtattgttattttttttaggaagttttttaggttgtttttttatttttatttttttttttaaggagtttttgagttagtagggatagttttaggaaacgtttggggcgagtttattttttagatgaggaaattgaggtacggagatgaataataatttgtttagggttattttgatggggtcgggttagaatttatagttacgagtatttaggagagagattttttgtaatttgggtttttatttttcgtttcgattttttttattttgagtttggggttcggggatttgaatttaggggatttttttttggttttttttttatatgggaaggatagataggagttagggggagttttaacgtttattgaggttacggtgggtagtttttttttttttttttatatgggaaggatagataggagttagggggagttttaacgtttattgaggttacggtggggtgaggtgtagggtcggtttgtttttcggagtttcgtgggagggagtgtggggggacgggtggggtcgtttcggacgttatagtgttcggggaagagttgtttttgtttaaagattcgtttcgagggtttggagttaggttcggggtttcggttagcgttgtgggaggggcggtttaggggcggtttttggtttttatacggcgtagcgtggaacggatttagtttacgtagagggttattcgcgtgaagaagttagggaaaaggcgggtggtatatttttagattacgaaggagtttattttttggatgatgttattatagattagggggttatttgagtttttttggaggatagggacggttagttatttattaggggttatttgagtttttttggaggatggggacggttagttatttattaggggttatttgagtttttcgggaggatggggatagttagttattcgggttggttttaggtagttaggaagggggttggggtagttatagttgttttagaataaaatgtttttaatatggaatttttttttttttttttttttttttttttttttttttttttttttttttttttttttttttttttttttttttttttttttttttttttttttttttttttttttttatttttttttttttttttttttttgttttgttttgttttgtttttgttttgtttgcgatagagtttcgttttgttatttaggttggagtgtagtgtcgtgatttcggtttattgtaatttttgtttttcgggtttaagtgatttttttgtttcggtttttcgagtagttggttgtttttttttcgagatagggtttcgtt

SEQ ID NO: 623 - DNA, 12177 bp, Artificial Sequence
  chemically treated genomic DNA (Homo sapiens)
aatagatagttcgtgaggtattgtaggaatagtatagggtagaatagttcgttcgggatatttatttttttattttcggtttatattggttaaagatttagattgataaatgatttagatatataaacgttcggggttaagaggaaatacggtatggttcggaggttgtagggggtagtatttatagggatggggttttttgttatgtttatttttttatttagttatgattagtggtttgaaatggtgttatggatttttttttatgtttgagtatttgttgtatattaaatttttatagatatgtttgtatttttaaatggttatgaagattttgtttttataggacgaaattagggattttaggggttaattattgttgatgttattattttttattattattagataatttggttaaatttatatattaattaatattagtttttattataattataataacgattgttgattttttcgaatttatttttagtttggggggttgtagaagtatcgagttttagaattttagttttttttttataacgtttaacgtattttttcgaagtatagtttgttttttttttgagttggttttgtgtgatgaagggatatttagtaaatggtttagatttatgggtattcgatttattttcggttgtagtttttttatttttgatatttgtgtttgcgttagattttttttttttttggtcggttattcgaggggtttttggtggtttttgggaagagaggaattgtagaagttttttttattttttagttgaggtgttggttttgggtcgatgttgtcgggtattttataggaggtagtcgttttttttggtttagttattagtacgagggtagggttatttttttggggttgtttgttacgggtgttttttgttagtttttaaggatatttttttttttttgttttttttttttgtttttaagtttcgttttattttgaatttttgtatagtaggatttagatttttttttaagcgtattagaattaaggttagttttggttgggtatggtggtttacgtttgtaattttagtatttagggaagtcgaggcgggaggattatttgaggttaggagtttaagattagtttggttaaaacggagaaatttcgtttttattaaaaatataaaaattagttaggcgtggtggcgcgtgtttgtaattttagttatttaggaggttgaggtaggagaattgtttgaattcgggaggcggaggttgtagtgagttaagatcgtgttattgtattttagtttgggtgatagagaaagatttttttttaaaaaagaaaataaattattaaaaaagaattaaggttagtttattttattagttttttatgatttaaattagtgttgttttcggtggtagttgttggttatatgtggttaatggagtatttgaaatgtgataagtttagattgagacgtattttcgatgtaaaatatatattagttttaagatttggtataaaaaagaatgtaagatattttaataatttttattttgattggatgttgaaaggattatattttagatatgttgtgttaaatatattattaagaatagttttatttatgtttttttttattttatatggttattagtaaatttaagattataggaggggttggatgcggtagtttatatttgtaattttagtattttgggaggtcgaggcgggcggattatttgagtttaggagtttgagattagtttggttaatatggtgaaattcggtttttattaaaaatataaaaattagttggtagtggtggcggatgtttgtaattttagttattcgggggttgaggtaggagaattgtttgaatttgggaggtagaaattttagtgagcggagattacgttattgtattttagtttgggtgatagaacgagatttcgttttaaaaaaaaaatttgaattttgtttggatagcgacggagggtgtttgagtaaagtacgatgtttttagagttatttagagattgggaattttgttttattaaaatgggtgtatttagaggagttggaagatagagatgttttgtgggtgatttatttggttgttttttggtggtattgagttaggtaataagcgggaaaggtttgttaatgataacggtaagattaacgattattaggtagttaggtgtattcggtagttttttgtgggtaattttgtatgtatgattttatttagttatatagttaggtaaggaggtgatattaagtatttgagtattgatggggttttgaatgaataagtaaatgaatgaatgaatggatggtggtcgatgattgttatttttagtttttatattatgtattttatgtattagattatacggtatggatatttagtgtaatggatttgattgtgaattgaggtttttttttgtaattttgttgtatgttatgttcgtggagtttttgtaatgagtagaggttgttaagtagaagtagcgtataggttgggggtaggatatagggttttcggttttaggggagaggtttgttttagttattttaagtttatttttgtgagtgtttttttatattttttttggatttttttattgtaaattttttttttttggtttcggatttttttttcgttttggaattaataaagattttgtgtagattgcggtttgtaagtttgaaagttggtttttgttcgtgttattgtttcgagaagagaggggtttagttttttatagtagtttttgttttttttttttttaggtaggcggaggtacgtagatatattattgatttttttttttttgtagtaggtatattttgggtatcgagttttagattttgtttttgagtagtttttaattttattaataaagggtggtttgggggggtttttattttagtataatttttattagttatttttaaagtatttttaaataaatatatatcgtaagtaagagttgtatattggttgtgtgcgtatatttttaagataatttttttagtatgtttttattttttaaaattttagagttgttttttttaaagatttagggaaaaggaagggtttgtttagggttttggggtggtttcgtatagattaaagtttgatagttgttttagaagtagagtatttgtagagcgagtgacggtaattgtggtattgatattagttttagtattagttgaatatagagtatttttgatttagtagaaatataagattacgttgtatttgtttttgtaataattttttagttaggaatattgattatttgtagatagataaggaaattgatgttttgtggagaggtttttttattagaaaggttagagttagaaatttatttttaggtttattaatatttgtttttgattaatgtttgtatttgatttttttacgttgagttatttttgttggtattttagattgttatagtgtttttgtttttataaggggtttttaatttatttttcggagttatcgtggtgtagggaaaagtttatagggcgtgtggtttttatgttgttttttgattggttgtgatttaggataaggaataagttttttttttttattttttaggttttatatttttttttttttagtagtagtgggaagtgaggggtgggggatacgatttttttttgttttattttatattttaatttttaaaattttttagggttttcgtttagtttagttttgggggtagaaatgtagagttttttaggaacgtggttttagttgttttagtgtaggtcgtttttttttggttattagcggaatgttagtttttttagaggggtcgggagaatagtagtcgagaagtttttagattggtgtgggcgttagttgtgtttagcgtggggatgggaggtgatttagtgataatgggaagttgggttgtttgttagtttgcggggggtttttatttttttgtttttttatagggtatttggggatttagtttgatttttattagattttgcggtttgtatggggttgggtatagggttgtgattttgatttatgtagaatagaattttgtgtgtcgggattttttatgtgttttagatgtttttggggatagtattaatatggttttaatttttaagttatttttttgtttttaattttttggtatttgtaggtatttattttagatttatttaatattttttttttagttttaggcgttaggtagagattttggtttttgtagaatgtagttttgtttagggttttttattttttttttagattttttttagagtaatattaattcgggtttattttttaggttatttaatttgtagtttttcggtttttgtagatatcgtattttttaaatttttagatttgtttaatgttttttttttttagttttgggtagaatttgtttttagttagatttgggggtgttggggagtttggagggtcggggtgggggttgaggcgcgggatagttggttcgtatttttatattgggttcggggtttagtcggaggggcgggggtttggttattcgggttttggttggggttgggatttttggtttggtcgttaggtttttttttttgttttttttttcgagggttgttttggtagaggtttttttcgttttttttggcgggaatagggttagtagcgaaagaatagtcgtagagggaaagcgggaaagagatgggggaaagtgtgtgtgtgtgagtgtgtgtttgtgtgtatgtgtgtgcgtgtgtgtgttaaggaaaaaagttcgtagtttagtagttcgggtttgggaggtttgtgagtcgggtttttcgtaattgtttttttttcgcggtttttttttttaggttttttttttttttcgttttttcgttcgtttttttttttttttttttttttttatagtcgacgaggtaataattaggttttggggataaaacgaggtgcggagagcgggttggggtattttttttcgagatggcgggtttgacggcggcggtttcgcggttcggagtttttttgtttttgttgtttattttttatttttttcggtttggaggtaaggatttttcgtttttgtttttagcgttgtttatagttgcgggttttttgggttaggtgattagacgtttaagggggagattttcgtttttgggaattgtaaggggttttaggtgggagttttttagttattgggttttcggaattgttttttttaggagttagtttcgtgtttaggaggaatttgttaaagagatattttcgatttagaatagttttagtttagtatttaggttttgttgttttgcgagggttgagggggtttttgtttaggtgttcgggtgttcgttttgtagggggattagagtattttgggggagggtttagcgggaatttttgggtttggagatattatagtttgtatatttgtggatatagttggggtgtatattagttttggggatagggaatttgggtttgatattagtttaatcgtagtgagttgtgtgattttagtaggttttttgatttttgggaagtcgggattttttcgttaggaaggttagggtttcgttgaggatgggtttgtaggttgggaagttgttgttgtgttttttttgttgaggtaggtagggatttttggtatgtatttgtgtgtgtgtgtgtgtgtgtatgtatataggaatgagcgtgttgtgtgttcgtgtgtgtatgtgtgtatgtataggtgtgtatgtgtttagatgttcggttgtgttattgaatagggaaagggatttttggaggggtatatatgtttgtttataggtttatttttaggtaggtgtatgcgtatgtttggaggaggtatatgaagttgttttttagtgtgtgtaaaagtttgttatttgatagatatgtagatatgtatatatgtagatatgggcgatttggtatttaggtgtgatattggtgtggattgttattgtgtgtgttatggagtgtgtatatttgtgtgtgtgaatgtgtgtgcgatgtggtacgtaagtatggaaaggcgggttggagaaggtgtttgttttttggtagaggtagtgtggttgagatagaggttggagtggattttggggtattgttgggttatttgttatgtgttttaatttaggtatagttggttatggggtttgagggtgtgttttgtggggttgttatgtcgcggttaacgggggaggatagaagaggttttcgggtatgggaaaaaggagggtatttggtaggggggtttgggtggagtttggttttttcgggagttttttttgttatgagaattaaacgttgagtggggggcgggagggttacggggtggagttaagggtttgggtaggagttgtagttgttttcgtgagattgaatagttttttgtgtagggttcgttgttggatttggatgaggttaagggatatgggtatttataggcgggttttagtaggggtaacgagttagggtttgaaagtagtagtttcgggttcgttttagttttttttttaggtgtagtttttaaatatttagttatttttttttttagatggggttattatttatagggtggtagtttattattaaggaattttgagaattagaaattattattattatttgataaataaggaagttgaggtttcggtaggttaaggtagttttcgggggttagtattagttagttttttgttttaggttaaggggtaagggggttaggagtgagttagtaggtaatatttggggaggggaaggtttggggttgagtttttaaagtaggtatgttttaggtagaattagttttttttttgtgtttttagtgatatcgttaaacgtttagttggttttatattttgtagagattaattttagttttgttttaggtggttggatttgttaggtttaaataaggggtgtgtgaattgatgagttcgtgtggggttttgtatagaagtgttattgaagtttgtagaggtcggggagttaatatagggagtggagcgtttagttatatgtttattgttatttatttggttgttttgggggagtttggttttttttttaaggaggagggtgttatttatgtaagtttagcggttttaaggaaggaattttgttgcgggggtgggggagtaggaggaggggataagtcgtatagtttttaggttgttttaaaagtgagtatgagaaattaatttagggataatttttttttattttttagaaatagtattagggattttttttttttttttttttgattttagaattgaagatggtttggaatagaggttttttttttttttattttttttttttatttttatttttttattttttttattttttttaaattgagatagggtttcgttgtgttgtttaggttggtttgaatttttgggtttaagtgatttttttattttcgttttttaaagtgtttggattataggtatgagttattgtttttttttaaatatttttttaattattgtttttcgtttttaagtaggaataggggtttttaatttggttatttattagattttttatttaagaatttttgtttgttttggttggagagggatttggatatagattttttaggttttttaggtgacggtggggtcgttagggttaagaagtattggtttagaggtcgatttcgttttgtgtgtttgtcgaggtttcggtatgagggtaaatgtgttttgtgtgggaggggatatagttatttagtggaggatagtttgtttttgaaaatttttggtagttttttgtatgtaaataataaatagtttcgtgtggttttatttgttttttaagttagttttttggattttggtttggtaaagttttttgttaagatcggttggttttaggttcgtttttaaataggttgtttttagttttttgaatttggagtttagggtttaggtaaatggttttatatgtgatttggggttagttgggggttttagattaggttttttagtttattggttttttatttttttggttgtaaaatggggagaaatagttttgtttgaagtattttttagggttagtgagagtttttagtaatgtaatatttggggggaaaaaaagtattaaataaaaggatcgtgggaatgggtatttttaaaataatttatttttttatttagagtttgttaatttgggtttatggatttttgtaattagtgtatattgttaaggtttaatatttttttttattatttatattatgttttgtttagtggaggggtagttaatgtgtaaatagatgtgtaatgatgaaagaagtagataggattcggttgggggtggttagaaggagttttgagaaatttaggaaggttttttagtagaagtgatatttgagttaaatttaaagagaaaagtaaatggggttaggtgtagtgatttatgtttgtaattttagtattttgggaggtttatatgggtagattgtttgagtttaggagtttgagattagtttgggtaatataggaaggttttcgtttttatttaaaaaataaatgaatatttaaaaagaaagaaaaagaaagaaagagagagagagagagagaaaggagagagagagagatagaaagaaagaaaggaaggaaggaaagaaggaaggaaggaaggaaggaaggaaggaaggaaggaaggaaggaaggaaggaaaatgttggaggatttgtttgtggatgaggggtaagtttttagattataggttttggtaggtagaattgaagagatagaagagtagattttcgattggaggaagttttgtttgtagttagtgttgatagtatttggaggtggtgatttttttattatgggaggtatgtaagtagaatacgaaggatgtttgtggaaggaggtttagtttaggttagaagattattatgatttttgagagtttaggatcgtgattttaagatgtaagagataagttttattttgggttagtcggtgaaatatgttaaaattatataaaataagataagtgttttttaggttaattgtttagggttagttgagtagtatagttagggagagtcgtgggttcgggaaaggtaggcgggagagtttgagtttagttttggtgcgggggtaggatttggatagaggtaaggatatttttggtaggagaaacggtttgtgttaaggagtggagggagaagtgaggatcgttacggggtttggggaagtagttgttatttttttaaagttttttttaatttttagttgttgttattttatttttattttttttatttgtagagaggtaggaatttttcgtagtttttaaattttttttatttttttattgtaaagtggggattaaaatttcgggttttttaggtcgttaggtttaggtatgaagtttggtaaatgttattattattagggtttgaacggtgggggtggagagtggggatagaggagatttgggggaggggaagttaagttttttttttagaaagtgtttggggtgtaggagggtagaattttaggagaaaggaagttagggtttagttaggtttaggggtttaataagtttaaggtagggggatttttagggtagatggggatgaaataggttagagttggatttatagataattattttgttatttttttatttaatttatttattatgtattgagtaattattgtatatttggttttgggttacggattgtgtagtgaaatgggaaaaaatgaaacgtaagtgttattgtttttttatttttgagtaattattgtttgttaggtttagaagaggatatagtttattatttgaatttttttataatttgtagtaattttgtaattttgtagtaattttgtaattttgtaataattaagtgattatttgttttatgttataaaaaaggaaatcgatgtttagagaggttgagtgatttttttaaggtcgtatagatggtaagaagtagcgaaggtagaattagaagttagaggggtttgttttgagtattttgtttttttttttatttttattatattgttttttgtagtttgttttggagttagagagtagagaggaagggagagaggtacgtgaagaatgagggagagggggagaaagaggaggaaggagagaggtcgaggtagagaaagacgtataagagattgttgagagttggaggtcggagttagggaaggtattagaggttcgaggcgggttatgtgtgtgtttggtagcggatgatagggtttaagtgtttttttttagtaggtttagtttttttggggttattatttcgagttttgaggttttgattagattatttgtatattttaggtttggattgtagtgtttgaggagttataagttttgggagggggtggcgtcggggttttggtttcggtggttgtgatagttttatagttttgattttgttgggttgtagttgaggttgatagggttttggggttagtaagtttagttgtgtagcgtcgttaggttttagaggttagacgtttggtcgcgaggtttttttggatatattgtagagatattcgtttttttagtttcgtttatgttttacggggttttcggttttttttagtaaaagtagtaagggagggttgggttggggcgttggtaaggtggtttgttaagtttagaggggggttttttgaggtggaggtagggttttcggtttgggattttgtttgttgttatggcgatggtttaggtagggtttggatttagtattatagcgttttttagtgagagttttattggtttatggggattgaattcgtgattttgtttggtcggtgaattcgtttttttttaggaaattatttattgtgtttatttatggcgtttttttgcggtttcggcgttttttaagatagttcgtgttagacggttagagttttatttaagttcggttgtttagtggttgaggacgttgattttacgtcgttttattagtgtgggaatggttgtatttgtgttggtagttgtatttttttaatgttcgttgtagtagtttagtttgttttttttaaagttttggtttttattcggtagtttagttcgggaagggagtgggttgtttggtgagaggtgtttagatttagtgttttttattttaggttttttttttgattttagggagaattaggtaatatagtaagaataattatattttaaggattggtagtagggcgtaggggtttgttattttagtattttaggaggttaaggtaggaggatcgtttttaggagttttagattagtttggggaatatattgatattttatttttataaaaaaattaattagttagatgtggaggtgtacgtttgtagttttagttatttgggagattgaggtaggagaatcgtttgaatttaggaggtagaagttgtagtgagttgagattttgttattgtattttagtttgggtgatagagtaagattttgttttaaaaataaagtattggtttgagttttaatttaggtttcgtttttttttagttgtgtggttttaggtatgttttttaatttttttgagtttgattttatgttttaagatgatagtttttgggagcggtggtttatatttgtaattttagtattttgggaggtcgaggtaggtagattatttgaggttaggggtttaagattagtttgtttaatatagtgaaattttgtttttattaaaaatatagaaattagtcgtgtttggtggtatgtatttgtaattttagttatttaggaggttgaggtagtagaatcgtttgatttaggtagacggaggttgtagtgagttgagattttattattgtattttagtttgggtgaaaggttaagatttcgttttagttttaaataaaataaaatgatgatagtaagttttgtttttttaattttataggtcgattttaaagagtaagaatgagaatatattttgtaaatagaaattgttttggagataagtaatgttattattgttattagtattatttttgtttttatgtaattgtgggttttgttattgaaagtaatggtaaaaatcgtagttatttttgtattagtttaatagttttggtttttggaggattgattttatttgtttttttttagg

SEQ ID NO: 624 - DNA, 12177 bp, Artificial Sequence
  chemically treated genomic DNA (Homo sapiens)
tttgaaaggaaataggtagagttagttttttaggagttagaattattaggttggtgtaaaagtaattgcgatttttgttattatttttaatggtaaaatttataattatatggaaataagaataatgttgatggtaataatgatattgtttgtttttagagtagtttttgtttataaagtgtgtttttatttttgttttttgaaatcggtttgtgaagttggaagggtagggtttattattattattttgttttgtttgagattgagacggagttttggttttttatttaggttggagtgtagtggtgggattttagtttattgtaattttcgtttgtttgggttaagcgattttgttgttttagttttttgagtagttgggattataggtgtatgttattaagtacggttaatttttgtatttttagtggagatagggttttattatgttgggtaggttggttttgaatttttgattttaagtgatttgtttgtttcggttttttaaagtgttgggattataggtgtgagttatcgtttttagagattattattttaagatatgaaattaggtttagagaggttaagggatatgtttggggttatatagttggaaagagacggggtttggattgaagtttaggttagtgttttatttttgagatagagttttgttttgttatttaggttggagtgtagtagtaagattttagtttattgtaatttttgttttttaggtttaagcgatttttttgttttagttttttaagtagttgggattataggcgtgtatttttatatttggttaattgatttttttgtaaagatggggtgttagtatgttttttaggttggtttggaatttttggaagcgatttttttgttttggttttttaaagtgttaggatgataggtttttgcgttttgttgttagtttttagagtatgattgtttttgttgtgttatttggttttttttggagttagggagagggtttggggtggaagatattgggtttgagtattttttattaggtagtttatttttttttcgagttgagttgtcgggtagaggttagagttttgggaagggtaggttgggttgttatagcgagtattaaggaggtgtagttgttagtataaatgtagttatttttatattgataggacggcgtgaggttagcgtttttagttattgggtagtcgagtttgggtggggttttggtcgtttgatacgggttgttttaggaggcgtcggggtcgtagggggacgttatgaatgagtatagtgaatagttttttaaggaaaagcgaatttatcggttagataggattacgagtttagtttttatggattagtgaagtttttattggggaacgttgtgatgttggatttagattttgtttgagttatcgttatggtaatagatagggttttaaatcgggggttttgtttttattttagaaggtttttttttgagtttgataagttattttgttaacgttttagtttagtttttttttattgtttttgttgaaaggggtcgggagtttcgtggggtatgggcggggttgggggaacgggtgtttttgtaatgtgtttagggaggtttcgcggttagacgtttggtttttgaggtttggcgacgttgtatagttgggtttgttggttttagggttttgttagttttagttgtagtttagtagggttagggttgtggagttgttatagttatcggagttaagatttcggcgttatttttttttagggtttgtggttttttaggtattgtagtttaggtttgaagtgtgtaagtaatttggttagaattttaaggttcggagtggtggttttaggggggttgggtttgttgagaaggagtatttgggttttgttattcgttgttaagtatatatatggttcgtttcgggtttttgatgttttttttggtttcggtttttagtttttaatagttttttatgcgtttttttttgtttcggttttttttttttttttttttttttttttttttttttattttttacgtgtttttttttttttttttttattttttggttttagagtagattgtagggaatagtgtggtggaggtggggggaagagtaaagtgtttagaatagatttttttggtttttaattttgttttcgttgttttttattatttgtgcgattttgggaaagttatttaatttttttgaatatcggtttttttttttgtgatatggggtagataattatttggttgttgtaaggttgtaaggttgttgtaaggttgtaaggttgttgtaagttgtaaaagggtttaagtaataggttatgtttttttttggatttggtagatagtaattgtttaaaaataaaaagatagtggtatttacgttttatttttttttattttattgtatagttcgtggtttagggttaggtatgtagtagttatttaatatatgatgggtgaattaagtagaggggtggtagggtggttgtttgtgaatttagttttaatttgttttatttttatttgttttgggagtttttttgttttgggtttgttgagtttttgggtttggttgaattttgatttttttttttttggggttttgtttttttgtattttaggtattttttggggggaagatttagtttttttttttttagattttttttgtttttattttttatttttatcgtttagattttgatgatggtggtatttgttaaattttatgtttgaatttgacggtttggggagttcgaggttttaatttttattttgtaatgaggaaatggagaaggtttaggggttacgaaggatttttgtttttttgtaagtgagagaggtgagaataaaatgatagtagttggaaattggaaaggattttgaaaaggtaatagttgtttttttaggtttcgtggcgatttttatttttttttttattttttggtataagtcgttttttttgttaggaatgtttttgtttttgtttaagttttattttcgtattagggttgagtttagattttttcgtttgtttttttcgagtttacggttttttttgattgtgttgtttagttggttttaagtagttggtttggagaatatttgttttgttttatgtggttttggtatgttttatcgattagtttagggtggaatttgttttttgtattttagaattacgattttagatttttagggattataatagttttttggtttgggttggatttttttttataaatatttttcgtgttttgtttgtatattttttatgatgggaaaattattatttttaaatgttgttagtattaattgtagatagggttttttttaatcgagaatttgtttttttgtttttttagttttgtttgttagggtttgtagtttggggatttattttttatttatagataggttttttaatatttttttttttttttttttttttttttttttttttttttttttttttttttttttttttttttttttttttttttttttttttgttttttttttttttttttttttttttttttttttttttttttttttttttttttttttaaatatttatttattttttaaatagagacgggggtttttttatgttgtttaggttggttttaaatttttgggtttaagtaatttgtttatgtgggttttttaaagtgttaggattataggtatgagttattgtatttggttttatttatttttttttttaggtttaatttaaatgttatttttgttgggaagtttttttggattttttaaggttttttttggttatttttaatcgagttttgtttgttttttttattattgtatatttatttatatattagttgtttttttattagataaaatatggtgtaagtagtgagagggagtattaaattttagtaatgtgtattaattataaggatttatgagtttaaattagtagattttgaataagagaatagattattttaaaaatgtttatttttacggtttttttatttgatgttttttttttttttagatattatattgttagaagtttttattggttttaggaggtattttaggtagggttgtttttttttattttgtagttagggaaatggagaattagtgagttgaagagtttggtttgggatttttagttgattttaagttatatgtagggttatttgtttgggttttgggttttaggtttaaagagttggaagtagtttgtttgggagcgagtttggggttagtcgattttggtagggggttttgttaaattaaagtttagggggttggtttggggagtagataagattatacgaagttgtttgttgtttgtatgtagaaggttgttaagggtttttaaaaataagttgttttttattgggtgattgtgtttttttttatatagggtatatttgtttttatgtcggggtttcggtagatatatagagcgggatcgatttttaaattagtgttttttggttttggcgattttatcgttatttgggaagtttgaaaagtttgtgtttaggtttttttttaattaaagtaagtagggatttttgggtgggaagtttaatagatagttaggttgaaaatttttgtttttatttaaggacggaaaataataattaaaaaaatatttaaaaagaggtagtggtttatgtttgtaatttaagtattttgggaggcggaggtgggaggattatttgagtttaggaatttagattagtttggataatatagcgagattttgttttaatttaaaaaaaataaaaaaggtaaaaaaataaaaataaaaaaggaaaataaaagaaaaggaaatttttgttttaaattatttttagttttgaaattaggaaaaaaaaaaaaaaaaatttttgatattatttttgggggatggggaagaattatttttgggttaattttttatgtttatttttgaaatagtttgggagttgtgcggtttgttttttttttttgtttttttattttcgtaatagggttttttttttggagtcgttgaatttgtataagtgatatttttttttttgagggagaagttaggtttttttaggatagttaggtgagtggtagtgagtatgtgattgagcgttttattttttgtgttggtttttcgatttttgtagattttagtagtatttttgtgtaaaattttatacgagtttattagtttatatattttttatttggatttagtaagtttagttatttgggatagagttgagattgatttttgtaaagtgtgaggttagttgggcgtttagcggtgttattgaggatataaggagagagttgattttgtttagggtatgtttgttttaaggatttagttttaagtttttttttttttaaatgttgtttgttagtttatttttaatttttttgttttttgatttggggtagagagttggttgatattaattttcggggattgttttagtttgtcggagttttagtttttttgtttgttaagtgatgataataatttttaatttttaaggttttttgatgatgaattgttattttataggtggtggttttatttgggaagaagggtggttgggtgtttgggggttatatttggggaggaggttgagacggattcggggttgttgtttttaggttttggttcgttgtttttgttggggttcgtttgtgggtatttatgttttttggttttatttaggtttagtagcggattttgtataggaagttgtttaattttacggaaatagttgtagtttttgtttaggtttttgattttatttcgtggttttttcgttttttatttagcgtttggtttttatggtaaggaggattttcgaggaaattagattttatttagatttttttattaaatgttttttttttttttatgttcgggagttttttttgttttttttcgttggtcgcggtatagtagttttatagggtatatttttaaattttataattaattgtgtttgggttggggtatatagtagatggtttagtagtgttttaggatttattttagtttttgttttagttatattgtttttgttaggagatagatattttttttagttcgtttttttatgtttgcgtgttatatcgtatatatatttatatatatagatgtatatattttataatatatatagtgatagtttatattagtgttatatttggatgttagatcgtttatgtttatatgtgtatatgtttatatgtttgttaggtggtagatttttgtatatattaaggagtagttttatatattttttttaaatatacgtatatatttgtttaaggatgaatttgtgagtagatatatgtatttttttagaaatttttttttttgtttagtgatatagtcgggtatttgaatatatgtatatttgtgtatgtatatatatatatacgagtatatagtacgtttatttttgtgtgtatgtatatatatatatatatataaatgtatattaggagtttttgtttgttttagtagggagaatatagtagtagttttttaatttgtaaatttatttttagcggagttttgatttttttgacggggggatttcggttttttaggggttaaggaatttgttgaggttatatagtttattgcggttgagttggtattaagtttaggttttttgtttttagggttggtgtgtattttagttgtgtttataggtgtgtagattgtggtgtttttagatttaggggttttcgttgggtttttttttaggatgttttgatttttttatagggcgggtattcgggtatttgagtaggggtttttttagttttcgtagggtagtaaagtttggatgttgggttgggattattttgagtcgagggtgtttttttgataggttttttttgggtacggggttggtttttgggaggggtagtttcgaggatttagtggttgaggggtttttatttgggattttttgtagtttttagggacgaaggttttttttttgagcgtttagttatttggtttaaagggttcgtagttgtgggtagcgttggggataggggcgaggggtttttatttttaggtcgagaggggtggaggatggatagtaggagtaggaggatttcgggtcgcggggtcgtcgtcgttagattcgttatttcggggagaaatgttttagttcgtttttcgtatttcgttttatttttaaagtttaattgttgtttcgtcggttgtgagggaaagagggagggagagagggcgggcgggagggcgggagaggggggaggtttgggggagggggtcgcggggaggggataattacgaaaggttcggtttataagttttttaggttcgggttgttggattgcgagtttttttttttgatatatatacgtatatatatgtatataagtatatatttatatatatatatttttttttatttttttttcgttttttttttgcgattgttttttcgttgttggttttgttttcgttagaaagagcgaggggggtttttgttaggatagttttcgggagaggaagtagaagggagggtttggcggttaggttaaaaattttagttttagttaaggttcgagtggttaggttttcgttttttcggttgggtttcgggtttagtgtgaggatacgggttagttgtttcgcgttttagtttttatttcggttttttagattttttaatatttttaggtttggttagagataggttttgtttaaagttggggaggggaggtattgggtaggtttgggggtttggggggtgcgatgtttatagaggtcggggggttgtaggttgaatggtttggaaggtaggttcgggttggtattgttttgggagggatttggggggaaggtaggggattttggatagggttgtattttgtaggggttaaggtttttgtttagcgtttgaagttggggaggaggtgttgggtgggtttggggtggatgtttgtagatgttagggggttagaggtaggggaatggtttgggagttaaggttatgttggtgttgtttttaggggtatttggagtatatggaggatttcgatatatagggttttattttgtatgggttaaggttatagttttatatttagttttatgtaggtcgtagggtttggtaaaaattaggttggatttttaggtgttttgtgggggaatagggaggtgggagtttttcgtagattgataggtagtttagttttttattattattgggttattttttatttttacgttgagtatagttagcgtttatattagtttgggagtttttcgattgttgttttttcggtttttttgggaaggttgatatttcgttggtggttaggagggggcggtttgtattgaaatagttgggattacgtttttggagaattttgtatttttgtttttaggattgagttggacggggattttgggggattttgggggttggagtgtgggatggaataggggagggtcgtgttttttattttttattttttattattgttagaggagaagaaatgtgagatttagagaataggagagggaaatttgttttttgttttaggttatagttagttagggaatagtatggaagttatacgttttgtgggtttttttttgtattacgatggtttcgagggatgagttaaagattttttgtggaggtaggagtattgtggtagtttggagtgttagtaggggtggtttagcgtggaaaggttaaatgtaggtattggttaaaggtaggtattggtggatttagaagtaaatttttggttttagtttttttggtaggaaaatttttttatagagtattagtttttttatttgtttataggtgattagtatttttagttaagagattattgtaaagataaatataacgtggttttgtatttttgttagattaaaaatgttttgtgtttagttggtgttaggattggtgttaatattatagttgtcgttattcgttttgtaagtattttgtttttaggatagttattaggttttggtttatacggggttattttaggattttggataaatttttttttttttttgggtttttggagggagtagttttggaattttggaaggtaggggtatgttgggagaattgttttgaagatgtacgtatatagttagtgtatagtttttatttacggtgtgtgtttatttgggggtgttttgagggtagttgatggagattatgttggggtgaaagtttttttaagttattttttgttggtggggttaggggttgtttaggggtagggtttgaagttcgatgtttaggatgtgtttgttgtaggggaggggaagttaatggtatatttgcgtgttttcgtttgtttgggaaggaggaaggtaggggttattgtggggagttggattttttttttttcgaggtagtgatacgggtaggaattagtttttagatttgtaaatcgtagtttgtatagagtttttattaattttaggacggggagagagttcggagttagggggagagagtttgtagtggggggatttaggaggggtgtggaggggtatttataggaatagatttgaggtggttggaatagattttttttttgaggtcgggggttttgtgttttgtttttagtttgtgcgttgtttttgtttagtagtttttgtttattgtaggagttttacgaatataatatgtaataagattgtaaaagggggttttaatttataattaaatttattgtattgaatatttatgtcgtgtagtttgatgtataagatatataatgtaagaattagagatgatagttatcggttattatttatttatttatttatttatttgtttatttaagattttattagtatttaaatgtttagtgttatttttttgtttagttgtatgattaaataaggttatatatgtagaattgtttatagagggttatcgggtgtatttggttgtttggtgatcgttggttttgtcgttattattgataagtttttttcgtttgttgtttggtttagtgttattaaggggtaattagatgagttatttatagggtatttttattttttagtttttttgggtgtatttattttggtaggatagagtttttagtttttggatggttttgagaatatcgtgttttgtttagatatttttcgtcgttatttagataaagtttagattttttttttgagacggagtttcgttttgttatttaggttggagtgtagtggcgtgattttcgtttattaaaatttttgttttttaggtttaagtaatttttttgttttagttttcgagtagttgggattataggtattcgttattattgttagttaatttttgtatttttagtaaagatcggattttattatgttggttaggttggttttaaatttttgagtttaggtgattcgttcgtttcggttttttaaaatgttgggattataggtgtgagttatcgtatttagttttttttatgattttaaatttattagtagttatatgaaataaaagaaaatataagtaaaattatttttagtaatatatttaatataatatatttaaagtataatttttttaatatttaattaaaataaaagttattgagatattttgtatttttttttgtattaggttttaaaattggtgtgtattttgtatcgagggtacgttttaatttggatttgttatattttaagtgttttattagttatatgtggttagtagttgttatcggggatagtattggtttagattataaaggattggtgagatgagttagttttagtttttttttggtggtttgtttttttttttgagagggagtttttttttgttatttaggttggagtgtagtggtacgattttggtttattgtaattttcgtttttcgggtttaagtaatttttttgttttagttttttgagtagttgggattataggtacgcgttattacgtttggttaatttttgtatttttagtagagacggggttttttcgttttggttaggttgattttgaatttttgattttaggtgattttttcgtttcgatttttttaagtgttgggattataggcgtgaattattatgtttagttagagttagttttagttttgatgcgtttggaagggaatttgaattttgttatgtagaggtttaaaatgggacggggtttgaggataggggagagggatagagaaggaaggatgtttttggaggttggtaaagggtattcgtgataagtagttttaaaggagtggttttgttttcgtgttggtgattgagttagagagggcggttattttttgtggggtgttcggtagtatcggtttagagttagtattttagttggaaaatgaaagggatttttgtagtttttttttttttagaggttattagggatttttcggatggtcggttaggaaaggaaggggtttggcgtaggtataggtgttagaggtaaagggattgtaatcgaaaatagatcgaatgtttatgggtttgggttatttgttgggtgtttttttattatatagagttagtttaaaagaaggataggttgtgtttcgagggggtgcgttggacgttgtgggagggaggttgaaattttggaattcggtgtttttgtaattttttaggttgggagtgggttcggaagggttagtagtcgttgttgtggttgtgatggggattgatgttgattagtgtatgagtttggttagattatttaataataatgaaggatggtgatattaatagtaattgatttttagaatttttggtttcgttttatgaagataggatttttataattatttaagagtataaatatatttgtaagaatttggtatatagtaagtgtttaaatatgggagggggtttatgatattattttaggttattgattatggttgggtggaggggtaggtatagtagaaagttttatttttgtgagtgttgttttttgtaattttcgggttatgtcgtgtttttttttagtttcgggcgtttgtgtgtttgagttatttgttagtttggatttttggttagtgtgagtcgggggtggggaggtgggtgtttcggacgggttgttttgttttgtgttgtttttatagtgttttacgggttgtttgtt

SEQ ID NO: 625 - DNA, 16891 bp, Artificial Sequence
  chemically treated genomic DNA (Homo sapiens)
  unsure 8209: n is a or g or c or t
ttaaatttttgattttatgtgatttatttattttggttttttaaagtgttgggattataggcgtgagttattatattcggttttttattttttattttttagagataaggttttgttttgttatttaggttggaatatagtgacgtgattatagtttattgtagttttgaatttttgggtttaagtaatttttttgttttagttttttgagtagtcgggattgtaggtttttattattaagtttggtttaaatttgtatttataagaagtttttagaagaaataagattatattttgagtagtaatagtttagggtatgatattttatggtcgagattcgttggtgggtaataaaattaatagatgagtttgtgacgagtagtgaaagaaaatgtaataggttgggggttattggagggtattatagtcgtaaatttatttataggattataaaatgcgtttttattatttgagtttgagttttagggtttgtgttgggacgtgatattagggtcgtaaaggtttgcgaaaatttggtttgggagtgagggtaaataaagaaggaaggggttagtaattaagtttgggggaataaggaggaattagggaggagatagataaggtgattagggaggtgggaggaaagttaggatagaatgttttggaagttaagggaaaaaggtttggattttaattattttttgtttttttttagttttgtggttttgtaaatttgagttttagttttttttatcgtaaaatgttgatatgatagttttagttattgaagtggttgtaaagtggtatttggtatagggttaggtaattttatggatggtggtgtaattttaatttttgttttgttttttgaatttttttagattagtaggttgttttttttttgtgtagatgaagaaattgaggtttagaaagtggaaagatttggttgggtgcggtggtttacgtttgtaattttagtattttgggagggtaaggcgggtggattatttgaggttaggagtttaagattagtttgggtaatatggtgaaatttcgtttttattaaaagtataaaaattagtcgggtgtgatggtgtatgtttttagttattcgggaggttgaggtaggagaattgtttgaatttaggaagcggaagttgtagtgagttaagattatgttattgtattttagtttgggtgatagagtgagattttgttttaaataaataaagattttgtttgatgttatttggttagtgtagggtagagtttgggtattttgtttcgttttgtgggtttggttttgttgttattaatggtttttggttttaggttagtgttggagatagttagtcgtttggtgggtttttgggggtcgtttgaaatttttttagtggttagtggttagggtggacgtgttttgtttttttttgtagttttggtttttttggttagttaggaggaagaaagagtagaaagtgtgtatttgttttttgtggggtttaggtataggggtttggttattagttacgcgtttttcgggcgtgtggatagacggtatttgaatatattcgtattagttaaagtttcggtaggaaatagatggtacgttttagtaggattattagaggagagtttggtgaagggtttgtttatataggtgtggtcggggtgtagggaagttttaagggacggtgtagaattttagggttggtagcggcgtgggttgtgattatttttagtttgaagaggttaggggaggagttgagtttatagttggatagagttgggtggagggggtttttaataggatcgtggtttttagtggagggaggttattagtatgtagtgattttgtagggaaggggttggaagacggatttttttttttttgttttttttgatttttgtaggggtggggaagtggatgtgttttataagagggagagtgtagttgggggatgtagaagatagttattttaaggtttgtgtttagtagggaggttatgtggttattaggttttttcgggtaggagatttagtttaggattggtttttttttttgggaattaatgataaggtttatttttttgggtttttatgatttttatttttgttttgatttttagggttttttatgtttttagtaaatttattttaagagttgaaaggttttgggttttgtgttggggatatagtagtgtaaagggtgttaaagtttttgtttttatggggtttttaattaagtagagagatatatgtagatggttgtatataggtttaggtgtgatagggaaggttaggatgttgtgggagttagaggtgattttcgttttattttttattcgcggtggttttaatttttttttttttttatgaggtgtttggggtcggggttttagttttttttggagtttatttggagttttttttattttttagagaatttattgggttttgtttataacgtggatggggatagattgtgtagcgtggagggaaggggagggagggagttttgggaagagttttttgtggggtttttgttattgttttagatgtttttaatattttgtgatatttgtagtttttgttatatttgttttttattttaaatttagtttaggggatggtggtagggaaggaggtgagtttggatttaggtagttttggggttattattttttagttggggttttttttttgtaaagtggaggtataacggtatttattttttggggtggttgtgaggatttagagttgataaggtgaacgtttagggcgggttttggtgtagagagagcgtttagtttttagggttggattaattgtttttggggtatagatttcggtttggggtttgtggaaattttagagttatttttgaatttttatcgagttattttttgtttcgtagtgtttatggttttgttttcgaggttataggaaaaggtagaggagatgttttttttagggtggttttttgggagaggatatttttttttgattttaaagttacgtttggttgtaaattggttaggtagttataaggttgggtaagtaaaattatttttaatttttatttaaagagttatatcgatttttttagtcgttgtgatagtttttgtagagataaatatacggtttatttttgttattcgggtcggttaataagtacggagaggtaaggttttagattttggatagatattttttttttagaggtatttagggttttagtttttttttttttttttgggttttaatttttttatttgtgatttagggtaggtggatttagggagaagaattttttggttttattttatcgtgggttttgttagtatatataaagatttggttttttaaagtttagttttgttagcgtttttttgtttaagaattttttatgatttttagtggttttaaggataaagttttggtatttgaggtttttttaatgtagggttagattttgtttttttagttttttgtttttattatatttttgttggttttacggtggttcgattgttttttgtttttgtgtttttgtttagtttggtatttttgtttggtatgttttttttatttttttttttttttaattttaatttatttagttttttaaagggtaggtttaaatattaggttttttaggtggtttaggattttttttttgagtttttatgggtttggttttgggtgttatttgtgagtagttttacggtgggtatatagtaggtgcgtttattgtttgtagaatgaatatgggatagtttggggattgttatttagtttagggagtattgatggggaagtattttttgtatgttttagggtttagtgttgtagtgttttgatttttagaaattttataatggtttggttaggaaggtatcgtgttttattttgtaaatagggggtgttgagaattgaggggttttgtttaaggttttatggttaggagtaagtagaatcggatttgaatttagggttacgtgattttagaagtgttattaaagtttttataatttggagttgttttttttttttttttttttttttttttttgagatcgagttttattttgttatttaggttaggagtgtagtggtttgattttagtttattgtaattttcgttttttaggtttaagtgattttttagttttagttttttaagtagttgggattataggcgtacgttattatgtttagttaatttttgtatttttagtagagatgggtttttattatgttggttaggttggtttcgaatttttgattttaagtgattcgtttgtttcggttttttaaagtgttgggattataggtttgagttattatattcggtttggagttgtgttttgtcggtgaaggattttttatttatgaaggggttagacgtgaagtgtgtggttttgggtagtttttttgagtttagagacgttagttttagtcgttttgttgtgttattttgggatttttttttttagtttgagttttagtttttttgtttgttaggtagttttatgttaattgtatttagtaggtcgggtttgatgttcgataagacgtgaagtggtggaggtgggtaggattttagcgttattatttttttgaattagtgattttaatatatcggatttttgtttttttatttgtaaaatgggattagtgagtttaggtgggttataaattttataggaattattttagttaagatcggttttttgaaagtttttttcggtgggttgttagggtgattgtttttatttgtggggttttttgatgcgttttatttattagttttggagagggtgggatgggagggtggggtgtttggggagataagtttagagtttggggttttttattttattgtttttttttattatagggttttttatttagtgataaagttcgtggtattttttttattcggttggtaggcggtttggtttagttttttttttaaggaagcgtattttttgtttttttgggtcggtcgggttggatgagttaggagttttttgttgtcggttatattatagtttttatttgcgttttggggttaggattgttgttgttattgttatttattggagtttagtatttttttttcgtttatttttcggatagtaattttagtttagtttcgcgtttttgtgtttattttttttgatttttcggtcgttattttagaaggttggagtagggacgtcgtcgtttcggtcgtttgtttttttcgggttttcgtgcgagtttacgtcggtttcggtgttcgttcgtagttttgttattggatataggataaggtttagcgtataggtttttacgtggatagtatggatcgcggtacgttttttttggttgttgttttgttgttggttagttgtagttttagttttataagtaggtgtttagggatttagggtggggagattcggttttcggtgtacggattaggttttaagtattttcggttttttttttgtattttgagtttacgtttagtagagttatttttggggttttggagggttattaatttttttagtttgttggaattaaatggttatgtaggatttttagtgttgaaagaaagtttcgggtaaattgggttgatttttttattttaattttggtttttggcgtttgtttatttagttgcgttttattatttttcgggaagtttaggttttagaatgttgtgtagcgacgggagagttttttggtttttttgggttttgagtttttttatgaggaatggatgggaaggagggtttatagtttgggttttgagtatcgtttttgggtttaaattttatataggtatttttttgtggtgtgattttgggggattgttttcgggtttttgagcgaagtggggaagagaatagattttttttttagagttgttgaggaggtgggtggtgagggattattgtagagagggttttggtagattggttatttttgtgttgttttatttttagttttaagtttttttagtttattttttttagggtttttgggtagttttttaaattttttgaataggttaaggttgtagggttttgttttgttttttttttatttttttgatttttagaaagggtgtaggagtgggtgtaggttaggttaggggttttgtggggttttttggtttgggggtttttttaaggggttatggtttttgttgttttttgaaattgattagaggaggggcggtgaggagtaagggatttttagttttatgttttattttttatttttcggttattttaagtcgttggtcggttttgtggatattttttgatttatttgtgtatttaggggttttttgatagatttgggggaagaggggtagaaatgagttgagagtgtggggaggaaggggaaggaaaatagcggtggggtagttaatttttttttatttttttatttgatggtattttagagtttttgattttgggtttttaaagttttgtttattatttgattgataggaaattgagttttagatatattaagtgatttagtagggatttgattttcggtttgcggttttttaaatgtttgtttttagtaaggtgtgatagggcgaatttttttaatgcggtttataacgattttgtaagatggttgttattattatttttattttatagaagagaaaagggaggttttaatttgttaagtttatatggttaagacggagtttttatttgagttttaagatttttttttttcgtatttgtcgttgtagtaatatttttttttttttggtcgttagagaaaggtttatgtagatatttagggtttggttttaaaggattaaaggtagtgatatgttgttgaataattaataacggggtggggagtttaatttgtagcgtttgtggatttttatagcgtaagtatttttattcggttgattttaagttattaatttattaagtttggagttgggaattagtgttcggtagtatttggcggttggttttttagagtttttgtaggcgtagattatatcgagagtagagatgatagttaggggtgtaaaacgattagaaagaaatgagtttggatatttatgattttttaaaaatatatagtaatagttatgtaatagttagttggaaaaatttttggaaacgtattcgtttgtttttgtgagtaggtaggagttggttttagtgtattaggagttataggtttaaaggtataatagattattaatttaatttatttatggtttgggaagttgaggtttatggaaggtagaggggagtttggggttagggtttggaagttagttgggggtaggggtcggagtgattttgattttttagaaatgggtttagaatttgggggtattatttgtaagaattttttaaaattgtattttgtatgtgatttgatatttttataaattagtttttagtagttagttttttaaagttattcgtttaattttgtaaagatgcgtggttcgtgggtatttgtaataaaaattcgataattggaaattatttaagtgtttatgagtaaagattgttaataaattattatacgacggaatgttatgtagtaggtattaagaaggtagagttatatgaatattgttatggacggatgttagggatatattgttaggtgtttaaataataataattttattttggtaataataaaatagtaataatgtataatatgtatagagaaaattttggaatagagttttttatttaatttattattattgttttttggtttggggttttttttgtgggatttttatttttttttttaaatttttttgagatagttttgtttttgttatttaggttgtagtgtaatggtataatttaggttcgttgtaattttcgtttttcgggtttaagtagtttttttgttttattttttcgagtagttgggattataggcgtcggttttatattcgtttaatttttgtatttttagtagagacggggttttattatgttggttaggttggtttcgaatttttgatttcgtgatacgtttgttttagttttttaaagtgttgggattataggtgtgagttattatgtttggttgggattttgatttttttagatatatttttttgttatgttgggttttttcggtttattttggttaaagataatcgttttaaaaaataaataaaaataaaatanataaagtatgtttaaagattaggaatatttcgttaaataattataatttagagttttaatagtattaaatttagatttttgttatttttatacgtattttgataatagttaatagttagtgtgtaatttttcgtagtgtttgtataatgtgtttaatagtttatttgttgaaatttgtatgtaatttaggattgtatatcgtatttggatgtgatgtttattagattttatttatttatttatttatatttttgatgcgatagtttcgttttgttatttaggttggagtgcggtggtgtaattttagtttattgtaatttttatttagtaggtttaagtgatttatgtgttttagtattttaagtagttgggattatagacgcgcgttattaggtttaattttcgtatttttagtatagacggggttttattatgttgtataggttgttttagaatttttggcgttaggtgatttgtttgcgttggtttttagaagtgttgggattataggtatgagttattgattaaaaatataaaaattagttaggcgtagtggtgggcgtttgtaattttagttatttgggaggttgaggtaggagaatcgtttgattttgggaggtggaggttgtgatgagtcgagattaagttatcgtattttagtttaggtgatagagtaatattttgtattaaaaaagaaaaaaaaagaataagtatgtagagatttttttaaagtaattaaaattaattatatagttgttttagtttgttttttaaaaaaaatagagaaaagggaaaaaattatttcggaatttttttattgatataggtatcgttagtatggtggtagatggtttattagtttttttttttaattttttaagttatttttaatttagatgggtttatattttgggagttttttgtttatttttttcgaattaggtttttatgttgttttgtggattttatgattatttttttgtatttttggaatattttgttttattaatttgttatcgtttgtttattgttaaatatttaggtggttttttttttgttttagttataaatattattataatgtatagttttggtacgtgtatttttttttgtattttggattattttatgtggattgcgtttcggtagtaaggttgtagcggttcgtggtttgtgttgggtggttgggattgaagagtgtttttgagtgtggaggattttttgttggaggatttaaagtttttatgttgttggttgtttgtgttggagtttgggatttgttggagaagggttagtggcgtaagagcgagattataaatatttgttttttagaggttgcgtttttatttgttaggaggaaaaagagtttggagtaggagtcgtgtgaattaggagagggtgggtttttcgagatacgggggacgtgattattagtatttttttttattttagttagatagacgtgatttagagggatagagggatttgtttgtggttacggatgtgttggtgttgggttttcgggcgatagatttatttttttgttttagggttggaggtggatttgggtaagagtgaggcggttattttttttttgtttttagtatgttaggtataatgttagtttttttttgtttttatttttagtttatagatgagaaaattgaggtttgggataaatgataggtttagattttaattttaggtcgtttgtttttaaatttagttttttttttttataatttttgtgatttgaatgttggagatttaaagaattgtttatttttggttttgggattttgttttttagttttagtttaggttttggggtattagttttggaggttgaagggatttttagttagggtttagttggttttaatttttgtggtaggagtgggggtgggataaagagataatataataattgatatttatttagtatttatagtatgttagacgttgttttaagcgtggtatgtgtattgttagatttaacgtttgtaaaagttttataaaggagatattttttttgtttttatttgatagatggggagattgaggtattcgtataatttagttaggtgaagaaatttatttaagtaatattgttttgaaatgagttattggggtttaagttttgggtttaagtattgtagtgtgttgttatagtggagaggatggggattttttttttgtttgatttttttttcgtaggtatttagttttttttttggtttttataacggtttttttattcggggtataatttttgggattttgtttttatttttagtagttttatttatgttttgttttgttttttttttgtttttatttttaggtgaaattttagattgttagatttttagtagaatttagaatatgttttatttattttcgtttttttttatttattagttatagggaaatagagttttagaatggtggggggatttgatgtgggttatttagtaggttagaggtagttttgattagttagttttataaatggatgtttgtggtgttagaaataaaatgtttgttttttagtgtcgtaaagaaatagtatttgaatataaatttaatttttttagtaaggtaatttttatttttatagaagggtgcgatttaagaatggagtaatggcgagagtatatttgaataagggaggggaaggggtttttatttttgacgtaggtagtttttattgttacgtcgtttttttacgggttagtgttggatcgtatagtttaagttaattttagttagttattttagagagagtaggggtatgagttagagtggcggggtgagtagtttggcgggaaggatggttaggaataggtaattaaaggtgatttaggttaaagtaggtgattaggggtttgtgaggttaaagtatatgattaggatgagttaggatggagtaggtgattaggggaatagatgtgaattattgattaaaattggtggaaaaggttgtttattgaaattatgaggaagttaaattttaaaatggaggataaagaattgaatatattgatatattgattttttgaagagaaatttagaatttattgtatttagtggaagtggatgtttgttttgagttttggattaattgattgggatatggaatgttgtggattttttttgttttggaaaaatttattgtttgttgggagtgtagatatattgataaattaaaatagtatatttgggtatgtatggtttggttttttaaggatatttaaggacggatgtatttaagaaaggagggattggttttagtgagatttttaggatagggttttgaaggatgaatagaagtttgttaggggttgggtatggtggtttatgtttgtaattttaacgttttgggaggttaaggtgggaggattatttgcggttaggtatttaagattagtttgggtaatatagtaagattttttttttataaatatttttaaaatttagttgggtataatgatttatatttgtagttgttcgggaggttgaggtagaggattgtttgaggttaggaggtggaggttgtagtgagttatgattgtattattgtattttagtttgggaaatagagtaagatttcgattttttaaaattaaaaaaaaaaggttaggtggttaaataaaggatgagtgttggtttgggaaagggtatggtagaggtaggagcgaggtgtgtttaggggaagagtttatatatttttattgattgggtataaataattgtgatagtagttattagtttttgagtaatttttatttagtaggagtcggtttagcgttgtgtaggtgtaatttattggtttgtttgtcgattttatgggaagttgttatgatgatttttatttttatgttatagatgagaatattgaggatggaaaggtagttggtaggtggaagaattaggatttgaatttttggtatttgttaaatcgttgtgttttttatttttattgtaggttgtagtgtaggaatttgattttgtaggtatcgtagaattaggggggagttcggggttaaggtatgttgagattttttggtggttgggggtagtggttgggttggatgttgggaaatttgtgaggttgtaattgggtttgaaaagggtaaagagtggttcgggggtattgaataagacggggtaggtattgtagtaagaaggatttttgttgaaacgtattttttttgggaggttgagatgggtggattgtttgagtttaggagtttgagattagtttgcgtaatacggcgaaatttcgtttttataaaaaatataaaaattagttgagtgtggtggtttatttgtagttatttaggaggttgaggtatgagaatcgtttgaatttgggacggggaggttatagtgagtcgagatcgagatattgtattttggtttgggtgatagagtgagattttattttagaaaagaaaagggggggtggtagcgggaagaaaagtatttgttttagtatgatgaaataatatttatagtttttgtgtttggggtatttatttagtattaggtatttaataggggttattttattaaattgatatatttagtttgtgaatgtttgttgtttgttggagttagattgtttgggtttaaatttaggtcgtgatatttagtagttgggttatttcgggtagttggtttttagtttttttaatcgttttggtttttagttttttggagtgtgtatgggtgtaatagcgtcgtttattttataaggttgttgtgaggattaaatgagtttattcgtgtaaagttgtttaggtttttagtaagtatgatgggagtatttgtagtgattattggtggtttgtaaatggggaaattgaggtttagagaggttaggtttttgtttaaggtgattagtattttaagaggtagagttgggatttgatttaggttatttggttttagagttgttttttttgattattttttaaggtgttgaaggtagttttttggaaatttgggaggtgttgtgtgtatatgggtggcgagggtggagaggggatagtggtgggaggtggtttttgggttttttatttggggttttagttatttaggtttttagcggttttttttttgatttagtttcgggaggttttggcgttttttttggtgttaggggattgtttttaatttggtttgggttcgttttaggtttcgggagataggtttaggcgttatatttttttttgtttttttattttcgtttgcggggtgggggcggttaggattcgaaaaggttttaaaataaatggattttttatttgattttttcgttaggtttgttatttgattattatataatggttaggtttgtggtttttttcgttggttgacggtatggaggaggcggttttaggcggttttagtaattcgggaggaattggggtttttggaagtttggggagggggtagggaaagttttaaagggaaggagggaggcgttgcgataatttgtaggttagatattgggttatgttgggagacgcgggttcgaggttcggtttggttaattatgtgttgtgagattttgatttgtttcgtttttttagattttagtttttttatttgagtaggaggggtttaagttaggtaatagttaaggaatttgcgtttatcgatgaggaaaggagagggtggggagaatatgggggttggtgggttagagggattggagataggagatggtattagtttttgattttgttggggtgagggagattttagtgatttttttattttagaggatcgttatttggaggttattttatttcgttattttattttattttttagaatagttaattttatagtgattgaagttagttaaataattgtaattaagagaaagttgtcggttaggtatgttggtttatttatggtggtttatatttgtaattttagtattttgggaggttgaggcgggaggattgtttgagtttaggagtttgagattagtttgagtaatatagtgagatttagtttttattgaaaatttaaaaaattagttaggcgtggtggcgtataattgtagttttaattatttgggaggttgaggtaggaggatcgtttgaatttagtagtttaaggttgtagtgagttgttattatattattgtattttagtttaggagatagagggtaattttgtttgaaaaataaataaatagaaatttaagaaagaattgttatgtgtttagttttatggagtttttttagttatttttgtggattatgtgggttttgttgttattttatagattaggtattgaagttttaagaggtgaaattatttattagagttatatagttggtaagtattgggtttgagaggtaaattaggttagtttggttttagggagtttgtttttaattaaaatgttattatgtttaggtattttagagtttttgggatatgtaggatagggttagagagacgatatataaggtttgggttttcgtggtagttagaagtttttatttagatttttttttttttaagatagagttgggaatggcgttgttatggtaaggggtgattattttattttttttgttgatttttggggtttagagtttaacgtgttgtgggaaggtgaggaaggaggtcggtgaggttttagatagtttagggtttagaagaagtttttttgtttttttttttgagtcggttttggttggatatgaagttagttttttcgcgtttatttttgatttttaagaaaataggaagtgagcgcgataagatggagatataaatttttaaatagtttttttttttgttttttttttttttttcggagtttttttttttcggtatattttttaggacgaggtgtaggagttttattttttttttcgattttgttgggttagggtgaaattttattttttttttttaggatttgtgttttcgggttttgcggtttgttttggtagtttttaaatttgggtcgttttttcggttcgttttgttttttggggttagggaatttttaatttttttagattattttttttattattttgaggtaagagaggggaagttttgttttttgagtttagtttttgttttatttggagggagatttgggtttatatttaggttttgttatgaagttagggttgttagatatattaaatgaaaattagtcgggtgtggtggtttatgtttgtaattttaatattttgggaggtcgaggtgggaggattttttgagtttaggagtttaatattagtttgagtaatatggtgaaattttatttttataaaaatgtaaaaattagttggatgtggtggtgtatgtttatagttttagttatttaggaggtcgaggtgggaggattatttgagtttgggaggttgaggttgaggttgtagtgagttatgattttgttattgtattttagtttgagtaatagagtagagtttgttttaaaaaaataaaaaataggttaggcgtagtggtttatgtttgtaattttagtattttgggaggttaaggtaggcggattatttgaggttgggagtttaagacgagtttgattaatatggagaagttttatttttattaaaaatataaaaaattagttaggtatggtggtgtatgtttgtaattttagttgttcgggaggttgaggtaggagaattatttgaatttaggaggtagaggttgtagtaagtcgagattatattgttgtattttagtttgggtaataagagtaaaatttcgttttaaaaaaataaaataaaataaataataaaaaataatttttaaaaataaataaaaaataaaaatataggaggttggtcgggtacggtggtttacgtttgtaattttagtattttgggaggtcgaagtgggtagattatttgaggttaggagttcgagattaatttgagtaatatggagaaattttatcgttattaaaaatataaaattagttgggtgtggtggtgtatgtttataattttagttatttgggaggttgaggtaggagaattatttgaatttaggaggcggaggttgcggtgagttaagattatattattgtattttagtttgggtaagaagagtaaaattttattttaaaaaaaaaaaaaaaaaaaaaaaaaaaaaaaaatatatatatatatatatatgtatgtggatgtgtgggtgtatatatgtatatttatatatgtatatatgtatgtatatatgtagatttatgtatatgtgtgtgtatgtatatatatatatatatatatatatatggggtttagtgaaattcgaattttagataaataatgaaaaatttagtataagtacgttttatgtaatatttgtaatatattaatatttaaaaaaatgtatttattgtttatttgaaatttaaatttagttgggtgtttttttatttatcgattttatacgtagtagcgttgtgattttgggtaggagacgtttttttttttagttttggttttttttaatttatggaacgaatataatgatatttattttataaggtggttgtgatgatgtaggaaagtcgttagtttatgttaagtttttaggagacgtttggaaagtaggagttattgttattattttatttttatttggttttttttcggatgtttttttaatagg

SEQ ID NO: 626 - DNA, 16891 bp, Artificial Sequence
  chemically treated genomic DNA (Homo sapiens)
  unsure 8683: n is a or g or c or t
tttgttggagaaatattcggaaagaggttaggtgagaataaggtgatgataatgatttttattttttaaacgttttttagggatttgatatgagttaacggtttttttgtattattatagttattttatgaggtggatattattatattcgttttatggattaaaaaaaattaaggttaggagaggaaacgttttttgtttaaggttatagcgttattacgtatagggtcgatgaatagaaggatatttagttaaatttaaattttagataaataatgagtgtatttttttaagtattagtatattgtaaatattgtatggaacgtatttatattaaattttttattgtttatttgaaattcggattttattgggttttatgtatatatgtgtgtgtgtatatatatatatatatatatatatatagatttatatatatatatatatatatatatatatagatatatatatatatatttatatatttatatatatatatatatatatatatatttttttttttttttttttttttttttttttttgagatggagttttgttttttttgtttaggttggagtgtaatggtgtgattttggtttatcgtaattttcgttttttgggtttaaatgatttttttgttttagttttttaagtagttgggattataggtatgtattattatatttagttaattttgtatttttagtagcgatggggtttttttatgttgtttaggttggtttcgaatttttggttttaggtgatttgtttatttcggttttttaaagtgttgggattataggcgtgagttatcgtgttcggttagttttttatatttttattttttatttatttttaaaaattattttttattatttattttattttatttttttgagacggagttttgtttttgttgtttaggttggagtgtaatagtgtgatttcgatttattgtaatttttgttttttgggtttaagtgatttttttgttttagtttttcgagtagttaggattataggtatgtattattatgtttggttaattttttgtatttttagtaaagatggggtttttttatgttggttaggttcgttttgaatttttaattttaggtgattcgtttgttttggttttttaaagtgttaggattataggtatgagttattgcgtttggtttattttttatttttttgagatagattttgttttgttgtttaggttggagtgtagtggtaaaattatagtttattgtagttttagttttaattttttaggtttaagtgatttttttatttcggttttttgagtagttggaattataggtatgtattattatatttagttaatttttgtatttttatagagatgaggttttattatgttgtttaagttggtattgaatttttggatttaagagatttttttatttcggttttttaaagtgttgggattataggtatgagttattatattcggttgatttttatttgatgtatttggtaattttaattttatggtagggtttaggtgtgaatttaagtttttttttaggtaaggtaggagttgagtttaggagataaagtttttttttttttgttttaaggtggtgggaggaatggtttgaaggggttgagagttttttagttttaagggatagggcgagtcgagaaggcggtttaggtttggaggttgttagagtagatcgtagagttcggaaatataggttttgagggaaaggaatggaattttattttgatttagtagggtcggaaaaggaaatgaggtttttatatttcgttttgaggaatgtgtcgggggaagggggtttcggaggagggaaggaggatagaaggggagattgtttggaagtttgtgtttttattttgtcgcgtttattttttgtttttttggagattaaagatgggcgcggagagattggttttatgtttagttaaggtcggtttagaggagggggtagggaggttttttttgaattttgggttgtttggagttttatcggtttttttttttatttttttatagtacgttgggttttgggttttagaagttagtaaaggaagtgagatggttattttttgttatggtaacgttatttttagttttgttttgggaaggagaagatttggatgaggatttttggttgttacgggggtttaggttttatatgtcgtttttttgattttattttatatgttttagggattttggagtgtttggatatagtggtattttggttaaaagtaagttttttggagttaggttgatttggtttgttttttaggtttaatgtttattagttatgtggttttggtgaatgattttattttttggggttttaatatttggtttataaaatgataatagagtttatatgatttatagaggtggttgggaggattttatgagattgggtatatggtaatttttttttaaatttttatttgtttattttttagataaggttgttttttgttttttgggttggagtgtagtggtgtgataatagtttattgtagttttgagttgttgggtttaagcgatttttttgttttagttttttaagtagttgggattatagttgtgcgttattacgtttggttaattttttaaatttttagtagagattgggttttattatgttgtttaggttggttttaaatttttgagtttaagtagttttttcgttttagttttttaaagtgttaggattataggtgtgagttattatgagtgagttagtatgtttggtcggtagtttttttttaattataattatttgattgattttagttattgtagaattgattgttttaaggggtggggtgaagtggcgggatggggtggtttttaggtgacggttttttgggatggagaggttattgggattttttttattttaataaaattaagggttggtgttattttttgtttttagtttttttgatttattagtttttatgttttttttatttttttttttttttatcggtgagcgtaggttttttggttgttatttagtttaagttttttttatttagatggggagattgaggtttggagggacgggataggttaaagttttatagtatatggttgattaggtcgggtttcggattcgcgttttttaatatgatttagtgtttggtttgtagattatcgtagcgtttttttttttttttttgggattttttttgttttttttttagatttttaggaattttagtttttttcggattgttggggtcgtttggggtcgttttttttatgtcgttagttagcgggagaggttataagtttggttattatgtaatgattagataataggtttggcggggagattagataagaggtttatttattttggggttttttcgaattttggtcgtttttatttcgtagacgagaatggggagataggagggagtgtgacgtttgggtttgtttttcggagtttgaggcgggtttagattaagttgaaaataattttttggtattaagggaaacgttagggtttttcgggattgggttagaggaggagtcgttgggggtttgggtgattggaattttaagtgagagatttagaagttattttttattattgttttttttttattttcgttatttatgtgtatatagtattttttagatttttagagggttatttttagtattttggaggatgattaagaaaaatagttttggagttagatggtttggattaaattttagttttgttttttaaaatgttggttattttgagtagaagtttaatttttttgagttttagtttttttatttgtagattattaataattattgtagatgtttttattatgtttattgggagtttaggtagttttatacgagtgaatttatttgatttttatagtagttttgtgaggtgggcggcgttattatatttatgtatattttaggaaattgaagattagggcggttaaagaaattgaagattagttgttcgaggtgatttagttattaagtgttacggtttggatttaaatttagatagtttggttttagtaagtagtaggtatttataggttgagtgtgttagtttgatggggtaatttttgttgagtgtttggtattaagtaggtgttttagatatagaagttgtgaatattattttattatattaggatagatattttttttttcgttgttattttttttttttttttttgagatagagttttattttgttatttaggttagagtatagtgtttcgatttcggtttattataattttttcgttttaggtttaagcgatttttatgttttagttttttgagtaattataagtggattattatatttagttaatttttgtattttttgtagagacggggtttcgtcgtattgcgtaggttggttttaaatttttgggtttaagtaatttatttattttagttttttaaggaagatacgttttaataagggttttttttgttgtaatgtttgtttcgttttgtttagtattttcgggttattttttattttttttaggtttaattatagttttataggttttttagtatttagtttagttattgtttttagttattaggaggttttagtatgttttggtttcgggtttttttttggttttacgatgtttgtagggttaagtttttgtattgtagtttatagtagaggtgaaaagtatagcgatttgatagatgttaaaggtttaggttttgatttttttatttgttagttgtttttttatttttagtgtttttatttgtaatatggggatgagggttattataatagttttttatggagtcggtaagtaggttagtaaattatatttgtatagcgttaggtcggtttttgttaagtgggggttgtttaggaattggtgattattattataattatttatgtttagttagtggggatatgtgggttttttttttaaatatatttcgtttttgtttttgttatgtttttttttagattaatatttattttttgtttgattatttggttttttttttttaattttggagagtcggggttttgttttgttttttaggttggagtgtagtggtgtaattatagtttattgtaatttttattttttggttttaagtaattttttgttttagtttttcgagtagttataggtatgagttattatgtttaattaaattttaaaaatatttgtggagaaagagttttgttatgttgtttaggttggttttgaatgtttggtcgtaagtgatttttttattttagttttttaaaacgttgggattataggtatgagttattatgtttagtttttagtaaatttttatttattttttaaaattttgttttgaaaattttattgaagttagtttttttttttttaggtgtattcgtttttgggtgtttttggagaattagattatatatgtttaggtgtgttgttttgatttgttagtgtgtttgtatttttagtagatagtgagtttttttaggataaggagagtttatagtattttatgttttaattagttagtttagggtttagagtaaatatttatttttattggatatagtgagttttagatttttttttaaagaattagtatgttagtatgtttagttttttgttttttattttaaagtttaatttttttatggttttagtaaataattttttttattagttttaattagtagtttatatttgtttttttggttatttgttttattttgatttattttggttatgtgttttgattttataaatttttggttatttgttttgatttaagttatttttagttatttgtttttaattatttttttcgttaaattatttatttcgttattttggtttatatttttgttttttttaaaatagttaattggaattagtttagattgtgcggtttaatattagttcgtaggggaacgacgtagtagtaggggttatttgcgttaggagtaagaattttttttttttttttgtttagatgtgttttcgttattattttatttttgaatcgtatttttttgtagaagtaaaaattgttttgttgagaagattaaatttatgtttaagtgttatttttttgcggtattgaggaataagtattttgtttttaatattataaatatttatttgtggaattggttggttagggttgtttttgatttgttgggtgatttatattaagtttttttattattttgggattttgtttttttatggttagtgggtggggaagagcgggggtggataggatatattttaagttttattaggggtttgatagtttgagattttatttaaggatgaaggtaggaggaagatagagtagggtatagatggggttgttgaaggtaaaggtagggttttaggggttgtatttcggatgggagggtcgttatggggattagagaaaaggttgagtgtttgcggggagaagattaggtaagaggaagatttttattttttttattgtggtagtatattgtagtgtttaggtttagggtttgagttttagtggtttattttagggtagtgttatttgggtaaatttttttatttgattgagttatacgagtattttagtttttttatttgttaaatgggggtagaaagagtattttttttgtagggtttttgtaagcgttaagtttgatagtatatatattacgtttagagtagcgtttagtatattgtaagtgttgaataaatgttagttgttatattatttttttattttatttttatttttgttataggggttgaagttagttgaattttggttgagggtttttttagtttttaaggttggtgttttaaagtttgggttggaattaggaagtagggttttagagttaagggtaaatagttttttaggtttttagtatttaggttataaaagttgtggggaaaagaagttgaatttggaagtagacggtttggagttgaaatttggatttgttatttgttttaagttttaatttttttatttataaattggggatagaggtaaggaggagttggtattatgtttgatatgttggggatagaggagaggtggtcgttttatttttgtttagatttatttttagttttggggtaaaagaatgggtttgtcgttcgagggtttagtattaatatattcgtgattataagtaagtttttttgtttttttgggttacgtttgtttggttggggtgagggagaatgttaatggttacgtttttcgtgtttcggggagtttatttttttttggtttatacggtttttgttttaggttttttttttttttagtaaatgggaacgtagtttttaagagataggtgtttgtggtttcgtttttgcgttattgatttttttttagtaagttttagattttaatatagatagttagtagtatggggattttaagttttttagtaaaggattttttatatttaggaatattttttaattttagttatttagtataggttacgagtcgttgtagttttgttgtcgggacgtaatttatatgaaataatttaaaatataggaaaaggtgtacgtattaaaattgtgtattgtggtagtatttataattagaataaaggggaaattatttaaatatttaataataagtaaacggtgataagttgatgggatagaatattttagaagtgtaagaggatggttatggagtttataggataatatggagatttggttcgaaagaaatagataaaagatttttaaaatgtggatttatttggattaaaagtagtttaaaaagttagaaaaaaaaattagtaagttatttattattatattaacggtatttgtattaataaaggagtttcgaggtgatttttttttttttttttattttttttgaggggtaagttgaggtagttatatggttaattttaattgttttaaaaaaatttttatatgtttgtttttttttttttttttttgatataaagtgttgttttgttatttaggttggagtgcggtggtttgatttcggtttattataatttttattttttagggttaagcgatttttttgttttagttttttaagtagttgggattataggcgtttattattacgtttggttaatttttgtatttttagttaatgatttatgtttgtaattttagtatttttggaggttaacgtaggtagattatttgacgttaggagttttagagtagtttgtgtaatatgatgaaatttcgtttgtattgaaaatacgaaaattaggtttggtggcgcgcgtttgtagttttagttatttgggatgttgaggtatatgaattatttgagtttgttaggtggaagttgtagtgagttgaaattgtattatcgtattttagtttgggtgatagagcgagattgtcgtattagaaatataaataaataaataaataagatttgatgagtattatatttaaatgcgatgtgtagttttggattgtatgtaagttttaatagatgagttattagatatattgtgtagatattgcggaaaattgtatattggttattagttattattagagtgcgtgtgagagtggtaagagtttgaatttagtgttattgaaattttgaattgtggttatttagcgaaatgtttttaatttttgggtatattttatntattttatttttatttattttttgagacggttgtttttaattaaaataaatcgaaaaaatttaatatgataggaaagtgtgtttgagaaagttaaagttttagttaggtatggtggtttatatttgtaattttagtattttgggaggttgaggtaggcgtattacgaggttaagagttcgaggttagtttggttaatatggtgaaatttcgtttttattaaaaatataaaaattaggcgggtgtggggtcggcgtttgtagttttagttattcgagaggatgaggtaggagaattgtttgaattcgggagacggaggttgtagcgagtttagattgtgttattgtattgtagtttgggtgataagagtaagattgttttaaaaaaatttaaaaaagaaagtgaaagttttatagagaaaattttagattagagaatagtaatagtgggttaaatagaaaattttattttagaattttttttgtgtatattgtatattattattattttattgttgttaaaatggaattattgttgtttgggtatttaatagtgtgtttttgatattcgtttatggtagtgtttatatgattttgtttttttggtgtttgttgtatgatatttcgtcgtgtggtaatttattaatagtttttgtttatggatatttagatgatttttagttatcgggtttttgttataggtatttacggattacgtatttttatagagttggacgaataattttagaaggttgattattgaaggttgatttgtgagggtattaagttatatgtaaggtatagttttaggagatttttataagtggtgtttttaaattttagatttatttttaggaggttagggttatttcgatttttatttttagttggtttttaggttttggttttaggtttttttttgttttttatgggttttagttttttagattataaatgagttgggttgatggtttgttgtatttttgagtttgtgatttttggtgtattgggattagtttttatttgtttataggaatagacggatacgtttttaggagtttttttaattggttgttatatagttattattatatatttttaaaaggttatgaatgtttaaatttatttttttttaatcgttttatatttttgattgttatttttgttttcggtgtgatttgcgtttgtagagattttggagaattaatcgttaggtgttatcgggtattgatttttagttttaaatttggtgagttggtggtttgaagttagtcgggtgggagtatttacgttgtgaaaatttataaacgttataaattgagttttttatttcgttgttaattatttagtagtatattattgtttttgattttttaaaattaggttttaaatgtttgtatggatttttttttaacgattaagaggaagagagtgttattgtagcgataaatacgagagagggagattttggagtttaggtaggggtttcgttttagttatgtgaatttggtaggttagagtttttttttttttttttgtaaaatggggatgatgatggtagttattttgtagggtcgttgtgagtcgtattaagagggttcgttttattatattttattaggagtaaatatttagggagtcgtaggtcgggagttaaatttttgttaagttatttaatatgtttgagatttagttttttgttaattaggtggtgggtagagttttagagatttagaattagggattttaaaatgttattaggtggggaggtggggagaagttggttgttttatcgttgtttttttttttttttttttttatatttttagtttatttttgtttttttttttttaaatttgttaggaagtttttggatgtataggtgggttaaaggatgtttataggatcggttagcggtttgaggtggtcgagggatagggagtgggatatggggttgggggttttttgttttttatcgttttttttttggttagttttagaaagtagtagaggttatgattttttggaagagtttttaggttaaggagttttatagaatttttaatttggtttgtatttatttttgtattttttttggggattagggaggtaggagggaggtagggtagggttttgtagttttggtttgtttaaagggtttgaggagttgtttaaaggttttggggaaggtgagttggaggaatttaaagttaaaaataaaataatatagaagtggttagtttgttagagttttttttgtaatgattttttattatttatttttttagtagttttgagagggaagtttgtttttttttttatttcgtttagaggttcgaaggtagttttttaggattatattataaggaagtgtttatgtgagatttgaatttagagacggtgtttagagtttaggttgtgggtttttttttttatttattttttatggggaaatttaaggtttagagaggttaggaaattttttcgtcgttgtatagtattttgggatttaggtttttcggggagtaatggaacgtagttgggtgagtagacgttagagattagggttaaagtgaaagagttagtttagtttgttcgaggtttttttttaatattgaaagttttgtataattatttagttttagtaaattgggagggttggtgattttttagagttttaaggatggttttgttgggcgtgagtttaggatataggaaggaggtcgggaatatttggggtttggttcgtgtatcggaggtcgagtttttttattttgggtttttggatatttatttgtggggttgaggttgtagttggttagtagtagggtaatagttagagggagcgtgtcgcggtttatgttgtttacgtgggggtttgtgcgttgggttttattttgtgtttagtggtagggttgcgggcgggtatcggggtcggcgtgggttcgtacggggattcgaggggagtaggcggtcggagcgacggcgtttttgttttagttttttggggtggcggtcgaggggttaggagaagtggatatagggacgcggggttgggttggagttgttgttcgaaggatgggcggggagggggtgttgggttttaatggatggtagtgatagtagtagttttggttttagggcgtagatgaaggttgtggtatgatcggtagtagggagtttttggtttatttagttcggtcggtttagggaggtaggaaatgcgtttttttagagaaggggttgggttaggtcgtttgttaatcgggtagaggaagtgttacgggttttgttattgggtggggggttttgtgatggggggaggtagtggggtgggaggttttaggttttaggtttgtttttttaagtattttatttttttattttattttttttaaggttggtgggtgggacgtattagggagttttatagatgaaaataattattttaatagtttatcgaggggaatttttagggggtcggttttggttaaagtagtttttgtagaatttgtgatttatttgagtttattgattttattttgtagatgaggaaatagaaattcgatgtgttgagattattggtttaagaagatggtagcgttgggattttgtttatttttattattttacgttttgtcgggtattaaattcggtttattaagtgtagttgatatggggttgtttaataggtaggaaaattgaagtttaggttagggagggaagttttaaagtggtatagtaaggcggttagggttggcgtttttgggtttagaggagttgtttagggttatatattttacgtttgatttttttatgggtggaaaattttttatcgataaaatatagttttaggtcgagtgtagtggtttaagtttataattttagtattttgagaggtcgaggtagacggattatttgaggttaggagttcgagattagtttgattaatatggtgaaaatttatttttattaaaaatataaaagttagttgggtatgatgacgtgcgtttgtagttttagttatttgggaggttgaggttagagaattatttgaatttaggaggcggaggttgtagtgagttgagattagattattgtatttttggtttaggtgatagagtgaggttcggttttaaaaaaaagaaaagaaaaaaaaaaagaagatagttttaaattatggggattttaatggtatttttgaagttacgtggttttgggtttaaattcgattttgtttgtttttagttatgagattttggataaggttttttaatttttagtattttttgtttgtaaagtggggtacgatgtttttttgattaagttattatgagatttttgagggttaggatattatagtattgagttttgggatatataggagatgtttttttattagtgttttttgagttgggtgatagtttttaaattgttttatgtttattttgtaaatagtaagcgtatttattatgtatttatcgtgggattatttataggtagtatttagggttaggtttatgaaagtttagagaaggaattttgggttatttggagggtttggtatttaggtttgttttttgaaagattgggtgagttgggattggggagaagaaggggtgaggaaagtatgttaggtaggggtgttagattaagtaaaggtatagaagtaggaaatagtcggattatcgtgagattagtaggggtgtggtggggataggaagttggagaggtagagtttggttttgtattgggagggttttaaatgttaggattttgtttttagggttattgggagttatggagagtttttgagtagaaggacgttggtagagttaggttttgagaggttaaatttttgtgtgtgttggtaggatttacggtgagatggagttagaaggtttttttttttggatttatttgttttgggttataggtggagaaattgaggtttagggagggaggagaaggttgaggttttgggtgtttttggagggaggatgtttgtttagggtttgaggttttgttttttcgtgtttattggtcggttcgggtgataagagtaggtcgtgtgtttgtttttgtaggagttgttatagcggttgggagggtcggtgtggttttttgggtggggattagggatagttttgtttgtttagttttgtggttgtttggttagtttgtagttaagcgtggttttgaggttaagggagagtgtttttttttagagggttattttgagaagggtattttttttgtttttttttgtaatttcggagataaggttatgggtattgcgaggtaaagggtggttcggtgggggtttaggggtggttttgaggtttttataggttttagatcgagatttgtgttttagggatagttaatttagttttaggagttgagcgttttttttgtattagggttcgttttaggcgtttattttattagttttgaatttttatagttattttaggaggtgggtatcgttatatttttattttatagaggaggaattttagttggagggtggtgattttagggttgtttgggtttaagtttatttttttttttgttattattttttgagttgagtttggagtgagggatagatgtggtaggggttgtaggtattatagggtgttgggggtatttggggtagtgatagggattttataggaggttttttttaaaattttttttttttttttttttttacgttgtatagtttgtttttatttacgttgtaaataagatttaatggattttttagaaagtaggagagattttagatggattttaggaagaattggggtttcgattttagatattttatggaggaaggaagagattgggattatcgcgggtggggggtgaagcggaagttatttttggtttttatagtattttgattttttttgttatatttaagtttgtgtgtagttatttgtatgtatttttttatttgattagaagttttatgaaggtagagattttgatattttttgtattgttgtgtttttagtatagagtttagggttttttagtttttgagatggatttgttgaaagtatgagggattttagaagttaaggtaggggtgggggttatggaggtttagagaagtgggttttgttattggtttttaggagaaaaggttagttttggattgggttttttgttcgaggaagtttggtggttatatggtttttttgttgggtataggttttggggtagttgttttttatattttttagttgtatttttttttttgtgggatatatttatttttttatttttgtagaggttagaggaggtaggaggaggagggttcgttttttagttttttttttgtagggttattgtatattggtggtttttttttattgaaggttacggttttgttggggattttttttatttagttttgtttagttgtggatttagttttttttttggtttttttaggttgagggtggttatagtttacgtcgttgttagttttggggttttgtatcgttttttggggtttttttatatttcgattatatttgtgtaaatagattttttattaaatttttttttaatgattttattggaacgtgttatttgttttttgtcggggttttgattgatacggatgtgtttaggtgtcgtttgtttatacgttcgagagacgcgtggttgatggttaggtttttgtgtttggattttatagagggtagatgtatattttttgtttttttttttttttggttggttaggaaggttagggttgtaggaaaagatagagtacgtttattttggttattggttattgaaggaattttaggcggtttttagggatttattaggcggttgattgtttttagtattggtttggagttaggggttattgataatagtagggttagatttatagggcggagtagggtgtttaggttttgttttatattggttaggtggtattaggtaggatttttgtttgtttgagatagagttttattttgttatttaggttggagtgtagtggtatgattttggtttattgtaattttcgttttttgggtttaagtaatttttttgttttagtttttcgagtagttgggaatatgtattattatattcggttaatttttgtatttttagtagagacgggattttattatgttgtttaggttggttttgaatttttgattttaagtgatttattcgttttatttttttaaagtgttgggattataggcgtgagttatcgtatttagttagatttttttattttttgagttttagtttttttatttgtataaggggagggtagtttgttggtttggaggagtttaaagggtaagataagaattggaattgtattattatttatgaggttgtttggttttgtgttaagtgttattttgtagttattttagtggttgaggttgttatgttagtattttacgatggaagaaattgaggtttaggtttgtaaggttatagggttgggaagaggtagaggataattgaaatttaggttttttttttttggtttttagaatattttgttttggttttttttttatttttttggttattttatttgttttttttttggtttttttttgtttttttaggtttggttgttggttttttttttttttgtttatttttatttttaagttaggttttcgtaaatttttgcgattttggtgttacgttttaatatagattttgggatttagatttaaataatggaaacgtattttgtggttttgtagatagatttgcggttgtgatgttttttagtaatttttaatttgttgtatttttttttattattcgttataagtttatttgttggttttgttatttattaacgagtttcggttataaaatgttatgttttagattgttgttatttaaagtgtggttttgttttttttggaagttttttataaatgtagatttgagttaggtttagtggtaaaagtttgtagtttcggttatttaggaggttgaggtaggaggattgtttgagtttaggagtttaaggttgtagtaagttgtgattacgttattgtgttttagtttgggtgatagagtaagattttgtttttaaaaaataaaaaatgaaggatcgggtgtggtggtttacgtttgtaattttagtattttgggaggttaaggtgggtggattatatgaggttaggagtttga

SEQ ID NO: 627 - DNA, 17211 bp, Artificial Sequence
  chemically treated genomic DNA (Homo sapiens)
tttagttaatgtttgtatttttaattgagatagggtttgattatgttggttaggttggttttgaatttttggttttaaatgatttatttgttatggttttttaaagtgttgggattataggcgtgagttattttatttggtttgatttttattttttattaaattatgtttggtgtgttttggaggtttatttttttttttatttattttgaaagtttttttttttttttttttttttttttgttttttgtttttttttttttttttttttttttattttttttttttttttttttattgtgttagttattggataaatttattatttttttattaataaaaattagatgtggtatgttgaatattttatgttttaaaattatttttgatatttgtattagtttttagtttttggaaaaagttaatttagtttatttagttttaaaattaattgaattttttaaaatagttgttgacgttaaataaaagatgataaatagggtataggtattggaaatataggtgaatttattagtattagaaagaatatggttaatatggttttagattttacggttagttaagttagttgtaatgattttttttttttttaatttttatagtttattaaatttttaaagtttggaaatggttgaattgattaagggtgtttatagaatttatgagtttaataatagtggttttgtggtaagatggaaagaaattggttcgggttttttttgttttttatgtatatagtttaatttgtagattttattttttttattgtgaatttaatttgttattttttttttttttgagattgagtttcgttttgtcgtttaggttggagtgtaatggtatgatttcggtttattgtaattttcgatttttgggtttaagtaggatttttttattttagtttttcgagtagttgggattataggtattcgttattatgttttgttaagttttgtatttttgtagagtcggggttttattgtgttggttaggttagttttgaatttttgattttaggtgattagttttgaattatagtatttagtttagattattgattaaagggttagttaaataattatatagtagtgttaattgttgattatattttttgagatgtttttagtgtttaggtgagttagtagtatatgttatggtatggttatggtttgtttgttttaacggaaacgtatgttgaaatcggatttttagtggtagtgttgtgaggtggggtttaatgggaggtgtttaggttatgataattttatttttatgggtggtttggtgtttttttgtattttataatagtaaatgaatttttgttttggtaagattgaattagtttttgtgggaatgaattagttttcgtgagattgcgttgttatagagttaggatgtattttgggttttgtaattttatacgtgtttgttttttttttgattttttttaacgttgtaatggtgtgaaagttttcgttagaagttaagtaggtgttggtgttatgttttttgtgttttttagtttatagaaatgtgagttaagtaatttttttttttttataaattatttagttttaggtatatgttatagtaataaaaaatagattaagatagtatcgtgtatatatagaaggtttaatagttttgtaggatgtgtaatttttggtatttaatagaaaagttttaaatggaagttgtaagtgaaaaagagaggtgtatatttggtttttgatgttatagtgagttttttgtattagtttatcgtttatgggaaggaatttgttaagaatttttttatttatttaagattagatgtgatttttaggtttttattttagggaatgtttttttagttttttttggaattcgaatagagttttttttaatatttttggtatagtatgtttgttaattttttttattttggattattgttttttttttttttttttgtttatttatttgtttatttgttatttattaagtaattaataaatatttattgagtattgaatagggaatagatatttattgaatgttaaataaggaataggagtagatattggaattttagtatttaaagtagattacgataatgtatgtattaaaagggatggagattgttatatagaatttatagtaaattgttgtttttttattttattggtttggatttgataagtggaaattgattagtagtagtcgtttgaaattatttatatttaatgtagatttatttaacgtaagattatttaatatggtttatttaatttaggagggtgtttgtgatggtgtatatgttggtttttttatttttgtttatttggttgtattaggttattttaatatgttgatttttataagatgtggtgttttttattggatgtagttagtttatataggttggtattaataagatattgtggttagaattgggttgtggatttaaaatttatatatatatatattttatatgtggatttagggtattttattttttttggtaaaaaaaaatgtatttaaatagtatatttattatggtagaattttaggtagagtagtagagtttttttatagtaggtggttatttttaattttttttaagtgtatttaatttaaaggtttattattttttttgtatataagatttggtgataagattgttgtttttgtaaataagggtaagtttaagagattttatatatgtttgttataaggttaagtttaagagattttaaatgtttgttatatttgagattttaaaaaatatttttagtttaatataattttatgtatatttttttaaatattttttgtttttttttttattatgtttaggtaaatttgagttatatttttgttttttatttttaagaaatatattaaaatatttgatttattaaatatttattgaaatgttagatgatttttttaataaaaagagggttttaagggttaaaatttaggaagttaatgtgttaaatttaaatatattgtgattttaagaagtttagggttgttttagaatgtaaaattaattaatataagatgggtttataatttagaaaaatatattttttttttttttaattttttttttgttattattattttgtgagaaaaatagtagaaatgttatagagtaaaatggattcgtttgtttttaaagttttgttttttgtttgtttgtttagtttgtaatttagaatcgtttgaaataacgttttttagagtgtgttttgtggaatagagggtttttaaaaggtattttattagaaaaagttgttttgttaattaaatggggaaagtatttcgtcgtgttttttttttgagaggtttataatgtgtgttattatttggaggttttgtaagaatggagagtagtaaaagaagattttttattttaatttagtattgtttgtttggtaagtagatttgttaatatttatggattgtatttggggaaatattaagttttttatagttatttaatttttgaatatttattttttttagagtatggaagtaagtagtagaatgcgatcgttgatatatggattttaatttttttaattttatttatttatttatttattttgagatggagttttgttttgttatataggttggagtataatggtacggtttttgtttattgtaattttcgttttttagttttaagtaatttttttgttttagttttttgagtagttgggattatagatgtgttttattacgtttggttaatttttgtatttttaggagagatagggttttattacgttggttaggttggttttaaattttcgatcgtaggtgatttatttgttttagttttttaaagtgttgagattataggcgtgagttattatatttggttagatatatggattttagatttagataacgtgggtttaaattttagttttgttatttgttaggtgtgtgattttgagtaatagtttaatttttttaaatgttagtttatagttaagttgttagtaaatatgaagtttattgagatttttttttttgagtttgttatttagaaataaaatgatagatttgtatggatgatggattttttaataggttaatttttatatttggaatttattttaaacgtgttttattatattaaagtttaaggaagttaattttatttggaggtatattgtagagataagtaggtttttttttttgtttttttgtttttttagattttttttttttttgttttttttttttttttaagttttttagttttattattgttttggttaatttttttgggtttttttttttttatttatttagtattagttgaattgatttaggtttatttggttatgttttttaaatttaattcgataaatatttattgagtatttaggtggtttttgaattattttgagtatttaattttaggatatgatttttttaaaggatagaattggaatgtttatataatatgagggaaaaaaaataaaagaaaatatttagtttttttagtaagttatttgataaaatagttgaaatttaagaagttttttagttaggagggagagattgcgaatataataggaagaagttttaggttgagtggtaaaggttgagattttttatcgtaagtatattttatttaaacgtttgttttttgaaagttgttgacggagttttggcgagggtttattttttcgttggttgataagcgaagttttgttttatatttaattcgttgtagtgtaggaggggtaggggtggagatgcgtcgtttataaggggagttgtgataatttttttgttagtttttttttttttattcggttttttttacggagtttttattttattttttttgttttcgtatttattttgagtggttggtgggaacgtgaaaagggagaggaaaaggcgtaagaagttagagagaggggtgtgggaaaagcgaaaataggttgttaaattaggggattttttttaatttaaaaaggaagtttgttgacgttagttagttaaatttaatatttttttatgtgtaatatttgattttggaagtaaaaatgaattttgcggagagagagggttttaagagatattgtatttaaacgaaatatgtggttattttttgtgcggtggtggtgggtgtaggattaatagtgggatttgtcgtgggtttgattagatcgtgtgattttagcggggacggcgggtcgggtattgcgttagtttttttttatttgtttttttttacggttagttttttaggtttttttgtttaggattaggatatttgttcggttagtgaggatgagagcggatagtggaaaaattttcgattgtcggatttcgttaatttagtttattacgatttgtacgtgaagtttttgttggaggaggatatttatacgggtatcgtgagtatttttattaatttgagcgtttttattcggtatttgtggttgtattttcgggagattaggattattcggttttcggagttgaagaggttttttggggattaggtgtaagttcggaggtgtttcgagtataaaaagtaggagtacgtggtggtcgaggcggaggaagagtttatttttagtagtggagatggtttgtattttttgattatggagttcgtcggttggttgaacggttttttcgtgggattttatagaattatttatacggagaacggataagttaagtaaatattaatttttgttttattttttttaagtttatatatttgttttttattttttttttttttttttttatttttcgtttttaattattttgttggtttgatattgatcggtttttggttttaattttggttgtttatttgggaagttaaaattgttgttttattgtatttttaaattttgttataaaatttgaaagtagtgaatgagtttcgtagagttaaaagttagtgtaagttttttattttattaggagaaattataatatattgtattttattttgaagatttttataaattattttaggtttgagaattgtttttggtaaattttattagtgatatttttaggttatgtagtaatatatatatagtaatatatatgaatttttaaagtggtattatattaaatttacgtgaaatattagtaaattttagttattattttgtttattttttttttgtttaatgttttttttttggagaagagagatattgaaaaattatatgtgatttatagaattgtttttgtgtttttatttggaaaggaagataggattgtgtttttttttgttttcgatggttaggattatgttttatatataggtttttaggaaatatttattgagtttatatattagtggtataggtaaatttggaggtttgttgtttatgatataatgtgtaaatataatgttaagttttttataatataaaagatatattaagtagttaaatatatataaatatttgtatataaatatttatttagatagataggtatttattttatttttttatttatttgtttagtttttgtattgattagtggttattattagagttatgttaaaggtataaatttttttattgaattttaaaaattttttttatattgtggatgtagtttttgtattagggaggaaggttatattatattttgtgttgtgtttggattgttttgatttttgttggtttagattttgaagaggtaaatgattaagaaagttttttgttatagtttagagatgtgagttttgggttagtttatttataaatatttttttttttttgttgttttaagtattttatagagtaagtaaattttttggttaaaattttttttattgtttgttagatagatttacggattaaaataaaatatttaaatatttttatatttttgtgtggtaaattgataaattgagtagaagtgatagtttgaagaaaatatttgtaggggttatgtttatatagattttatattttaatattgttagtaaaaaaatatttttattatttacgtattttttttgtttataagaattatattattgaaagtataaaaattattaaaaaggataattaaaataatttgtaaaataattttattgtttagtggtaatttttgttagtatattaatgtatattttaatgtttttttaggtaattaaatttttaattgtattatatttgtttatttatatgttttttttatttaatgttttgagaagttttttttatttttatatgtttttaagaatttgttttttgttttttattgagatagggttttgttatgttgtttaggttggttttgaatttttggatttaagtaatttttttgttattattttttaaagtgttgggattataggtatgagttattgtatatagttaagaatttgattttaaagatgtgaaatattttattgtttgaatatattgtaattttttaaaataaattatattgttgagtatttgagttgtttttagtattttattattataaataaattattaaataatatatttttaaatatttttttgtatgtgtatttgtttatttttttaggttaggatatagttttaaaaatagaattgttgggttaaagtgtataaatatattaagatattgtaatagttattttgtttattgataatataaataatatacgtttattgaaggaaatttagaaaatagagaaaattataggaaaatataaatttatttataaattttttatttaagtatagttattgttaatatttaggtagagatttttttagtatttttttggatatagatagttgtggtataattatattatatatagtaatgtgtaatatgtttttttaatatagtattaatgttttaagatgttatttgatgtttttttataaatgattcgatggatatatggtaggttattgtatgattataatgtagttgatttatttttttattaaatatgagtatttaagttgtttttatttttttatttataaggatttagaagaaggcgtatttttatattgattatttttgtaaataattatttatggatattttttaatatttaagaaaatttttagaagatgggttaaaattatttgtgtataaatgtatgtatgtttgtgtatatatgtgtatatgtatatatatatatatgtatgaatatgtgtatgtatgtgtgtgtgtttttaaattgatttttaaaaaatatgttttaaattttatttttattaataatgtatgaaagcgattatttttttgagttttattaataatataatgattttttaaaagtgtttgttaatggtcgagggaagggtaatattttgaagaatatttattttaaagagattttaaaaatttattgaagtgaaagcgagttaagattttttaaatattattgttaaaattttaaaattgttttttagattataaagataagagaaattttatttgaataaaattattaaaatatttataaaataataaaataaaattttatatatattaggaaggttaaaaattggaattatgtagtttttattaataagtttttattatgtattttataagtttaaaaaaagtattatatatataaatatttttattttttgagttattttagtgtattagttaattttgttataaaatatatattagagagttgtttttttgaagtttagttgatttaatttttgattggagattacgaaatgatggtaatatcggtgaggaaggttgatgtttagtttagtttttattgaggattggtgtttttaagtttgtatgttttattgggagtagttgaagtttttatattataaaagatgttgttagttttgtattgtatatatatggttttggaatagatttggcgttagtttaataattttatttaggttaaatggaatattttttgttatttttgtttgaaatattttaagtatatgagaaaagtgtattatgtttttttttttagtttgtgagtaatattttggtaatgtagtttttaggagtttttatttataggttttatataagggttattagagggagtttattgggggtagtgttttttttttatattatagagtgagtttcgttatatgtgacgtttgtattattttaaacgttattatagtaatatatttgaagtacggagttaaaattatattttttgattttaacgtaaaatgtaattttaggattgagtattagtagttagggatattaatgtgataattataatgtaaattaaataggattgtatttagtagtaattaaaattatttaatttttgtaaatataattaggattttgagttttataaattttatagttatttaagttgtttttttttaagattgagatatggggaagaaaggggataaaatttagaattttatattgtttttttggggatagagttgtagtggggcgtggaaggagaaagtttgagaaatatttagtcgttttttttttatcgatttatttttttttattcgttagtttattttttagggtttgaggaaaattatttggaaggattggaatttttggaatgtttttttgattatattttttttttttttatttttttatcgtgttacgtaggatttttagttgtttttttttttaaaagagtttttttttatttaaattttaaagtatatatttttttttttttaagatttggtttttttttgttagtatttggattatgtttatttagtattttttaaagtatgtattgtagaattttagttgtatggggattttagtagatattattagaaaaatagtaggggagagattttgtggttaaattagtttgtgtaataatattaaatataaaatgatttgttttggattttgtttttaattatggaattttttagagatttttttttttttaaagagatgagatttaggttggggtagaatttttggtttgaatttatgagtttatgagtttaagtgatttttttattttattttttcgagtagttgggattatagggtttttagaggtttttatatgataatgttttttatgtagttttttaattttttgtgattatggatttttttgtggggtttttaagagtagggatatatgttttttttttattgtttggtatatagtgagtatttaaatatttttaaatggaataaatgaaaatattattatataagtttttatatgattagtattttttggtaaatgttgggatatattgtattattatagttttttttttataaacgagtttaatttttattaataatatttttatatttttatttagggtgaaaatttttttttggttttttttttgtttattttgtggaagggaagagtttatatgtgtatgtatatatatttgtatttaggaatgtaattttcgtagtttaaaggtagagaaatagtggaattgataggaagtataatcggaattttagagattatttttagtttgggttgttaaggtgtttttcgtagcgttagtaggatttaagttgaattttgatgttttggtgggagtttagtagtagagataagtgagaaattaaaagtaggtaaaaaggaaaggtattaagttagaaaagtagagtggggataagaaaattagtttgtaggggaagtttatatgaataggttagttagatattattgaggaaaatttttacggaggaaaaggaaaaatagttatgataggtattatgaaggagaaattattttatgattttttggatatagatggtaaaagaaagagttaatttaattatttatttggatatatgaaagatattgtagtaatttaggaaagagaagataaggattagataggaaacgtgattttaggatagagaagagagggtatagtagagaaaatagtttggaggtaaagtagttaagatttgacgattgtttgattatgaggaagggtgagttaaagttatgggtttaggatattttagttagtttttattttaattgatattggaaataggtgggaagtagttaggttagaagggaaggtcgtaagtttagtgttagatgtgttgatggtttgttagatatttaggaagagatgattagtaggtatttgtataagtatgtttgaagtataaggttagagtttgtaataaagatttaggagttgagtggaaatatcggtgagataattattattaagtgtgtgtgtgtaatgtatttttatttgtatggatgtgtatgtatatttaagtatatgtagttttgattttgaaatttttgtcgtatgttagtttgtttattatatttttagattagtatgttgagttattattttattgttaataaaaatgttaataaagaatagattttaggttgggcgaggtggtttatgtttgtaattttagtattttggaaggttgaggtgggcggattatttgaggttaggagttcgagagtagtttggttaatatggtgaaatttcgtttttattaaaaatataaaaattagtcgggggtagtggtatatgtttgtaattttagttattttggaggttgaggtaggagaattgtttgaatttaggaggcggaggttgtagtgagttaagatcgcgttattgtattttagtttgggtgatagagtgagattttattttaaataaataaaaaaagaatatattttttttttggttttgtttatttgttgtaggaggttaagtaaattttttttattttggaagtaagaaaataaaaagaaattttatttgattttgaatattttttatatagaaaaaaaaaattggaaaataaagttaaataattaattggtttatttaaattattataaaaatatatagaggtttgaataatttagaggggttgttttttattaagttgtttttttatgtaattttggaattttttatttagtttatatagatttttagtaattgtgattatttgtttcgaattagaagttttgtgtttaaggattttatttaaaatttgttgtttattttgttggtttaatttataaaattgtttagtatagttagagagtttttattggaaatagtatgttagatgatttatgagataattaggtattttttttggttttttttttagagttaatttagagtgatttaagttataatttgtgttatcgtttttttttttttagtttttttaaagttattttgatttgatttatttagagatgttagagaaatgttttttttttttggaaacgattaaattgtatagattattattttattgtgttaggtttagtaagtgatttattaatgtggtatagggaggtttttgtgggaaggtggtttattttaatatatttgtttggcgcgataattatttaggacgtatttataagttatttttgaatatattgtgttattagttagttttttttttttaatttgtaagataagttatttgattttaattattgaataaaatttttttaaagaagttgtgatttagaattgttttgtattgttattttttattttttgtttttaattttgtatatatttagaaaagtttagggttaattgatggaatttaggatatataaaaaggagtttttgagttattttgaagtttatgagaaaaagaataggttattattttaaaaatgtttatattgtttatagtgtatatatattaagtaattttgttttagtatatattgtagttaaatgaaaggatttgaaatattttagattgtgaaagtgttatgttagaaagtattagtattttagatttataagatgtagaatgaggtatattttaattatattatgtaaattttaagggagttttaaatgtattattatatgtaatttacgtttttttatttttttataacgttgtgaggaggttatatatgttttggtgattaggttttatagatgaggatattaaaagtttggggttttgtgatttggttaagattatattttagtagttgaagtggattagaatgtaagaatgtttgtttttagaaaagggttttttttataaaattatattggttttgaattttaaaaaagaaaaagaaaataaatattatatagtttttcgggttgatgaatgttattgtatttatatttgggttattgtgattgagttagatttgttgtgattgatatttgttgagaggattattgagttgggttaaatatatcgtatagagaaattttttatattgttttgttttatgttcgttggtaagtttaggaatacgttagtttaggaaggtagtttttgtttataattaagtagaatgttttttaaagagagaaggtgagaaaaggattgaaaattatttttttttttgggattttaggaatatatattatatatattatattatattttatatatatattatattatatatatatatatttatattttggtatttagttaagagtaaaatagagtatttgaaaatatattttatggttatagtttaggaaagtgtaattttattttttttttttttttattttttatatacgaagatgtgtgtggtgcgcgtatgtacgtacgtatatttatatatatttatttttttaaattagttagttggtttatttttgaggtgtgatttagaggagatatttttgtaaggagtgattttttttttttttttgtttttggaagatattagaagttagaagaatttagaaggaaaaggtagttgattaaatatggggttggagtttggtggattttataaaatttttaaattttgggaaagtgtataggtttttttagagtttgatatatttgtaattaattataatttgtaagatgtttagaaattttaattgattaaattgttaatgttataaaattaattaatgattgttttattgtagaatgaatttttaattgaggttttttttgggtaattttattgtgatataattttagatttataggaaagttataagaacggtattaggaatttttagaaatatttaatttagatttattaattgtttacgttttagtttgtatttttttttttttttttttagagtatatggaaatattttttttttttattttttaatattagagtatattttttaagtacgggggtattttttaaaataaatatagtatagttattaaaattaagaaatttaatattaatataattatttaatttatagtttgtaatagaattttattaattaatttaatgatgtttttttgaatgtttttttttttagtgtagtatttagtttggaatgttgtattgtatttagtgttatgtttttttagatttttttaaattgaaattagttttttagtttttttttgtttttttaaagttaatatttttgaagaatataggttggttattttgagaatgttttttagttgtagtttgtttgattttttttatgatttaaaaatgtaagttaagttttttgtttttttttttttgttaggattattatagaagtgatgtgttttttttaggaaattatattagagatatattgtgttggtttgaattattattattgatgttttttttgatagtttgtttaaggtagtgtttattaagcgtttttattgtaaagttataaggtttttttttaggtaatttttagggagtttttgaaattttgtaaatattttttttttattaaatttttattttttggatttggtatttattgatgattttttaaaataatttttttttttaaatattattagtaggtaatttattggaaggaataattttttttttttatttatttatttatttattttaaaaaattagagtaaggatttagagattgttaatttgtttaatgagttattatttcgttgtttattgtgatgttttaatatttttataatttgttaaaggtagttaaatttttggttgtagtaagtttttgaattaaaataaaatgtacgttttttttatgatttttgatatttttttgatttggtttttgttgattttatgttaaatttatttttggttttagttcgtttggtttagtgttttttagttatattggatattttttaattttttaattatagtaggtttttttttattttagggattttgtatttacggttttttttatttgaatatgtttttttgaatttttatttgtttggtttttttttattatttagatttcggtaaattaagagattgtgattattttatttaatgttgtttattattttttttagttattttttgttttttttagtgttttattttttatgtagttgttattatttttttaagttatttatttatttgtgtgttttttgtttaatattttgtaagtagtttggaattttatttatatatgtaattgtttagtgggtttattttgttcgttgtttagatagagtcgatttattaagatggggggaattgaaatggagaaagagtaatttatatagattcggttgtgtaggagattggaattttattattatttaattttgttttttcgaatatttggggattagagtttttaagataatttggcgggtaggggtttgggaagtggggagtgttgattggttaagttggagatggagttatagagggtcgaagtgagttttttttgttgttttttgtttttgggtgggatggtagaattggttgagttagatattggtttgggtggtgttagttgatttattaagtacggagtttgtaaaatattttaagtattaattttaggttttatagtagtaatgttattttttatgaggaatttgtggaggttgagatttttgtagttagaggttgtatgatttttaaattgtaatttttaattttgtagttaatttgttagttttgtaaaggtagattggtttttagggaagaaggaggtttttttaggaaagtgttattattaattttgttttagagttaaattataaattgaatttttttttaaaattagttcggtttatgtttaggaatgaataagtgtagtttaaaggttaaaagtaagatggagttagttaggtttgattttttttattgttataattttttttgttataattttgtaaaggcggttttatatagtagttagaaaaatgtttgtaaatgtgtgtatgtatgtataggtgtttgtgtgcgtacgtgtgtgtgtgtggaagggatttaattaatgttttttggatgaatggatgatataataatttagtttgatattttttatgatatgttttttttagtttttagaattttgaaggataaaatttttgtttgtataaattattaatgaatggaaattattatttttttatttttatattttttattttgttttattttttaataagttaatatataatatttttttattgtaatatgtttatatgtaaaaagtgtatgttattgatttttttgagtaattatttagaaaataatatttttattttgaaattatgaaaatattaaatattaatattttagtttatattagtatatgtttagttagagttataaaaaaaaatgttgttttttttttttaagagtgagttttaaattaggataaaggttattttatttaggagattatttagtattgtttttatatgaaaatgaaattgggggttttgtttttgttgtaatataaataataaagaatgtgttattagggatagggattggggattttggaataatttttattttgtgatagaagatagttgtttattttttataagggtagttagatataagtttttaagtttggttttgtgtttatttatttgttgtttaatgggtttggggtggagagagtattagtttataattggatttatttttgtttttttatagagttttagttatggtattaaaatagttgttaggttgatgtaaaagtaattgtggtttttgataaataaatatgtgaatgaaatatttgaagtaatttgatttagaattttttaaaaatttgttaagttaaaaattttaggaaaatttttgataaatatttgatagttttttagatggaattttatttttagaaatgtaatagttataattgtatagttgattttttttttttttaggaatagagatataggggttgttagaagaggtagtatgtatttcgtttgtttgtttgtttgtttttaagg

SEQ ID NO: 628 - DNA, 17211 bp, Artificial Sequence
  chemically treated genomic DNA (Homo sapiens)
ttttagaaataaataaataaataaacgaaatgtatgttgttttttttgataatttttatgtttttatttttaggggaaaaaaaaattagttatgtaattataattattatatttttaaaaatgaggttttatttagaagattattaaatatttgttaaaggtttttttggaatttttagtttaataaatttttaaaaaattttgagttagattgttttagatattttatttatatatttatttgttaaaaattatagttatttttgtattaatttaatagttattttggtgttataattaaaattttgtggaggagtaaaaataaatttaattatgagttagtattttttttattttaagtttattgagtaataagtagataaatataaagttaaatttaaaagtttgtgtttaattgtttttatgggaagtgaatagttgttttttgttatagagtggaggttattttagagtttttagtttttgtttttaatggtatattttttgttatttatgttataatagggataaaatttttagttttatttttatgtaaaggtagtgttgagtaattttttaggtgaagtaatttttgttttagtttaaagtttatttttaaaaagagagagtagtatttttttttatggttttaattaggtatatgttggtgtaaattaaaatgttaatgtttagtatttttataattttaaggtgaaaatattattttttgagtaattgtttaaaaaaattaatagtatatattttttatatgtaaatatattatagtaaaagaatattgtatattggtttattagaaaatgaagtaaagtaaaaagtataaaagtaaagaaatggtaatttttatttattaataatttgtataaataaaaattttgttttttaggattttggaaattaagaaagatatattataaagaatattaggttaaattattatattatttatttatttaagaaatattaattgagttttttttatatatatatacgtgcgtatataagtatttatgtatgtatgtatatatttgtagatatttttttagttgttgtatgaaatcgtttttgtaaaattataatagaggaaattatgatagtgaaaaaagttagatttaattgattttattttgtttttaatttttaagttgtatttgtttatttttgagtataggtcgaattaattttgggaaggaatttagtttatggtttgattttgaaataaaattgataatagtatttttttgaaaagattttttttttttttggggattagtttgtttttgtaggattaataaattagttataagattagaaattatagtttaggggttatgtagtttttggttgtaagagttttaatttttataaattttttatgggggataatattattattgtaaaatttaagattaatgtttgagatattttgtagatttcgtatttgatggattagttgatattatttagattagtatttggtttaattagttttgttattttatttaggaatagaaaatagtaagaaaaatttatttcgattttttatgattttatttttaatttgattaattagtattttttattttttaagtttttattcgttaaattattttaaaaattttgatttttaaatgttcggggagataaagttgagtaataataaaattttagttttttgtatagtcggatttgtgtgaattattttttttttattttaattttttttattttgataaatcggttttgtttaggtagcgggtaaggtgaatttattgggtagttatatgtatagataagattttagattgtttatagagtgttagataagagatatataaataaataaataatttaggagagtgatgatagttatatagaaaataaaatattggaagagatagagaatgattaggaaaagtggtaaataatattaggtagagtggttataattttttggtttgtcgagatttgaataatgagaaaaagttaggtaagtggaggtttagggaaatatgtttaagtagaaggaatcgtaagtgtaaagtttttaagatgaaaaagaatttgttgtggttgaagaattgaaaggtgtttagtgtggttaaagaatattgaattagacggattggagttagagataagtttgatatgaggttagtagaggttagattaggaaaatattagagattatgagaagagcgtgtattttattttgatttaaggatttattatagttaaggatttgattgtttttggtaaattatgggagtattggaatattataataaataacgggataataatttattgaataaattaataatttttgagtttttattttgattttttaaaatgaataaataaatgggtgagaagggaaagttattttttttagtagattgtttattaataatatttgaaggaaaaaattattttaaaaaattattagtggatgttaaatttagggggtgaaagtttggtgaggaagggatatttgtaaggttttaaaaattttttgaaagttatttaaagagaaattttgtaattttataatggagacgtttggtggatattattttaagtaagttattaaaggaagtattagtaataatagtttaaattagtataatgtgtttttaatgtgattttttgagagagatatattatttttgtgatagttttgatagaaaaaaaaaaataaaaaatttaatttgtatttttaaattatgaggaaaattagataaattataattgagggatatttttaaaatagttagtttgtattttttaaaaatattaattttagaaagataaagaaggattaagggattggttttagtttaaaggagtttaaaagggtatgatattaagtgtaatgtagtattttagattgggtattgtattgggggaaaaaatatttaaaaagatattattaggttagttgataaaattttattatagattgtgaattagatagttgtattaatgttaaattttttgattttgatgattgtattatgtttattttagagaatgttttcgtgtttaagaaatatgttttgatgttaaggggtaaagggagaggatgtttttatgtgttttggaaaggaaggggaaggggtataggttaaaacgtaaataattggtgaatttaggttaagtatttttaggaatttttagtatcgtttttataatttttttatgagtttgaaattatgttataataaagttatttaagaaaagttttagttaagaatttattttgtaatagaataattattgattagttttgtgatattaatagtttagttaattgaagtttttaaatattttgtagattgtagttaattgtaagtatattagattttaaaaaagtttgtatatttttttagagtttgaaagttttataagatttattaagttttaattttatgtttagttagttgttttttttttttgaatttttttgatttttgatgttttttagaggtaggggaaaaggaaaagttattttttgtaagaatgttttttttgagttatattttagaaataggttagttaattaatttgagaagatgagtgtgtgtgagtgtgcgtgcgtgtatgcgcgtattatatatattttcgtgtgtgggaggtgagaggaaggaggaagtggaattatatttttttaagttatagttatggggtatgtttttaaatattttattttatttttggttggatgttagaatatgaatatatatatatataatataatatatatataaaatataatataatatatataatatatatttttaagattttaggaaagaaaataatttttaattttttttttattttttttttttaaaagatattttgtttgattgtaggtaaaaattatttttttaaattagcgtatttttgagtttgttaacggatatggaatagaatagtgtgggagatttttttgtgcggtgtgtttggtttagtttagtggtttttttagtaaatgttagttatagtaagtttaatttaattatagtgatttagatatagatatagtgatatttattaattcgaagagttatataatgtttatttttttttttttttttaaagtttagagttaatatgattttatggggaaaatttttttttaagagtaaatatttttatattttaatttattttagttattaaagtgtgattttgattaagttataaaattttagatttttagtgtttttatttgtaaaatttggttattagagtatgtatagtttttttatagcgttatggggaagtgagaaggcgtagattatatgtagtaatatatttgaaatttttttaaaatttatataatgtggttaggatatattttattttatattttataaatttagaatgttagtgttttttgatatagtatttttataatttgaaatattttaaatttttttatttgattgtaatatatattggaataaaattatttggtgtatatatattataggtaatgtaagtatttttaaaatggtaatttgtttttttttttatgaattttagaataatttaaaagtttttttttatatattttaaattttattagttggttttaaatttttttaagtgtgtgtaaagttgaaaataaggaataagagataataatataaaataattttagattataatttttttgggaagattttatttagtgattaaaattagatgatttgttttgtaaattaagagaaaaaggttgattaatagtataatatgtttaggagtgatttgtgggtacgttttgaataattatcgcgttaggtaaatgtgttggagtaaattatttttttataagggtttttttatgttatattaataagttatttattagatttagtataataaaatgatagtttatgtaatttagtcgtttttaaaagggaagagtatttttttggtatttttgagtggattagattaaggtgattttaagaaaattgagggagaaggggcgatggtataagttatggtttggattattttgaattgattttaaaaaaaaaattaaaaaaggtatttaattattttataaattatttggtatgttgtttttagtgaagattttttggttgtgttgagtaattttataagttgaattagtaaaataaatagtaagttttgggtgaaatttttaaatatagagtttttgattcgggataggtagttataattgttaggggtttatatagattaaataaagggttttagaattatatagaggagtagtttggtgaaaaataatttttttagattgtttagatttttatgtatttttatggtggtttgaatgaattagttagttatttaattttattttttaattttttttttttatgtagaagatatttaaggttaagtaaaatttttttttgtttttttgtttttaaaataaaagaaatttatttagttttttgtaataagtaaataagattaaaaagaaaatgtattttttttttgtttgtttgagatggagttttattttgttatttaggttagagtgtagtggcgcgattttgatttattataattttcgttttttgggtttaagtaatttttttgttttagtttttagagtagttgggattataggtatgtgttattattttcggttaatttttgtatttttagtagaggcggggttttattatgttagttaggttgttttcgaatttttgattttaggtgattcgtttattttagttttttaaaatgttgggattataggtatgagttatttcgtttaatttaaaatttattttttattgatatttttattgataatgggataatagtttagtatattaatttaagaatataatgaataaattgatatacgataaaaattttaagattaaaattatatgtgtttgagtatatatatatatttatgtaggtaagaatatattatatatatatatttaatgatgattattttatcgatgtttttatttaatttttaaatttttattataagttttaattttgtgttttagatatatttatgtaagtgtttattagttatttttttttagatgtttgataagttattaatatatttgatattgaatttacgatttttttttttaatttggttattttttatttatttttaatattaattgaggtgaaggttagttggggtattttagatttataattttaatttatttttttttatagttaagtaatcgttaaattttgattattttatttttaaattattttttttattgtgtttttttttttttattttgaaattacgttttttatttgatttttatttttttttttttggattgttgtaatattttttatatatttaagtggatggttgagttaatttttttttttgttatttgtatttaaaaagttatggggtaattttttttttataatgtttattatggttatttttttttttttttcgtaagggttttttttagtgatatttagttagtttgtttatataaattttttttataaattaatttttttgtttttattttgtttttttgatttggtgttttttttttttgtttgtttttagttttttatttgtttttgttgttgaatttttattagaatattaaaatttagtttaaattttattagcgttacgaagaatattttggtagtttaaattagaaatgatttttaaaatttcggttgtattttttgttaattttattgtttttttgtttttaaattacggagattgtatttttaagtataaatatatatatatatatatataaattttttttttttatagggtaggtagaaaaggaattaagggaaaatttttattttaagtgggaatgtagagatgttattggtggaagttaggttcgtttatgggagagaagttgtggtaatgtaatgtgttttagtatttgttagaggatattagttatgtgagagtttatatgataatatttttatttattttatttgagaatatttgagtgtttattgtgtgttaaatagtaaaggaaagatatatatttttatttttaggaattttatagaagaatttatagttatagagagttgggaaattatatagaggatattattatataaaagtttttgaaaattttgtaattttagttattcggaaagatgaggtgggaggattatttgaatttatgaatttatgagtttaagttaggagttttattttagtttggattttatttttttaaaaaaaaaaaagtttttgaaaagttttataattaaaaataaaatttaaaatagattattttgtatttagtattattgtataaattgatttagttatagaattttttttttgttatttttttggtaatatttattaagatttttatgtaattagaattttgtagtatatattttgggaagtgttaagtaagtataatttaaatgttgataaggaaaagttaaattttggagagaagaaaatatatattttggagtttgagtagagggaaatttttttagggaagggaatagttggaaattttacgtaatacggtgagaaaatgggaagaaggagggtgtggttagagaaatattttaaaggttttaatttttttaagtggttttttttagattttgaagaatagattagcgagtaggaagaggtagatcgataaaggaaaagcgattggatgttttttaaattttttttttttacgttttattataattttgtttttagaaagataatgtggaattttaaattttgtttttttttttttttatgttttaattttgagagaaagtaatttgggtagttgtgaagtttgtgaagtttaaagttttgattgtatttgtagaaattaagtaattttggttattattgagtgtaattttgtttagtttgtattgtggttgttatattaatatttttaattattaatatttaattttggagttatattttacgttaaggttagaaaatataattttgatttcgtattttaaatgtattattatgatgacgtttaaaatgatataaacgttatatatgacgaagtttattttatagtatgaaagaaaggtattgtttttagtgaattttttttggtggtttttatatggagtttgtggatgagaatttttagaggttgtattgttaaaatattatttataggttagaaaaaaaagtatgatgtattttttttatatgtttgaaatattttagataaggataataaaaagtattttatttagtttaaatgaggttattgagttgacgttagatttgttttaaaattatgtgtgtgtagtatagaattggtagtattttttgtaatgtgagagttttaattgtttttaatgaaatatataaatttgggaatattaatttttagtgagaattgaattgagtattagttttttttatcgatgttgttattatttcgtaatttttaattaaaagttaagttaattgagttttagaagggtagttttttggtatatattttatggtaaaattaattggtatattaaaataatttaaagagtgagagtatttgtgtatataatgttttttttagatttataaagtatataatagaaatttattaatggagattatatagttttaatttttggtttttttaatatgtgtaaaattttattttattattttataaatattttgatggttttatttagataaaattttttttgtttttatgatttaagaagtagttttaaagttttagtaataatatttaaaaagttttgattcgtttttattttaatgaatttttagaatttttttaaggtggatattttttagaatattgtttttttttcgattattggtaaatatttttaaaaaattattgtattgttagtaaggtttagaggaatagtcgtttttatatattgttggtggaaatggagtttgggatatattttttggaagttagtttggagatatatatatatgtatatatatgtttatgtatatatatgtatatgtatgtatatatatatatatagatatatatgtatttatatataggtagttttggtttattttttaggaatttttttaaatattagaaaatgtttataaatagttatttataaggatagttaatataaggatgcgtttttttttagatttttataggtgaaaaaataggagtaatttaaatatttatatttaatggaaaagtgaattaattatattgtagttatataatggtttattatgtatttatcgaattatttgtggaagaatattaaatgatattttaaagtattgatgttatattggaaaagtatgttatatattattatgtataatataattatgttatagttatttatgtttagaaaagtattaaaagagtttttgtttaaatgttaataatggttatatttgggtaaagaatttatggatgaatttatgtttttttataattttttttgttttttgagttttttttaataaacgtgtattatttatgttattaataaataaagtaattattataatattttggtatatttgtatattttgatttagtaattttatttttaggattatattttaatttaaggaaataaatagatgtatatataaagaggtatttagaagtatgttatttgatgatttgtttataataataaaatattagaaataatttaaatgtttaataatataatttgttttaaaaaattataatgtatttaaataatggaatattttatatttttaaaattagatttttggttgtgtgtagtggtttatgtttataattttagtattttgggaagtggtggtaggaggattgtttgagtttaggagtttaagattagtttgggtaatatagtaagattttgttttaataaagaataaaaaatagatttttgaaaatatgtaagaataaggggaattttttaagatattaagtaaaaaaggtatatagatagatagatataatgtaattaaaggtttgattgtttagaaaaatattagaatatatattaatatgttagtagggattattattgggtagtgaaattattttatagattattttgattattttttttgataatttttatgtttttaatgatgtaatttttatgaatagaaaaaatacgtaaatggtaagagtgtttttttgttagtagtattaagatataagatttatataagtatgatttttatagatattttttttaaattattatttttatttaatttattagtttattatataggaatataggaatatttaaatgttttgttttagttcgtgggtttgtttgataaataatagaaagaattttgattaaaaaatttgtttgttttgtaagatgtttaaaataatagaaaaaaagggatatttgtgggtggattggtttaagatttatatttttaaattgtgataagaagtttttttaattatttatttttttagaatttaagttagtaaaggttaaagtagtttagatataatataaggtgtagtgtagtttttttttttgatgtaagggttatatttatagtgtgaaggaagtttttggagtttaatgagagagtttatgtttttaatatagttttggtagtagttattgattaatataaaggttagataaataggtgggaaagtggaataaatatttatttatttagatagatatttgtatataaatatttgtatgtatttaattatttaatatattttttatgttgtaaaaggtttagtattatgtttgtatattgtattatgagtaataagtttttaaatttatttatgttattgatgtgtggatttaatgaatattttttgaaagtttatgtgtaaagtatggttttggttatcggagatagaaaaaaatatagttttgtttttttttttagatgaagatataaagataattttgtggattatatgtgattttttaatgttttttttttttaaaaaagagatattggataaaaaaaaaatggataaaataataattgaaatttattgatgttttacgtaaatttagtgtaatattattttaaaagtttatatatattgttgtatatatattgttatatagtttgggaatattattagtgaaatttattaaaggtagtttttaaatttgagataatttatggaaatttttaagatagggtgtagtatattatgattttttttgatggaataaaagatttatattgatttttgattttacgaagtttatttattatttttaagttttatgatagggtttggaaatataatagggtaataattttggttttttagatggatagttagaattgaaattaagagtcgattaatattagattaataaaataattaaaagcggaaagtgaaaaggaaaggaaaagaaatggaaagtagatatgtgagtttaagggaggtaaagtaaaaattaatatttatttgatttgttcgtttttcgtgtaggtggttttataaaattttacgagggagtcgtttagttagtcggcgaattttatggttaggagatataggttatttttattgttgggggtaagtttttttttcgtttcgattattacgtatttttgttttttgtattcgaaatattttcggatttgtatttggtttttagagggtttttttagtttcgggagtcgggtgattttggtttttcggaggtgtagttataggtatcgggtgggagcgtttaggttgatggagatgtttacggtgttcgtgtaggtgtttttttttaataggggttttacgtgtaggtcgtagtggattgggttgacgaagttcggtagtcgaaagtttttttattgttcgtttttatttttattggtcgggtagatgttttggttttgggtaggaggatttgaggggttggtcgtggaagaaggtaggtgggaaggagttggcgtagtgttcggttcgtcgttttcgttggagttatacgatttggttaagtttacggtaagttttattattaattttatatttattattatcgtatagagaatggttatatgtttcgtttgaatgtagtattttttagagtttttttttttcgtaaagtttatttttgtttttaaagttaagtgttatatataaaaagatgttaaatttaattaattaacgttagtagattttttttttaaattggaaggaattttttgatttggtagtttgttttcgttttttttatatttttttttttggttttttgcgtttttttttttttttttttacgtttttattagttatttaggatgaatgcggaaataaggggggtggaatgaggatttcgtaagaggagtcgagtgggaggaagagggttggtaagaagattgttatagttttttttataaacgacgtatttttatttttattttttttgtattgtagcgagttaaatataaaatagggtttcgtttattagttaacgggaggatgagttttcgttaaagtttcgttagtagtttttagggagtaagcgtttgggtgaggtgtgtttacgatagaaaattttaatttttgttatttagtttggggtttttttttgttgtgttcgtaattttttttttttaattaaagggttttttgaattttagttattttattagatagtttgttaaagaagttaagtgtttttttttatttttttttttttatattatgtaaatattttaattttgttttttgaagaagttatattttggaattgggtgtttagggtgatttaaggattatttaggtatttagtaaatatttgtcgaattagatttggaaagtatagttaggtaaatttaaattagtttagttggtgttgggtgaatgagagagggggaatttaaagaaattagttaaagtagtagtggagttggaaagtttaagaagagagagggaataagagggggagaagtttgaaaggatagagggataaggaagaaggtttatttgtttttgtagtgtgtttttaagtgagattgatttttttagattttgatgtggtagagtacgtttaaagtagattttagatgtgaaaattgatttgttgggaaatttattatttatgtaaatttattattttgtttttgaatgataagtttaggaagaaaaattttaatgaattttatatttattggtagtttagttatggattgatatttagagaggttaagttattgtttaaggttatatatttggtaaatagtagaattggggtttgaatttacgttgtttgagtttaaagtttatatatttggttaggtgtggtggtttacgtttgtaattttaatattttgggaggttgaggtaggtggattatttgcggtcgggagtttgagattagtttggttaacgtggtgaaattttgttttttttaaagatataaaaattagttaggcgtggtggaatatatttgtaattttagttatttaggaggttgaggtaggagaattgtttgaagttgggaggcggaggttgtagtgagtagagatcgtgttattgtattttagtttgtgtgatagagtaagattttattttaaaataaataaataaataaataaaattaaaaaaattaaagtttatatattaacgatcgtattttattgtttgtttttatgttttgaggaggataaatatttaagggttaagtaattatgaaaaatttggtatttttttagatataatttatggatattaatagatttatttgttaagtaaataatgttgggttaaagtgaaaaatttttttttattattttttatttttgtagagtttttagatggtgatatatattgtgagttttttagagaggaaatacgacggagtattttttttatttagttgataagatagttttttttggtgaggtattttttgagggttttttgttttatagagtatattttgagaaacgttgttttaaacggttttaaattataaattaaataaataaataaaaaataaaattttaaaagtaaacgggtttattttattttgtaatatttttgttgttttttttataaaatagtagtaatagaaaaagaattaaaggaaaaagggatatgtttttttaaattgtaggtttattttgtattgattaattttatattttgaagtaattttaaattttttgagattatagtatgtttaagtttggtatattaattttttgaattttagtttttgaaattttttttttattgaaaagattatttgatattttaataaatgtttgatgggttaaatattttgatatgttttttaggaatgaaaggtaaaaatgtggtttaaatttatttaaatatagtgaaaggaaaagtaaaaagtatttggaagaatgtatataaaattatgttaaattggaagtattttttaaaattttagatgtggtaaatatttgaaattttttaaatttgattttgtggtaaatatatatgaaattttttaaatttgtttttatttataaagataataattttattattaggttttatgtatagagaagataatagatttttgggttgggtatatttaaggaagattaagaatggttatttgttatgaaaaagttttattattttgtttgaaattttattataatgaatatattatttaaatgtatttttttttgttagaagaaataaaatattttaagtttatatatggggtgtgtgtgtgtgtaggttttgagtttatagtttagttttagttatagtattttattagtattaatttgtgtgagttgattgtatttaatgaagggtattatattttgtgaggattagtatattagggtgatttaatatagttagatgagtagaggtagaagggttagtatgtgtattattataggtatttttttagattaaatagattatattgggtaattttacgttgaatgaatttatattggatataaataattttaaacgattattgttggttaatttttatttattaggtttaagttagtggagtgaaagaataatagtttattgtaggttttatatgataatttttattttttttgatatatatattatcgtgatttattttgagtattaaaattttagtatttgtttttgttttttatttaatatttaatagatatttgttttttatttaatatttaataaatgtttattgattgtttagtgaataataaatgaataaataaatgaataaggagaggaaggaaaaataataatttagaatgggaggggttaatagatatattgtgttaggaatgttgagagaaattttgttcgaattttagaaaagattagaaagatattttttggggtgaagatttggaaattatatttgattttgagtaggtgaggaaatttttggtaaatttttttttataggcggtagattgatgtaagagatttattgtaatattaaaggttaagtatgtattttttttttttatttatagtttttatttaaagtttttttattaggtattaggaattatatattttatagagttattgggttttttgtgtatatacggtgttgttttagtttgttttttgttgttataatatatatttgaggttgggtaatttatagagaaaagaggattatttagtttatatttttgtaggttaggaagtataagaagtatggtattagtatttgtttggtttttggcgagggtttttatattattataacgttagggaaggttaaaagggaagtagatacgtgtaaagttgtaaaatttaaggtgtattttggttttatgatagcgtagttttacgggagttaatttatttttataagaattaatttagttttgttagagtaagaatttatttattgttgtagaatatagaagggtattaagttatttatgagggtagagttgttatgatttaaatattttttattagattttattttataatattgttattggggattcgattttaatatgcgttttcgttggaataaataagttatagttatattataatatgtgttgttggtttatttgggtattaggagtattttaggaaatgtagttagtaattaatattattgtgtgattatttggttggttttttaattagtgatttgagttgaatgttatggtttaaggttgattatttgaggttaggagtttaagattagtttggttaatatagtgaaatttcgattttataaaaatataaaatttagtagggtatgatggcgggtgtttgtaattttagttattcgggaggttgaggtgggagaattttgtttgaatttaggagtcggaggttgtagtgagtcgagattatgttattgtattttagtttgggcgatagagcgagatttagttttaaaaaaaaaaaaagtggtaagttagatttataatggaggaaatagaatttgtaaattaggttgtatatatagggaataaggagggttcgaattagtttttttttattttgttatagggttattattattaaatttataaattttataaatatttttggttaatttagttatttttaaattttaaaggtttagtgagttgtgagagttgaaaaaggagagagttattgtaattgatttggttaatcgtgaggtttaaagttatattggttatgttttttttgatgttggtaaatttatttgtatttttaatgtttgtgttttatttgttattttttatttggcgttaataattgttttaaaaggtttagttggttttaagattaagtgaattagattaattttttttaagagttgaaaattgatgtagatgttaggagtagttttaagatataaaatgtttagtatgttatatttaatttttattggtgggaaaatgatgaatttgtttaatgattggtataataaagggagagggaggaaagatgaggaaaaggagaagaagaaagagataagaggtaaaggaaagggagaggaaaaaggaggatttttaaaatagatgagaaggaaaataaatttttaaaatatattaaatataatttaataaaaaataaaaattaggttaggtgaggtggtttacgtttgtaattttagtattttgggaggttatggtaggtggattatttgaggttaggagtttaagattagtttggttaatatggttaaattttgttttaattaaaagtataaatattagttggg

SEQ ID NO: 629 - DNA, 9832 bp, Artificial Sequence
  chemically treated genomic DNA (Homo sapiens)
ggtggggttagataagagaataaaagtaggttgttttagatagtagtggtaattttttcgggtttgtttttgtgttgtggaagttttgttttttatttttttgtagtaatttttgtttttgtttattgtttgggtttatattgtttttatgagttgtaatatttatcgcgaaggtgtatagttttattgttgaagttttcgaaattacgaatttattaggaagaacgaataattttagacgcgtttttttaagagttgtaatatttatcgcgaaggtttgtagttttatttttgagttagcgagattacgaatttattagaaggaataaatttcgaatatattagaatatgagaaggaataaatttcggatacgcggtttttaagaattgtaatatttattgcgagggtcggcggttttatttttgaagttagtgagattaagtatttattaatttcggatatattattagttagttaatttttatttatttttttttaaatattattttttgagagaagtttattttgatcgtttatatttgggtttaagagtatttaaattttttttttatagtatttggtatatttgatagagaaatagttaatggtgtacgtatttagtattgtttgtttttttttgttggaatagaagttttttggtggtagagacgcgtttatagagttttattgttgtattattagtatttaacgcggtttttaatagtttttaacggtattttagaaagtgtttcgattgaaatattgttagagattggatttttgtgaagtttttatgggaattgtatcgggaaagagaagattttttttgttagaattagaaggagaatatattttttaaagggagattagtttataatttttttattgtttttttaggtaaggggttttttgtggtgaaaatagtttttttagttagattttttttttttttaaaagtttttgttattttaaaaatattaatatataaatataagtttatggtataaagatataaagggtatatagaaaaaagttttgtgtttaggtattgatgtttttatttagaagtaataattttttagaaatagtttatataaatataagtaaatttatatatattttttttacgtatatatattttttatataaagatagtatattatttatattgttttttattttgtttattttatttaataatatagtttggattgggcgcggtggtttatgtttgtgattttaatattttgggaggttaaggttgggggattatttgagtatcggagtttaagattagtttgggaaatatagtgggattttatttttataaaaaataaaaattagttagatgtagtggtatatgtttgtagttttagttattttggaggttgaagtgggaggattatttgagtttaggggttgaggttgtagtgagttatgattgtattattgtattttagtttgggtgatagagtaagattttgttttaaaataaataaataaatatataaattaagtttggagattgttttatatttttttatatagagttattttatttttttttatttttatgtattttattgaatgtatgttttataatttatttatttaatattttatgtatggatgtttaggtagtttttagtatttggttattataaatattaatgttttgaatatatttgtataaattttattttatatttgtttgattatttgtatgataaatatttagaagtagaatggttgaattaaaagtatagatttttttttttttaagtgagagtaagtttattaagaaagtaaaggaataaagaatggttaatttataggtagagtagtaaaaagtatagatatttaaagttttggtagaaattatttaatttttttttgttttggattgaattgtgttttttttaaaaatttatatgttgaagttttaatttttaatgtgattgtatttggagatgggatttataagaaggtaataaaggtgaagtggggttataagaatgggttttaatttaataggaatgatgtttttataagaagacgaaaaggaaaagatattagagattttttttttttcgcgtggatatagggaagagggtatgtgaggaagagagtttttattagatattaagtttaaaggttttgattttgaatttttattttatagaagggtgaaaatataaatatttgttgtttaagttatttagtttgattaatatttttcgtagaggttgtataaatttggagaggttgtattaattatttattaattaatttatttatttttatttttttgagataatgttttgttttgttgttaaggttggaatatagtggtatgattttggttaattgtaatttttatttattaggttaagcgatttttatgttttagttttttgagtagttgagattataggtatttattattatgtttggttaattattgtatttttagtagagattggtttttattattttggtttggttggtttcgaatttttgattttaagtgatttatttgttttttaaagtgttgggattataggtatgagttatcgcgtttagtcgaggttgtattaatttaaatttgtatttttattagtattataagagagtaattatttttttaaaatattattaatttaaaatgttgttaaatttttttatttttgttaatttaataggtgaagaaagaatgatattttagggtgtttttattttgtatttttattaaatgaggttgaatatttttttatggaattgatagatatttttatttttttttttgtgaattgtttattatattttttatttatttttttaatagtttgttattttttttttattgatttataggtattttttatattaaggagattaatttttcgtgatatgagttttaaatattttatttaatttgttgtatattttgttttgttttgtttttgagacggatttttattttgtggtttaggttggagtatagtggtttagttttagtttatcgtaatttttaatttttcgggtttaagttatttttttgttttagttttttaagtagttgggattataggtatatgttattacgtttagttaattttttgtatttttagtagatatggggttttattaagttggttaggttggttttaaatttttgatttcgtgatttattcgtttcggttttttaaagttttgggattataggtgtgagttatcgtgttttatttgtatattttttaatattgtgaatatttttatttaaaaatttttaaggaattaaattttttagtattttttttttgttttttgagttttgtataatatttttaaaggtttttttaagttaatttaagaagaagtgttttatttttttttttattattttaagaatttaataagagttttgatttatttgaaatttattttgatgtgtggtataagataggaagttaattgtattttgataagttagttgttttaaaattatttattgataaattttttatttttttatggatttgaagtgttatatttagtatatatttaatatatgtattttgatttatggattttttaattatagtaatattatattatgtgtttatatttaggaaggttggttatattttattattattttagaaatttttttttgaattttagaattagtttatttagttttaaaaaataattttggtgtttttattgggaatgaattaaatttaagattaatttgggaagaaatgatcgttttataaagttgagttgttttatataggatggtgatttttttttttatttgtttaagttttatttggtgtttttttatatcgtttttaagtgttttattgatagtattttatattttttaagtttatttttagaaattttattttttgttgttgttgttattataggttgggtttttaattatagtttttgatttgttattgattgtaggtatgaaaattattggtttttatatttttggtattagttagtttattaaattattttttataattattgttagtagatttaagttttttaggtaaaaaatgatatttttaaataatgaaaaattaatttttttattttttatgaaggatttttttttttttttttgagatggagttttgttttatgttggttgtgtagtggtacgattttggtttattgtaattttagttttttaggtttaagtaatttttttgttttagttttttgagtagttgggagtataggcgtttgttattacgtttagttaatttttgtatttttagtagagagagggttttattatattggttaggttggtttcgaatttttgattttaggtgattcgtttgatttggttttttaaagtgttgggattataggtatgagttattgcgttagtgaaaggtagaagttttattttttttttttttttttttttttatataataagattttttaaatgagtttaaaagtttaaagttttaaaagtataaaagagtaaatagtagaaagataatttttttattttattgtttagattttttttttataggtaattaatatttttggtagtgtgttttatattattttatagacgttttatgtatatgtagtaagtatagttgttttgaaagtgtttttggtaatatagttttataagtttaggtagggttaaatatgagattttttttttgtttttttaggaattaaagaaagaaaaattgaaaagatatagggtttgagttttaagatagtttttaattttttttggtagagggttttagattaggtaggtttggaagagttggggttttagtttttatttttaatatatttattttttattaataaattttatttttttattttttttatatagataaattgtagatgtacgtgttttttttattattaaaatagtttatgaatattttgtaatttgtagtttttgttacgtttagggtttgagatttggagttggatatgggatttttgtttgtggtttttttttttttagagttttttagtgtagtttagataatatttttgagagttttttgagattattgaagtaagaggttttaaggtttgttttaggtttttttagttggtaggttttttttattttatttttttttttagggttgttaggcgtatttttgtttgggttttttggtataagagataaaatgaatagggttatttttagtaattggtttaggagatattagtagagagggagtaggagagaagaaatatgttagggtgtttataggagtagtggggggaggttttgttatttttagatttttaagttaataaaagtgtttttatattttttgtttggaagatagaaagtttagaaggagtttagaagtaatagtttgagagaggcgttttttgcggttaagtggataagaggagcggtttgtaattatgggatagggtgagttaagttagcgttcgatagggtttgttggattgtatgtagttttcgtagtattatttgtttttattaaaggaagtgggatggatggtaggcggggagatggtggtataattatggtgggggagggggtattggtgataatgaggtggttgtggggggggggtgtggtaggtgggtgttggtagaggtgatagtgagttggttgtggagcgtggtgtgatgatgggtgttggtggaggcggaggcggaggtgatggtgatgttgttgtggggtggttatggggtagtatgttggggtaaattggttatgatagttgtatgatggtgagatggtgatggtggttaatatggatttatatttttattttaaggttattatagtataagtgtttatagtttattgatataaatgagagatattttgggtagtatgaaggtgttatagtttttatattaaatgggagagaaggagaggagggagttagggaatttatttaaaaggggtagaggtagatataaagtaagaaattaatataggtggttagagtcgtagtatttttggtaggaattattatattttggtttgggaattgtttggttgttttgtgttttgggagaagtaagcgggtaggtagagggaaatggtgtagaggtgtggggatagtggggtgtagttgtggttttgttgttatagaaattgttttatttttttgttttggttggtttggtgtgcggagggtaattgacgttgagattaatagttgagaagggaagaaaaagaattttgggtgaattaagttaataattttagttacgttttgtgaaaatagggtagatattaataaattgttttttttttttttttttttaaacggagtttttttttgttattaggttagagtttagtggcgtaatttcggtttattgtaattttcgttttttgggtttaagtgatttttttgttttagttttttgagtagttgggattataggtatttattattatgttcggttaattttttgtatttttagtagagacggagttttattttgttggttaggatggtttcgattttttgatttcgtgatttttcgtttcggttttttaaagttttgggattataggcgtgagttattgcgtttggttaaatcgttttttttattttgtagagattagataaattaaaatttatttaattagagaaatataaagatattaggagattgtttagtttagttttaaattagaggatgtttttgggtattaaattttttttaggtagtgggtggtagagggtttagtagttattagatgagaattattgagtatgaatttatgatatgttgtagtggttggagttggtttgtgttgatttgtaagagttaattgttaaattttgaggaattttgtgaattagtttttaaatataggtattattaaaaattaaattgtataaatttataagtaaaaaatttatattaaaaagaaagataataagtattttaaatttattattttttacgtattttatttttttttatttttatgtttttgagggcgtttatgttttttgtatttttgtgttggaaaaattatatgatgatgtgttagttcgcgtttttttatagttttgcgtttgttgatattattttagtagttttagattggttatagggggcgtagtttatataatagaatttggtaaatgttgtaatttagtacgttttttttttttatcgttttttttttttagttagtcgttaaatatagaattgtttgaggggtatatttgaggtagttttggggtattgtgaaaggtagagagggaggagggtggggtattgtgtatttttgaagagtattttatatgattttcgggttaatataattttttatgggttgtggtataaataggagatggtgagaaaatacgaaggtattattgttttaagatttagtgggagagaaggggaggtaggagttaatgaatttatttaaaaggggtagaggtagagataaattaagaaattaggtagatttaaagaatgtagaaattttaggggttttgcgagggtttggtagtataggtgggggtttgaggtttttgtgatgtatttgagaaaattttttttaaggtcgttttaatgtttttatttatttattgacggagtaaatattgattggttatttattgagttttgttgggatagaggatgtagatatgagaaagtattgtattttggggagtttatagtgaaaaggggagtagaggattaagtaggtgatgggtattaaatgggataagtgttgaagaaagtggagtagagtattgtgggagtttagaggattgatttttgttaggaggagttagtgaaggttatagaggtgggtgtttttggattttggaagatgagtagatatttgttaggtagagaagagatggtgggagttttttagatagaataagaatttaaatgaattttagtgatttttgtcgtaatattatggttattacgtgggttcggatatacggaggtttaagttatatgatttaggatgtgattaaggtattttattatttaatttaatttaattagtttgtagaggtagggtttattttgggttttagtacgagttttgtgttaagtagaaagaggaatcgtttttggtttttgagtgttgttgtattttagtttataaattttagtttttttatggttattttatttatagttatggtttgattaagttaagtggaggagggggatataaggatgtaaggggtatttagggatatgaggattagatatagagaggtttttttttttttttgtatatttttatatttttttatatttaataatgttagtttttttgttttaaatagatattattggtattttttattatttttattattagtgaaagaaaagtagaatattttttttttttattttttagttttaagttagagagattgggaattgaggaaaatttgaagtaggagtattttgaatttgataagattcgttttgtagtttaaaggattttgttattagggttatattatttttttgaagtgggttagattttattttatatttgtgagtaaaagttatagttttttttttgtggtagttgagttagtgtaaaaattgtaggttgttttttagattaaggagatttttaatggttttttgttattaaaggaataaaaagtatataatttttttgttgtaaaaataaaataaaataaaaaaattaatttttttttttagtattgttttttattttgcgtttgttgaatatattttttgatttttttattttttgtttttttttttttttttgtattagtcggtttttatattgttataaagatatatttgagatggggtaatttataaagaaaagaagtttaattggtttatggttttgcgggttatataagtttttgtttttggggaggttttaggaaatttataattatggtagaatgtgaaggggaagtaagtatatttttatatggttggtgggaaagagagagagagagtgaaggaggaggtgttatatatttttaaataagtagtattagggggatggtgttaaattattagaaattgtttttatgatttaattattttttattaggttttttttttaatattggggattataattcgatttgaaatttgggtagggatttaaagttaaattatattatttttgttaaatgagaattgattaatagattgttgtaatatttttgagttattttcgtgaagggtttttttgggttgtatagagttgtgagtttatagtaagattttaggttaaaaagttattatgtatagttttgggtgagatagttttatatttagttttattttttttatttataaaataagagaattggatttagtgattttaaaattagttttaaaaattatttgattgtgttttaagaaaaaatgagtaggtgcgagaaagattttgggttttatttattgtttgtggattgggattagaaaaaggaggttaataatgagagtaagtaacgtatttattaataataataataataataatagttttatttaatgggatttattgtgtatttgatacggttaaatgtattgtatattatttaatttttataattttgaagggagggatgattattttaaggaaaaggaaattgaggtttagggtggttaagttatttgtttgggattgcgtagttaaaacgtaagtggagtcgaggattagaattttggtttttttgattttagaatttttgtttgtatttatattgttatatgtatttagttttcgtgattttttttttttttataatagt

SEQ ID NO: 630 - DNA, 9832 bp, Artificial Sequence
  chemically treated genomic DNA (Homo sapiens)
gttgttgtgggaaagagagaagttacggaaattaagtatatgtgataatgtaagtataagtagagattttggagttagagagattagggttttaattttcggttttatttacgttttagttgcgtaattttaggtaagtaatttaattattttgagttttagtttttttttttttagaataattatttttttttttagagttgtggggattagatgatgtataatatatttagtcgtgttagatatatagtaagttttattaaatgaaattgttgttgttgttattattattaataagtgcgttgtttatttttattgttggttttttttttttggttttaatttataagtaatgaataaaatttaaaatttttttcgtatttatttatttttttttagagtataattagataatttttagagttagttttgagattattgagtttaatttttttgttttatagatgagaagagtgaggttgagtgtggaattgttttatttaagattgtgtatggtagttttttgatttaaagttttattataaatttatagttttatgtagtttagaaaaattttttacggaggtggtttaagagtattataatagtttgttaattaatttttatttaatagaagtgatatggtttggttttgggtttttgtttaaattttaggtcgaattgtaatttttagtgttagaggaggggtttggtgggaggtgattggattatgggggtagtttttaatggtttagtattatttttttagtgttgtttgtttaaaagtgtgtagtatttttttttttatttttttttttttttttttattagttatgtgaagatgtgtttgttttttttttatattttgttatgattgtaagttttttgaggtttttttaggagtagaagtttgtatagttcgtagaattatgagttagttaaattttttttttttataaattattttattttaggtatgtttttatagtagtgtgagaatcgattaatataagagggaagaaaaaaataaggagtagagaagttaaaagatatgtttagtaagcgtaagataaggaataatgttggaaaaaaaagttggtttttttgttttgttttgtttttgtagtaaaggaattgtgtattttttgtttttttaatagtagaaggttattgggaatttttttggtttgaaaggtagtttgtagtttttgtattggtttaattgttataagagagaaattatggtttttgtttataggtatgaaatgaggtttaatttattttagggaagtgatatgattttgatagtaaggttttttagattataagacggattttgttaaatttaggatatttttattttaaattttttttaatttttagtttttttgatttagagttgaagagtagaggggaaggatgttttattttttttttattggtgatggggatgatagaagatgttaatgatgtttatttagggtaaaagaattgatattattgaatatgaagaaatgtgaaagtgtgtagaggagggaaggaatttttttgtgtttggtttttatgtttttgggtgttttttgtatttttgtattttttttttttatttggtttggttaggttatggttatagataaagtagttatggggaggttgggatttgtaaattgaagtatagtagtatttagaaattaaaaacgatttttttttttgtttagtataaagttcgtgttggggtttagggtaagttttgtttttgtagattggttgagttggattggatggtggaatgttttagttatattttaagttatatgatttgagttttcgtgtattcgaatttacgtaatgattatagtgttacggtaagagttattagaatttatttggatttttgttttgtttagaaggtttttattattttttttttatttggtagatgtttatttattttttaagatttaaaggtatttatttttgtagtttttattgattttttttggtagaggttagttttttggatttttatagtattttgttttattttttttagtatttattttatttgatatttattatttgtttagttttttgtttttttttttattgtgagttttttaagatatagtgtttttttatatttgtattttttgttttagtagaatttaatagatagttaattagtgtttgtttcgttaatgaatggatgagaatattgagacggttttaaaggagatttttttagatatattataggggttttaggtttttatttgtgttgttagattttcgtagggtttttgaggtttttgtattttttaggtttgtttggttttttggtttatttttgtttttgttttttttaggtggatttattgatttttgttttttttttttttttattgggttttgaggtaatgatattttcgtgtttttttattattttttatttgtattatagtttatgagaagttgtgttaattcggagattatgtggaatgttttttagaggtgtataatattttatttttttttttttttgttttttataatattttagagttgttttagatgtgttttttaagtagttttgtgtttaacgattggttggggggagggggcggtgaggggaaagggcgtattgagttatagtatttgttaagttttgttgtgtaaattacgttttttgtggttagtttgaagttattgaggtgatgttagtaagcgtagagttgtgaagaggcgcggattggtatattattatgtggtttttttagtatagagatataggagatataaacgtttttaagaatataaaggtaaaaaggagtaaaatacgtaggaagtgatgagtttagagtatttattatttttttttttaatataaattttttatttgtaagtttatataatttaatttttaataatgtttgtgtttaagaattggtttataaggttttttaaaatttagtaattggtttttgtaagttagtataagttagttttagttattgtagtatgttatgagtttatatttagtgatttttatttggtggttattgggttttttgttatttattgtttggaaagaatttagtgtttaggggtattttttggtttgggattagattaaataattttttgatatttttgtgtttttttgattgagtagattttaatttgtttggtttttatagaataaaaagaacgatttggttaggcgtagtggtttacgtttgtaattttagaattttgggaggtcgaggcggaggattacgaggttaagagatcgagattattttggttaataaggtgaaatttcgtttttattaaaaatataaaaaattagtcgggtatggtggtgggtgtttgtagttttagttatttagaaggttgaggtaggagaattatttgaatttaggaggcggaggttgtagtgagtcgagattgcgttattgaattttagtttggtgatagagagagatttcgtttaaaaaaaaaaaaaaaaaggataatttattggtgtttgttttatttttataagacgtggttgagattattgatttaatttatttagagtttttttttttttttttttagttgttggttttagcgttagttgtttttcgtatattagattaattagggtaggggagtgaggtagtttttatagtaatagaattatagttgtattttattgtttttatatttttgtattatttttttttgtttattcgtttgttttttttaggatataaaatagttaggtaatttttaggttaggatataataatttttgttaagagtgttgcgattttgattatttgtgttggttttttgttttgtgtttgtttttgttttttttaggtggattttttgattttttttttttttttttttttatttggtgtagaagttgtgatatttttatgttatttagggtgttttttatttgtattagtaagttgtgaatatttatgttatgatgattttgggataagaatataaatttatgttaattattattattattttattattatataattattatgattagtttattttaatatgttattttataattattttatagtaatattattattattttcgttttcgtttttattagtatttattattatattacgttttatagttagtttattattatttttattagtatttatttattatattttttttttatagttattttattattattagtatttttttttttattatagttatattattattttttcgtttattatttattttattttttttaatgaaaataggtgatgttgcgggggttgtatatagtttagtaagttttgtcgagcgttggtttggtttattttgttttatggttgtaggtcgttttttttatttatttggtcgtagaaagcgttttttttaaattgttgtttttgggttttttttgggttttttgttttttagatagaaaatatgaaggtatttttgttggtttaagaatttggaaatagtaaaatttttttttattatttttgtgagtattttgatatgtttttttttttttattttttttttgttggtattttttggattagttattgggagtaattttgtttattttattttttgtgttaggaggtttaggtaggaatacgtttggtagttttgggggagggggtgggatggggaagatttgttaattagagaagtttagaataaattttgaagttttttgttttagtggttttaagagatttttagagatgttatttggattgtattggaagattttggaagagaggaggttataaataggagttttatatttaattttaaattttaggttttaaacgtgataggggttgtaagttgtaagatgtttatgggttgttttgataatagagagaatacgtgtatttgtaatttatttgtgtgaaaaagataaggaagtagaatttgttggtgaaaaataaatgtattaaaagtagaagttggggttttaatttttttaagtttatttggtttgggattttttattagagaaggttgggaattattttgggatttaggttttatgtttttttaatttttttttttttagtttttgaagagataagagaaggattttatatttggttttatttgggtttgtgaaattgtgttattagaagtatttttagggtagttgtatttgttgtatatatatgagacgtttatagaatgatataaaatatattgttaaaaatattggttgtttgtggggaggggatttgggtagtggggtagaaaggttatttttttgttgtttatttttttatatttttaaaattttgaatttttgaatttatttgaaggattttattatgtaaaaaaaaaaaaaaaaaaaaaaaatgaaatttttgttttttattagcgtagtggtttatgtttgtaattttagtattttgggaagttaagttaggcggattatttgaggttaggagttcgagattagtttggttaatatggtgaaattttttttttattaaaaatataaaaattagttgggcgtggtggtaggcgtttgtatttttagttatttaggaggttaaggtagaagaattgtttgaatttgggaggttgaggttgtagtgagttaagatcgtgttattgtatagttagtatggagtaagattttattttagaaaaaaaaaaaaaaattttttataagaaatgaagaagttaattttttattatttgaagatgttattttttatttggaaaatttgaatttattaataatgattataaaaggtaatttagtgagttggttaatattaaaagtatagaagttaatagtttttatatttgtaattaataataagttagaaattgtaattaaagatttaatttataatagtaataataataaaaggtgaaatttttagaaataaatttaagaaatgtgaagtgttgttagtaaaatatttggaaacggtatggagggatattaaataagatttgagtagataaaaaggaagattattattttgtgtaggataatttaattttataaagcggttatttttttttaagttgattttaagtttaatttatttttaataaaaatattaagattgttttttgaaattaggtaaattgattttaaggtttaaaaggaaatttttaagataataataaagtgtgattagtttttttagatatgaatatataatatgatattattgtaattgaaaagtttatagattaaaatatatgtattaaatgtatgttaaatgtggtattttaaatttatggggaaatgaaggatttattagtaaatgattttgggataattagtttgttaaaatatagttggttttttattttatgttatatattaaaataaattttagatggattaaaatttttattaaatttttaaagtaatagaagaaaaaatgagatatttttttttaagttaatttgggaaaatttttaaaaatattatgtaaaatttagaagataaaaagaaaatattgagaaatttgattttttaaaaatttttaaatggaaatatttataatgttaaaagatatgtagatggggtacggtggtttatatttgtaattttagaattttgggaggtcgaggcgggtggattacgaggttaggagtttgagattagtttggttaatttggtgaaattttatgtttattaaaaatataaaaaattagttgagcgtggtggtatgtgtttgtaattttagttatttgggaggttgaggtaggagaatagtttgaattcgggaggttggaggttgcggtgagttgaaattgggttattgtgttttagtttgggttatagagtgagaattcgttttaaaaataaaataaaataagatatgtaataagttgggtaaaatatttgaaatttatattacgaaggattaatttttttaatataaaagatgtttataaattaataagaaaagaataataaattattagaaaaatgagtaaaggatatgatagataatttatagaaaaggaaataaaaatgtttattaattttatggaaagatgtttagttttatttaataaaaatgtaaaataaaaatattttgagatattattttttttttatttattagattggtaaagataaaagagtttgataatattttgagttggtgatgttttaggaaaatagttgtttttttataatattagtgggagtgtaaatttaaattggtgtagtttcggttgggcgcggtggtttatgtttgtaattttagtattttgggaggtaggtgaattatttgaggttaggagttcgaaattagttaggttaagatggtgaaaattaatttttattaaaaatataataattagttagatatggtggtgggtgtttgtaattttagttatttaggagattgagatatgaaaatcgtttgatttggtgggtggaggttgtagttagttaagattatgttattgtattttagttttgataatagagtaagatattgttttaaaaaaatagaaataaataaattaattaataaataattggtgtagtttttttaaatttgtgtagtttttacggagagtgttagttagattgggtggtttaaataatagatatttatgtttttatttttttgtaggatggaagtttaagattagggtttttaggtttggtgtttggtgaaggtttttttttttatatgtttttttttttgtgtttacgcggaaagagaaagatttttggtgttttttttttttcgtttttttataaggatattatttttattggattgaagtttatttttatgattttattttatttttattatttttttataggttttatttttaaatatagttatattgggggttagggttttaatatatgaatttttggggaggatataatttagtttagaataaagggaaattaagtggtttttattaaaattttaaatgtttatattttttgttgttttgtttatggattagttattttttatttttttatttttttaataaatttgtttttatttaaaaaaaaaaaagtttatatttttgatttagttattttatttttaggtatttattatataaatgattaaataggtgtaaaatgaaatttatataagtatatttaaggtattgatatttataatagttaaatattagaaattatttaaatatttatgtataaggtattaggtagataaattatggaatatgtatttaataaaatatataaaggtgaaaaagaatgaagtagttttatataaaaggatgtggaataatttttaagtttgatttgtatgtttgtttatttgttttgagatagggttttattttgttatttaggttggagtgtagtggtgtaattatggtttattgtagttttaatttttgggtttaagtgatttttttattttagtttttagagtagttgggattataggtatgtgttattatatttggttaatttttattttttgtagagatggggttttattatgttttttaggttggttttgaatttcggtgtttaagtgattttttagttttggttttttaaagtgttgggattataggtatgagttatcgcgtttagtttaagttgtattgttaagtggaataagtaaggtagagaataatgtgaatagtatattatttttgtgtaaagggtatgtgtgcgtggggagaatatatatgaatttgtttgtgtttatatagattatttttagaaaattattgtttttagatagagatattagtgtttaggtataaggtttttttttatatattttttgtatttttgtgttatgaatttgtatttatgtgttaatatttttaaagtaataaaaatttttaggggaaagaaaagtttggttgaaagaattatttttattatagagggttttttatttaggagagtaatggggaggttgtgggttggtttttttttggggaatgtgttttttttttggttttagtaaagagaattttttttttttcggtatagtttttatgagagttttatagagatttagtttttggtagtattttagtcggggtattttttgaggtatcgttaggaattgttaggaatcgcgttagatattggtggtatagtagtaaagttttatagacgcgtttttgttattaaggagtttttattttagtagggggagataaataatattaagtgcgtatattattagttatttttttgttaagtgtgttaaatgttgtaaaaaagaagtttgagtgtttttggatttaggtgtggacggttagggtaggttttttttagaaggtgatatttaagggaggataaataggagttagttagttaatagtgtgttcggaattggtgggtatttggttttattgattttaagaatgaagtcgtcgattttcgtagtgagtgttatagtttttaaaggtcgcgtgttcggagtttgtttttttttatgttttgatgtgttcggagtttgttttttttggtgggttcgtggtttcgttggtttaggagtgaagttgtagattttcgcggtgagtgttatagtttttaagggggcgcgtttggagttattcgttttttttggtgggttcgtggtttcgggggttttagtagtgaagttgtatattttcgcggtgagtgttatagtttataaaggtagtgtggatttaaatagtgagtagaagtaagagttattgtaaagaggtaaagaataaagtttttataatatagaagtagattcgaaggggttgttattgttgtttagggtagtttgtttttatttttttatttggttttatt

SEQ ID NO: 631 - DNA, 8451 bp, Artificial Sequence
  chemically treated genomic DNA (Homo sapiens)
gacggagttttattatgttggttaggttggttttgaatttttgattttaggtgatttgtttattttggtttttaaagtgttgggattataagtatgagttattacgtttgtttttaagtatatttttttagtttattttttttagtatgtaatttatagaagggtaatttgaattgtaaatacgatttttaagttaaaatttttgggttagttcgtgatgaagtagtaatttataaaagagatagtatagtaataaatgagataattatattcggaaatgtggaattattaatttttatgcgaaaatagtttatgagatttttgtgtttttttatttatgttatgcgtttttttatttttattttattttattttatatgtttttttttttgtttggattatttttattttattattattttttttttggtaaatttttatttatatttaaaaattttgtttaatgattttttttttgtgaaaattttgtggtaaaatttaattatttttgtttgtgtatattttttttttatttgtgtgtatatagtatgtgtttataattggaagggtgtttatttgttattcgtttgtttgttttgttaaagtgtgagtttttatagttatagggttgtgtgttagttttggtgtttgtatagtatttagttagtagttatatttagtgttgttgaattaatttttggtttaaaaatatgtttatatttgtttttttaaggcgttaatttaaattttttatttattttaaaaaataaataattttttggtattttaaaaattatatttaaataatagaaaaagagtttatttgaattttaagtattaattttaaaatgaattgtatgttttaaaatttgatttagtgatattatttaagagaatttttaaaaagtaaatttttatttttattttagtgtaataaatattaagttttattaaattattaaattgatttatttttttttttttttttgagatggagttttgttttgttgtttaggttggagtttagtggggtaatttcggtttattgtaattttcgtttatttaggtttaagcgatttttttgttttagtttttcgagtagttgggattataagtgtatattattatatttagttaatttttgtgtttttagtagagacggggttttattatgttggttaggttggttacgaatttttgatttaaagtgatttgttcgttttggttttttaaagtgttgggattataggtgtgagttattatatttagtttgttttttattttttggtttttttttttttttttttttttttttgagataggtttttttttttaggttggagtgtagtgattatagtttattgtagttttaattattggggtttaagtaatttttttattttagtttttcgagtagttgggattttaggtatgtattattatgtttggttaatttttttttattatttgtggagatggggttttgttatgttgtttaggttggttttaaatttttgggtttaagtaatttatttgcgttggttttttaaagtgttgggattataggtgatttattttttaattgtgttaaagaataaagtatttattttatttgtttttttgtatttaaaatggttttttatattttagatttagaaagataaatataagtaaattaataagtattttatttgtattatttgttgttttttaatagtttatatttagtttatttttgaagggtaaagattattgattgtttatttaatttttttattttgaatttagtgagatttttttttattttttataaatgtatgtttaaaatttgattttagtgtagaattggaattaaaatgtatgtaattttattttttatagtaggagttaaatgtttattaagtttttttttgagtttagtattttgtagttaaatgattattattttttagttacgtttttaaaaaaaattatgttggtttgtaataaaaattgtattttttttattaggtaagtgaattattttgttgggaagagtattttggtttcgagaaaaaaatgattttattttgaaaggttttttttttaatttttttttgtataaatttttagtttagtaatttgttagtattttggaaaagtgtattataaaataaaaattcgaattagataaaatatatttttggaatttttgaggtagattaatgaagttttgattttaggtgttagtaaaataaagtaggtatttttattttgtattgttttattttttagttttttatggtgttttttaaattttgatgttttgaagaagttttaatgtttgttatattagtaggagttgattatagggaagagataaatatagttttttttggaaaggtgaaggtttagttattagaattttgttttttgatgttgagaatgtatttttttcgaatagatggaaaagaggggtggagattattttagggatatattttgtaaaatgttgatattcgaagatgtatatagttttgtgttttggttatttttttaaattatgtttttggtgaaggtatatggagaggagagtagatgttgttagattacggtgtttgacgttatgtatttttttacgtttagtttgtttatgtgtatacggttgtagcgggattttggggtgtgggttaaataataagaataggggtttttttggggtttgttataaggtagagatgttttacggtaattagggatttaggggaagaggaaggaatatatatgttgataataagtagtttaatattattatttttattttatagatgtagttattgagtttagagaggttttataatttgtttagagttttttaattagtaaatagtggagtcgagatttgaacgatttaaagaggaaagtaaataagtagtttttttattatttttttttttttttaagatgagggttttgttatgttgtttaggttgatattgaatttttggttataagtgatttattattttggttttacgaagtattgggattatagttatgagttattatattgggttaaagttttcgtattgtaatttttaagatgtttttatttttaaagttaaaggttgttagagttgttgttttgtagggagttatgggatggggagttttcgggaaatttaggttggttttttaaatggtattatttaagttggttattaagtttttttagatttagttattcggttttttttttttttggttgtagagtaggggtttggattcgaggttgttgagtttttttttagtttttatgtttagtggtagtgatttattaattggtttattcggtggatgtaggggtgatgtagttttgttttgtttttttgagtgttgggtggttatgagagagggaggttatgagagggaggggagggtttttatttgtttagtgttattttttttttagtttattttaggttttttgtcgttttgggtttttgcgtgagtagttttttttattttgggcgatgttcgtttttattagtttaattttaagaagtttattttggggaggatagagggagtttttacggttttatatttttatgttttgtcggagatttggttaggtagagtggtgtttttttgattgagtttcgagtttttgttttttttttattttatataaagtcgtagttttggcgagggagtttagaggtttgaggatagtttgttgggtgtttggtattttttagattttttttgtttgggcggtgggtatttgtaattttttttgtttcgaattgtagtagaatgtgtgggtagggttaggtagatagagagtgggtgtttggatttattggttagattttaagatcgtttattttcgtcgttttcgtagttttttttaggattggttgatttattagataggggagggtgttgttttttattattatattttttgagaaaagttatgtaggtttgggagacgtttgtgttttaggagttttttttggtttgaagatttaaggttgtaaataggtgttgagagggaataagaaggggagttggggtgtaatatatttagtgatagattaggagtgagtgttgtggttatagattttaatttttataattgtagtgtgatttaggttaagttttttgtttatttcgatttttgttttaaataagtgaaaaggaaagttaagtttgatgagttgtggttttttagtgggtggatttgtatgtattatggattatatttattagggtttaggaattgttaagcgtttagtaggttgttattaggttttcgagttttttcgttaggcggttttatttggagtaagaggaaagtaaaggtttgaggtttagttaagagggcgttattttgtttggttagtttttcgataaagtagacgggggggtgtggagtcgtggtgatttttttcgttttttttagggtgggttttttgggtttgggttggtggaagtgaatattgtttgtagtaagaagaaggattgtttatgtgggagcgtaaggcggtagcggggttggaaatttatttttatatagttaatatttgttgttatattaggttaattaagaatatttttttttggtgtattaattatttgttattaaataaagggttgttattaggtggtaaagtaatatattgtagtagagtttatttgtaatttgagattagtggttgtaaggtattatttttgagttaagtaagtattaatatttttgttattttaattagaatgtaagagatcgtgtttttaaaattttttttgaatttgttattttgtttttttttttttgggtgatatatttggtagtgttggtgggggttattataatgttttttgttttagattttttttttttagatgggattcgagtattgattattttagttttgtattttttaggttagcgtggtttagtttgttgtgtagagtttaggggagataattacgttgtgtatatatgagattggttgatttggtaggattgtgtaattgttagaaggtcgtggggagtgggggttagtgtttgtagtttgttttgttttttttataggtttttagagtatcgttaggtgtagagttttatagtttttttttttaaggagtaattagagggtgagaacgtggagtttggtggataggtgaaagtattgggatttttttgtttagaaaggggaaagttgtatatttatattttagagggaagcgatagtagtgtttttttttgtgttgaggtataggtaaggagggtggtttgtaaagtttattggggagggtgatttttttttattgttttaatattatgttcgtagtttttttgataatattatgtaaaatgtgttttattagtttttagtgtataaaatattggtggagtttttcgttgtgttgggttagttattagtgttgggtattgtgggttaaggtagtgtttaggacgggtatagttttgtttttttaagttatggtttattgtggtaggatttgtttgtttagtgaagtgtgtttagttgtttttgttgttgggggaagttttgttttttgttttcggttgttttttatacgtttttatgtgttttttagtttttaatttttagttttgtttttaatatcgtaggggtttttagttgatttttttttatttttttaaagggtaggattttttggtagagatataacgtttttttggaaatgaaagaagttgatgtatgtttttttttttttgaattatttaaataagaggaatttatttttaggtattttttgttttgtttttattgtgggagtgtggttttagttgtttatttgattagttgatatagggtttttggggtttaggtattgttattgtttgggattgaaagatgaaagttatagggttaggtatagtagttcgtgtttttaattttattattttggaaagtcgaggtgggcggatcgttggaggttaggagtttgagattagtttggttaatatggtgaaacgttgtttttattaaaaatataaaaattagtaggaggtggtggtatgtatttgtaattatagttatttaggagtttgaggtacgagaattttttgaatttagggatagaagttgtagtgagtcgagatcgtattattgtattttttgagattttgttttaaaaaaaaaaaaaaaaaaaaaagggaaagtaatggtttggtttggttggagatggaatatgtattaacgtgttttacgtgtttttagtagggatagcgaaggtttgttttttggtatatggtagattgagtaaatgttgattagtgagattttgaggtattttagagttttataatttagagagggagatagattggaagtttaagggtggatatttgggtatgatttttaggacgaaggttgtagtcggttttaagaagtatgttggtgattatgagagaagaggttgtgggtttttttttttgaaagttgtttttataattatatgtggggtgataagggttttggtttaggggagggggcgaggtatatagggggttgaatttgatggtatgaggatttggtgatgggttgtggggaaagaattggagatgattttagggtttgagggtgggaagttgggagtttattgggattattgatagaaacgcggaggtggggggtgttaagttgatttttttgattagattttttatagaattgtaggaataaggcgagagttatcgttttgggtggatttttgtttggagttttatcgttggattattgtggataagtattttatagaacgatttttagtagtttaattttaggtttagaggggtagtttttgataggagtaaattttagggtttttgtaattttttagtagagttttaaatatttgatatgtagttaatggaggatatgtaagtggtggggtttttagtagggattattttttgttttgggtttttaagatagagcgaggggcgttgttggggcgtggtttgtaggggttttgttagaattcgatgttttttttttcgtttgggttttaattgtagtgtatttagagatttttttttgatttaggtataaggacggttcgtatatttatgtaggttattttgaataagaatagtttatgggttatttttttaggaatgaggaagatgaagagttagataataatgttgggttggtatttgtttgatagtgttttgttaagattatggttttttttttttttgattaaaaaagatataggagttagataaatggggattaaaagataattgagttgatgtgaaatgtaataggtaatattatggatatagaaagtagattagaggttgtttaggatttaacgtggagggtagtaggggagcgatagttgaagggtatggagttttttcgtgtcgatgaaaatgttttatagttgattgtggttatggttgtatatgtttgtgaatattttagaaattattggagggtttattttaaatgggcgaattgtatggtatatgaattatgttttaataaagtttttatatagttaagttgtgtggttatggttgggttttttagtagtgttttttaattttaaattgaatttatttttttagtatttgggtttttttattatttcgtttgttttgaggataagtttttttttaagaaggatagagtaggggttgtgggttattatttaggaaaggtgttttttttttttgggggagggaatttagaggttatggatagaagtttttttagatatgtaaaaaatatgaggttgtcgggcgtcgtggtttatatttgtaattttagtattttgggaggtcgaggcgggcggattacgaggttaagagattgagattattttggttaatatggtgaaattttatttttattaaaaatataaaaattagttgggtgtggtggtacgtgtttgtagttttagttattcgggaggttgaggtaggagaatggtgggaatttgggaggtaaaggttgtaatgagttgagattgtgttattgtattttagtttggtgatatagtgaaattttattttaaaaaaaaaaataatatgaggttttagaaatgtagtttttaaaattttttatttagggttgtgtagaagttaaattaggtttttatttttttaggatgatgaatagtttttaaagtttagtaggattgtgggtgattttgttttattgtttgttgtttttttatttttttagattatatatatataatatttatattatatataatatgtatatagtgtgtgtatatatatatataatatgtatatattaggttaagtgtaaataaaattagggatagggttggagcgtagtaggaaagagtttgttggggattagagtttttgggttgttagggtcgggttgggcgggtttcgttgttaatggtttttttttattttgtagg

SEQ ID NO: 632 - DNA, 8451 bp, Artificial Sequence
  chemically treated genomic DNA (Homo sapiens)
tttgtaagatgaggggaagttattaataacggagttcgtttagttcggttttgatagtttagagattttgatttttagtaggtttttttttgttgcgttttaattttgtttttgattttatttatatttgatttaatatatatatattatatatatatatatatatattatatatatattatatatagtataaatattatatatatatgatttagaaaaatggaaaaataatagataatgagataaaattatttataattttattaagttttgaaaattgtttattattttgggaaaataggaatttggtttggtttttgtatagttttgggtagggggttttgggagttatatttttgaggttttatgttgtttttttttttgagatggagttttattgtgttattaggttggagtgtagtggtataattttagtttattgtaatttttgttttttaggtttttattatttttttgttttagtttttcgagtagttgggattataggtacgtgttattatatttagttaatttttgtatttttagtagagatggggttttattatgttagttaggatggttttaattttttgatttcgtgattcgttcgtttcggttttttaaagtgttgggattataggtgtgagttacggcgttcgatagttttatgttttttgtatgtttgagaaggtttttgtttatgatttttgggtttttttttttaggggagaggagtattttttttgaatggtggtttatagtttttgttttgttttttttggagagaggtttatttttagggtagacggggtaatggggaggtttaagtgttgggagagtaagtttaatttggggttgggggatattgttaggaagtttagttatggttatatagtttagttgtgtaagagttttattgaaatataatttatatattatataattcgtttatttaaagtgaattttttagtggtttttaggatatttatagatatgtgtagttatagttatagttaattgtagaatatttttatcggtacggagaaattttatattttttagttgtcgtttttttattgttttttacgttaggttttaagtagtttttaatttattttttgtgtttatagtgttgtttgttatattttatattaatttagttgttttttaatttttatttgtttgatttttgtgttttttttgattagaagaggaagaaattatagttttggtaaagtattattaggtagatattagtttagtattgttatttagttttttattttttttatttttagggaagtaatttatagattgtttttgtttagagtaatttgtatgaatatgcgggtcgtttttatgtttgagttagaggagggtttttagatgtattgtagttaggatttagacggaggagaaagtatcgagttttgataaggtttttgtaaattacgttttagtagcgtttttcgttttgttttggaaatttaaggtaggaggtggtttttgttgggaattttattatttgtatgttttttattggttatatgttagatgtttgggattttgttggggggttgtagaggttttggagtttgtttttgttaagagttgtttttttaaatttagaattgggttattgggggtcgttttatgaaatatttgtttatagtggtttagcgatagagttttaaatagaaatttatttagggcgatggttttcgttttatttttgtagttttgtaggaaatttaattaggaaaattagtttggtattttttattttcgcgtttttattagtgattttagtgaatttttagttttttatttttaggttttagagttatttttaattttttttttatagtttattattaagtttttatgttattagatttagttttttgtgtgtttcgtttttttttttggattagagtttttattattttatatgtgattatggagatagtttttaagagaggaaatttataatttttttttttatagttattagtatattttttagaatcgattgtagttttcgttttgggaattatgtttaggtgtttatttttgaatttttaatttatttttttttttggattgtgaaattttaaagtgttttaaggttttattgattaatatttatttagtttattatgtgttagggggtaggttttcgttatttttgttggagatacgtgggatacgttgatgtatgttttatttttagttaagttaggttattgtttttttttttttttttttttttttttttgagatagagttttaaagagtgtagtggtgcgatttcggtttattgtaatttttgtttttgggtttaagagattttcgtgttttagatttttgagtagttgtgattataggtgtatattattattttttgttaatttttgtatttttagtaaagatagcgttttattatgttggttaggttggttttaaatttttgatttttagcgattcgtttatttcggttttttaaagtgatgagattagaggtacgagttgttgtgtttggttttgtggtttttattttttaattttaagtagtaatagtgtttgggttttaaggattttatgttagttgattagatgggtagttgggattatatttttataataaaaataaggtagggaatatttggaaatgagttttttttatttaagtaatttagaaaagaaaaaatatgtattagttttttttatttttagaaagacgttatgtttttgttaggaaattttgttttttaagaagatggagaaaagttagttaaaagtttttgcggtattgaaagtaggattaggggttagggattgggagatatatgggagcgtgtgggaggtagtcgaaggtagagagtagagttttttttagtaataggagtagttgaatatattttattgggtaggtagattttattataataaattatagtttgggaaggtagggttgtgttcgttttgggtattgttttgatttatagtgtttagtattggtgattggtttagtatagcgaagagttttattaatattttatgtattagaagttagtaagatatattttgtatgatgttgttaaggaggttgcgagtataatattagaataataaagagggattattttttttagtgaattttataaattattttttttatttgtattttagtatagggagaagtattgttgtcgtttttttttaggatataaatgtgtaatttttttttttttgggtagaaagattttagtgtttttatttgtttattaggttttacgtttttattttttgattattttttgggaaagagagttgtggagttttgtatttggcgatgttttaagggtttgtgagagaggtagggtaggttgtaggtattggtttttattttttacggttttttgataattgtatagttttgttaagttagttaattttatgtgtgtatagcgtggttattttttttggattttgtatagtaaattgaattacgttgatttgagagatatagggttgaaatgattagtgttcgagttttatttaaaagaagggaatttgggataaggggtattatgatggtttttattagtattattaggtgtattatttaggaagaggagggtaaagtgatagatttaaagagaattttaaaaatacgattttttgtattttaattaagataataagaatattagtatttgtttggtttaaggatggtgttttatagttattgattttagattataaataggttttattgtagtgtgttattttgttatttagtaatagttttttatttaatagtaggtggttaatgtattaaagaaaagtgtttttgattagtttggtgtgatagtaggtgttgattgtgtgggggtgggtttttaatttcgttgtcgttttgcgtttttatatgaatagtttttttttttgttgtaggtaatatttatttttattagtttaagtttaaggagtttattttggggaggacggagggggttattacggttttatattttttcgtttgttttgtcggagagttggttaggtagagtggcgtttttttgattgagttttaaatttttgttttttttttattttaaataaagtcgtttggcgaaggagttcggaggtttgatggtagtttgttgggcgtttgataatttttagattttggtaaatgtaatttatggtatatgtaaatttatttattaaagagttataatttattaaatttgatttttttttttatttatttaaggtaagaatcggagtaggtaaggggtttagtttaaattatattgtagttgtgaggattagaatttgtggttatagtatttatttttggtttgttattgggtgtgttgtattttaatttttttttttgtttttttttagtatttgtttgtagttttgagtttttaggttagaagggatttttagggtatagacgttttttaggtttgtatagttttttttaaaaaatgtaataataagaaataatatttttttttatttggtgggttagttagttttgggaaggattgcgggggcggcgggggtgggcggttttagagtttgattaatgagtttaggtatttattttttatttgtttaattttgtttatatattttgttgtagttcgagatagggagaattgtagatgtttatcgtttaggtagggaggatttagagagtgttaggtatttagtaggttgtttttaggtttttgggttttttcgttagggttgcggttttatgtggagtaaggggaaagtaaaggttcgaggtttagttaagagggtattattttgtttggttagattttcgataaagtatgggggtgtggagtcgtggagattttttttgttttttttagggtggattttttggggttgggttggtgaaagcgaatatcgtttagagtgagaaggattgtttacgtaggaatttaaggcggtagaggatttggggtgggttggggagggggtggtattaagtagatgagaattttttttttttttttatggttttttttttttatggttatttagtatttaagaggatagagtagggttgtattatttttatatttatcgggtgggttagttgataagttattgttattgggtatggaagttggagaggaatttagtagtttcgagtttaaatttttgttttatagttagggaaagagggggtcgagtgattgagtttggggaagtttgatggttaatttgggtgatgttatttaaggagttagtttgggtttttcggagattttttattttatggttttttgtaaaatagtaattttgataatttttgattttagaaatgaaaatattttggaggttataatacgagggttttggtttagtgtggtagtttatgattgtaattttagtatttcgtggggttaaggtggtgaattatttgtggttaggaatttaatattagtttgggtaatatagtaagatttttattttaaaaaaaaaaaaaagtaataaaggggttgtttgtttgtttttttttttgggtcgtttaaatttcggttttattgtttattagttgaggggttttgggtaagttatgaaatttttttaagtttagtagttgtatttgtaaaatggggataataatgttgaattatttattattaatatgtgtgtttttttttttttttttaaatttttaattatcgtggagtatttttgttttgtaatagattttagaggagtttttgtttttgttatttagtttatattttaaggtttcgttgtagtcgtgtgtatataaataggttggacgtgagggagtgtatggcgttaggtatcgtggtttggtagtatttgtttttttttttatgtgtttttattaaggatatgatttgggaggatgattaaagtataaggttatgtatattttcgggtattagtattttgtaagatatgtttttggggtaatttttattttttttttttatttgttcggagaaggtgtatttttagtattaaggggtagaattttggtggttaagtttttatttttttaaggagagttatatttattttttttttgtggttagtttttgttgatgtagtaaatattagaatttttttaaaatattaaagtttaggagatattatgaaaaattgagaagtaaaataatataaaatgagagtgtttgttttattttgttagtatttgaaattagagttttattgatttgttttaaaagttttagagatatattttatttgattcgagtttttgttttgtaatgtatttttttagaatattgataagttattgggttgagagtttgtgtaggagggggttggaggggaagttttttagaatgaaattatttttttttcgaagttaaggtattttttttaataaaatggtttatttgtttagtaaagaaaatataatttttgttgtaaattagtatgattttttttaaaaacgtgattggaagatagtggttatttagttataagatattgagtttagaggggaatttgatgaatatttggtttttattgtaagaaatgggattgtatatattttaattttaattttatattgaagttaaattttgggtatgtatttgtgaaaggtggaagaaaattttattaagtttaaggtgaagaagttagatgagtaattaatggtttttattttttaaagatggattaaatgtaaattgttagaaaataataaatgatataagtagagtatttgttagtttatttgtgtttatttttttggatttgaggtataaaggattattttaaatataggagagtaaataaagtaggtgttttgttttttggtatagttaaaaggtaaattatttgtaattttagtattttgggaggttaacgtaggtagattatttgagtttaggagtttgagattagtttgggtaatatggtaaaattttatttttataaataataaaaaaaaattagttaggtatggtggtgtatgtttgaggttttagttattcgggaggttgaagtgggaagattgtttgagttttagtggttgaggttgtagtgagttatgattattgtattttagtttgagaggaagaatttgttttaaaaaaaaaaaaaaaaaaaaaaaagaattaaaaaatgaaaaataggttgggtatggtggtttatatttgtaattttagtattttgggaggttaaggcgagtagattattttaggttaggagttcgtgattagtttggttaatatggtgaaatttcgtttttattaaaaatataaaaattagttgggtgtggtagtgtgtatttgtagttttagttattcgggaggttgaggtagaagaatcgtttgaatttgggtaggcggaggttgtagtgagtcgagattgttttattagattttagtttgggtaatagagtaagattttattttaaaaaaaaaagaaaaggtagattagtttaataatttaatggaatttaatatttgttatattggggtaaaaataaaagtttgttttttaaaaatttttttaagtgatgttattaagttaagttttaaaatatataatttattttaagattgatatttaaagtttaaatgaattttttttttgttatttgaatgtggtttttaaagtgttaagaagttatttgttttttaaagtaaataagagatttggattggcgttttggaaaagtaagtataaatatgtttttggattagaggttggtttagtaatattgagtgtaattattggttgggtattgtgtaggtattaggattaatatataattttgtaattgtaggagtttatattttagtagggtagataaacggataatagataaatatttttttagttatagatatatattatatgtatatagatggaagagaagtgtgtataagtagaagtggttaggttttgttataaagtttttatagagaaggggttattgagtagggtttttaagtatgaataggagtttattaggagaaaaataatggtggaatgggaataatttaggtagaaagaagagtatgtggaatggaatgggatggaagtgaggaagcgtatggtatgaatgaaaaaatataagagttttataggttattttcgtataagagttgatgattttatattttcgagtgtagttgttttatttattattatattattttttttataaattgttattttattacgagttgatttaggagttttaatttagaaatcgtgtttataatttagattatttttttgtaaattatatgttgaaaagagtgagttaagaaaatatatttggggataggcgtggtggtttatgtttgtaattttagtattttggaggttaaggtgggtagattatttgaggttaggagtttaagattagtttggttaatatggtgaaatttcgtt

SEQ ID NO: 633 - DNA, 5758 bp, Artificial Sequence
  chemically treated genomic DNA (Homo sapiens)
ggtttttgtttagggaattagtataaatgaggttgtttagtgggaaagttaattgagtagtagggttagggattaattggaggggttaatgaggagatgttttgtagtggttttgggtttgtgggttagtatttgttagaagatgaagagtaggtagatgacgggggtggggggtattgggtagggggatggtgggtattggtcggggagttttatggagttttttgttttttttttgttttttaaggatagatgaatggattttgtattgtttagtatttaagaggttttgggttttaaattagtttttttttttttagtagaattattatggttttaagtcgggtgtggtggtttacgtttgtaattttagtattttgggaggtcgaggcgggcggattatttgaggttgggagttcgagattagtttggttaatatggcgaaattttatttttattgaaaatataaaaattatcgggcgtggtggtatatgtttgtaattttagttattcgggaggttgaggtaggagaattgtttgaattcgggaggtggaggttgtagtgagttgagataatggtattattgtattttagtttgggtaatagagtgagattttattttaaaaagagaattattatggtttcggattgggtatggggtggattaagattttttttttttttttaagttgtaattatagttttttttttagaagttttaggggataaggtagttattatttttatttagtaggttatagtatttagaggttggtgtttttggtttattttttatttttttttaattgtagataaggatgtagggattttcgagaagttgtgtgaggggaggggtaggttttatagtttaaaaggtttttttttttttagttgtgtttattttatttatttgttttcggttttttttttatggttaggttagggtattgacgtaggagttagggttttgggagagtagaggttggggaaggggagtagttaagatagaacgtacgtgcggttatgtgtggatgtgagtgtgatggtgtacgttttaggattttggaagggattagaattaggagtcgagtggggttgggggagtttggatagtagttttgggaaggtttaaggtgagtagaggatgtaggggagtagggtttgagggaattaggttagttagaagtatattagtttttgttttttgatttttatttaattattttgttaaattatttatttttttttttttttttttgagatagggtttttttttgttgtttagtttagagtgtagtggcgtgattatagtttattgtagttttaatttttcgggtttaagagattttttgattttagttttttgagtagttgggattatagatgtgtattattatgtttagttagttaaataaaaataaaaattatagatatgggattttattatgttgtttaggttggttttaaatttttggttttaagtaatttttttgttttagttttttaaaatgttgggattataggtgtgagttattatatttggtttaaattttttttttattaagttttttattttattatatttttatggttttttatttttaataggtttttatttaagttagttttttagtttagtgtttttgattattttattttagataattttgtttgtgttttttttttttagttttggttatttgaaattttttatttttttttttttttttttttttttttttttttttttttgagatagggttttattttgttgtttagggtggagtgtagtagtaaaattatagtttattgtagttttaattttttgggttgaagtgatttttttattttagttttttaagtagttgggattataggtatatgttattatgtttagttaatttttgtatttttttgtaaagatggggttttattatgttgtttaggttggttaagttaatttttgggtttaagtgatttttttgttttggtttttcgaagtgttgggattataggtatgagttattttatttagttaaaattttttgttttgtatttatttttgtgtttattattggtaattttattagaatattagttttattagggtaggtatttttggttgtattatttattgttttatttttaggtttttggttaggggtaggtaggaaatttataaatattttttgaatgaatgagtgaatgttttttattttttttaaataaaatttaaattttttagagaggtatttaaggttatagatagtttgatttttttttaagtagtattttggttttattttttattttttttttttttatttttttttttgtttatttgtagggagattttttgaaattattgttacggaataaaagatgaaatgtttttgattattgtaaatataaaattgtatgtaggattgtgtataaataatgttaggttggattgttagaatgagttaatagtttgtgatgtgttttcgtttgcggagagtttatgaacggatttgtagttagggaggttttatattattaagatttttattttagaaaagtagatgtttatagttttgggaatggaatgcgatttttgtggagagtttataaacggacgtatgggggcggggggtatttgtttatatggataagatagggttataaacgtttttattttgttatggtttttttaggtttttttagggttaaggtatatttttttttgagaatttttggtttaattggttgtttagttttatgttttgtttttatggattgtttgtaattagtttttgttgtaattgttattgttgattagtattttgttaattataggttatggaaagattgtgtttttgttttaaggttttgttagaaattattgatgtatatattatattgtaaatttttatttttgtatattgtatttttgtatataaatgtattgtatttttatatataaatgttatgttaaagaattaatttatttttatgtgattattttattttataattaaatgattttaaattttttattaatttattttcgtttttattaaatttaataataaatgatggtatatttggtgtattgttgatattacgggattagaaggcggtgatttttcggattagtttttattattttgtgtgtgtttattattttttaatttgttgattcgtttgggaataaagagagagttttgttgtattgcgggttgttggttagatttcgtaatatttatttgattttttatttattttgttgaatcgataattttttatttattttatatttttttttattgatgttttatttttttttaaggttgaggttattgttatttttttttttaaattttttttgatttttttcggttaatttttatagtttagatttatatattttagtttttttttgtttttgagataggtttttattttgtcgtttaggttgtagtgtagtggtacgattatggtttattacggtttcgaatttttgggtttaggtgatttttttgttttagttttttgtatatttgggattataggcgtgagttattatatttgattaattattttttatttatttatttattttagagataaggttttgttatgttgttcgggttggtttcgaatttttgggtttaaaggatttttttgttttggttttttaaagtgttgggattataggtgttagttgcggcgtttggattttttttgttttttatgaaatttgaatgggataggttggtagttttattatatttatttgatagatgaggatattgagggtttaaggacgaggttattttttaaggtgtgagagattagttagttttggttttttgttttgggaattttatttttttggtttagggtttttagaagttataaaattttagttgtaaattttagtttttattatttttggtgttagttgtattttagtgtttttaagaatttagtaatgtagtttagttaatttatattataggttaaataaatagatgttaaggtgtatgtgtgttttgtataatggattgtgtgttttgtgtattaaaagttaagtgtttggggtgggggttgggtgcggtggtttacgtttgtaattttagtattttgagaggtcgaggagggtggattatttgaggttaggagtttaagatcggtatgggtaatatggtaatattttatttttattaaaaatataaaatatagtcgggtgtaaaggtgtgtttgtagttttagttgttttagaggttgaagtaggagaattgtttgaatttaggaggtagaggttgtagtgaacgggagatggtattattgtattgtttgggtaatatagggaggttatatttttagaaaaaaaaaaaaaagttaagtgtttgggtttgtagagtattagacggtgaggagtgaggtggggaggaagaattttaaattttttgttttatttgtttttattaaattttttaatatggttaatattgtttttagaatatgttttgggattgtgggaagggagattatttatttgtttttttttaaagtttttgggtttttagatttagttattttgcggaatttagtaatttaggtatttttgagttttcgtttaagatcgggatgttttttaggggaggtgttcgggagtttagttttttttagatagtacgtttcgttagttttaagggtgcgtaatcggttgtatttttttttcgcgatttagggttcgggagtagtttttatgatttatacgtacgtttgtagtagtttcgtttacgtttcggcgagttttaatttaggcgttttgtttttgttttgatttcgggtggtttttatttttggcgattttttacgtatatagttttttttttatttttattcgcgtacgtatatatgtagataatagtttcgattttcggttagagtcgtagagtttttgggttatttcggtcgttcgttgcgttgcgtcgtatcgcgttgttttttcggagtcggatcggggttatcgcgtcgttttgtttcgatatcgcgttttttggatagtcgtttttttttttaggttcgtggggttggttttgtatcgtcgagtttttcgggatgagggttttcggtgtggttattcggcgcgttttaggtcgttgagggatttcggttaggcgcggagatgggggtgtacggtgagtattcgcgggttgggcgttttcgttcgttcgggtttttgtttgagcggggatttagcgtttcggttattggttaggaggtggttgggtttaaggatcggcgatttgttaaggatttcggaagggggaggggggtggggtagtttttacgtgttagcggggatttgggggagtttttggggatggtaaaaatttgatttgtgaaggggatatagtttgggggttgaggggaagaaggtttgggggttttgttgtgttagtggagaggaagttgataagttgataatttgggcgttggagttattatttatttgttagaggggaagtttttgttatattaggattgaagtttggtcggagaagtggatgttggtagttgggggtggggtgtgtatacggtagtaggattgaatgaaggttagggaggtagtatttgagtgtttgtatggttggggataggaaggacgagttggggtagagacgtggggatgaaggaagttgtttttttatagttattttttttttttttcgtttgatttttagtttggttatttgttttaga

SEQ ID NO: 634 - DNA, 5758 bp, Artificial Sequence
  chemically treated genomic DNA (Homo sapiens)
tttagaatagatagttaggttgagagttaggcggggagggagaagggtggttgtggaaggatagttttttttatttttacgtttttgttttagttcgttttttttgtttttaattatgtaagtatttaggtgttgtttttttggtttttatttaattttgttgtcgtgtgtatattttatttttagttattagtatttattttttcggttaaattttaattttggtgtgatagaggttttttttttggtagataagtggtggttttagcgtttaggttattagtttattagttttttttttattggtatagtagaatttttaaatttttttttttttaatttttaaattgtgttttttttataggttaggtttttgttatttttaaggatttttttaagttttcgttggtacgtggaggttgttttatttttttttttttttcggggtttttgataagtcgtcggtttttgaatttagttattttttggttaatagtcggggcgttaaattttcgtttaaatagggattcgggcgggcgggagcgtttagttcgcgagtatttatcgtgtatttttattttcgcgtttggtcggggttttttagcgatttggggcgcgtcgggtgattatatcgggggtttttatttcgggaagttcggcggtgtagggttagttttacgggtttggaggagagggcggttgtttagggggcgcggtgtcggagtagagcggcgcggtggtttcggttcggtttcgggaggatagcgcggtgcggcgtagcgtagcgagcggtcggggtggtttagggattttgcggttttggtcgggggtcggggttgttatttgtatgtgtgcgtgcgcgggtgggggtgggggagaggttgtgtgcgtgaggggtcgttaggggtaggggttattcggggttagagtaggggtaggacgtttgggttgaggttcgtcggggcgtgagcggggttgttgtagacgtgcgtgtgggttatgggggttgttttcgggttttgggtcgcgggaggggagtgtagtcggttgcgtatttttgggattggcggagcgtgttatttgggaaaggttgggttttcggatattttttttggggggtatttcggttttgggcggagatttagagatgtttgggttgttgagtttcgtaaagtagttgggtttggaagtttagaagttttagggaggggtaaatgagtggtttttttttttataattttaggatatgttttagaaataatgttgattatgttgaggaatttgatgggggtaaatagggtaagaaatttggggttttttttttttattttattttttatcgtttagtattttgtaaatttagatatttaatttttttttttttttttggagatgtagtttttttatgttgtttaggtagtgtagtggtgttatttttcgtttattataatttttgttttttgggtttaagtaatttttttgttttagtttttggagtagttgggattataggtatatttttatattcggttatgttttgtatttttagtagagatggggtgttgttatattgtttatatcggttttgaatttttgattttaggtgatttatttttttcggttttttaaagtgttgggattgtaggcgtgagttatcgtatttagtttttattttagatatttaatttttagtgtatagagtatatagtttattgtgtaggatatatatgtattttgatatttgtttatttgatttgtggtgtaggttagttaggttgtattgttgagtttttaagaatattgaaatatagttaatattaagagtgatgggggttgggatttatagttaaggttttatggtttttggaaattttgagttagaggagtgagatttttagagtaggagattaagattagttggttttttatattttagaaagtggtttcgtttttgagtttttaatgtttttatttgttaaatgggtgtggtgaaattattagtttattttatttaggttttataaaagataggaaaggtttaggcgtcgtagttgatatttataattttagtattttgggagattaaggtaggaagattttttgagtttaggagttcgagattagttcggataatatggtaagattttgtttttaaaataaataaataaataaaaaataattagttaggtgtggtggtttacgtttgtagttttaaatatgtaggaggttaaggtaggaggattatttgagtttaggagttcgaggtcgtagtgagttatgatcgtgttattgtattgtagtttgggcgatagagtgagagtttgttttaaaaataaaaaaagattggaatgtgtagatttgagttgtaagagttagtcgggagaaattaagaaagatttgagggaggaggtgataatgattttagttttgaaggggggtaggatattaatgggaagaggtatgaggtgggtgggggattgtcgatttagtaaagtgaatggagagttaggtgagtattgcgggatttggttagtagttcgtaatgtaatagggttttttttttgtttttaggcggattagtaggttgagaaataatagatatatataagatagtgaaagttggttcggggggttatcgttttttggtttcgtggtgttaataatgtattagatgtattattatttattattaagtttagtgagggcgggggtaggttagtgagggatttagggttatttgattatgaggtgagatggttatatggggatgaattaattttttaatataatatttatatgtagaagtatagtatatttgtatgtagaagtatagtatatagagataagaatttataatatagtgtgtgtattagtaatttttaatagagttttaaaatagaaatataatttttttataatttatgattagtaagatattaattagtagtaataattgtaataaaagttggttatagataatttatggaaataggatatgaagttagataattagttagattagaaatttttagaagggagtatgttttaattttaaagaggtttagaagagttatggtaagatgagggcgtttatagttttattttatttatatggataggtgtttttcgtttttatgcgttcgtttataggttttttataagggtcgtattttatttttagagttatgaatatttgtttttttgggatagaaattttggtgatgtgaaatttttttgattgtaggttcgtttataggtttttcgtaggcggaagtatattataggttgttggtttattttggtagtttaatttggtattgtttgtatataattttgtatgtaattttgtatttataataattaggagtattttattttttatttcgtagtagtagttttagggggtttttttataggtgagtagaagggaagatggagaagagagaggtggaagatgaggttagggtgttgtttagggaggagttaggttgtttatggttttgaatgtttttttgaagaatttggattttgtttggaaagagtgggaaatatttatttatttatttaaaagatatttatggattttttatttatttttggttaaggatttggggatagagtagtgaatgatatagttaggaatgtttgttttggtggagttgatgttttagtggggttgttaatgatgaatataaaaatgggtataagatagaggattttggttgggtgaggtggtttatgtttgtaattttagtatttcgggaggttaaggtaagaggattatttgagtttaggagttggtttgattagtttgggtaatatggtgaaattttatttttataaaaaaatataaaaattagttgggtatgatggtatgtgtttatagttttagttatttgggaggttgaggtgggaggattattttagtttaggaagttgaggttgtagtgagttgtggttttgttattgtattttattttgggtaatagaatgagattttgttttaaaaaaaaaaaaaaaaaagaaagaaaagaaaagaaaagatagaggattttaaatagttagaattaaggagaaaaggtataggtagggttatttaaaataaggtagttagagatattaggttgagaaattgatttgaataaagatttgttgggggtgagggattatgagggtgtggtgaggtgaagagtttgatgggagggggatttgggttaagtgtagtggtttatatttgtaattttaatattttgggaggttgaggtaggaggattgtttgaggttaggagtttgagattagtttgggtaatatagtgagattttatgtttataatttttatttttgtttagttagttgggtatggtggtgtatatttgtagttttagttatttaggaggttgaggttagaggattttttgagttcgggaggttgaggttgtagtgagttatgattacgttattgtattttagattgggtaataaagggagattttgttttaaaaaaaaaaaagaaaaaatgagtggtttggtaagatggttgggtgggggttaggagatagaggttggtatgtttttggttggtttaatttttttagattttgtttttttgtattttttgtttattttgagtttttttaaaattgttgtttaggtttttttagttttattcggtttttggttttgattttttttagagttttgggacgtgtattattatatttatatttatatatggtcgtacgtgcgttttgttttggttgttttttttttttagtttttgtttttttaggattttgatttttgcgttaatgttttgatttaattatggagagggggtcggagatagatgggtggggtggatatagttggaggaggaggagttttttgggttgtgggatttgtttttttttttatatagtttttcgggggtttttgtatttttgtttgtagttgaagaggagtgagagatgggttaggggtattagtttttaaatgttgtagtttgttggataggagtagtgattgttttgttttttggggtttttggagagagagttgtgattgtagtttgggagggaggagaggattttggtttattttatatttaattcgaagttatagtaattttttttttgagatggagttttattttattgtttaggttggagtgtagtggtgttattattttagtttattgtaatttttatttttcgggtttaagtaatttttttgttttagtttttcgagtagttggaattataggtatgtgttattacgttcggtaatttttgtatttttagtagagatggggtttcgttatgttggttaggttggtttcgaatttttaattttaagtgattcgttcgtttcggttttttaaagtgttgggattataggcgtgagttattatattcggtttgaagttatagtaattttgttaagaggggagaggttggtttggagtttagagttttttggatattgagtaatgtagggtttatttatttgtttttgaggaataggaagaaaataagaagttttatggggtttttcgattaatgtttattatttttttgtttagtgttttttattttcgttatttgtttgttttttattttttagtagatgttgatttataggtttaggattattgtagagtatttttttattgatttttttagttaatttttaattttgttgtttaattaatttttttattgaatagttttatttgtgttaattttttgagtaggaatt

SEQ ID NO: 635 - DNA, 6112 bp, Artificial Sequence
  chemically treated genomic DNA (Homo sapiens)
tgatataggggttaggcgcggtggtttacgtttgtaattttaatattttgggaggtcgaggcgggcggattatttgaggttaggagttcgagattagttttaatatggagaaattcgtttttattaaaaatataaaattagcggagtgtggtggtatatgtttgtaattttagttattcgggaggttgaggtaggagaattatttgaatttgggaggcggaggttgtagtgagtcgagattgtgttattgtattttagtttgggtgataagagcgaaattttattttaaaaaaaaagaaaaagaaaaagaatttgatataatttaatttaatttttattatagttttatggagtagatattatttttattttatatattttatttatttatttatttatttatttatttttagagatagtgttttgttttgtaattagattggagtgtagtggtgcgattatagttcgtggtagtttcgaatttttagatttaggtgattttatttaattttttgagtagttgggattatcggtatatattattatattaggttaatttttttttttttttgtagagttagggttttgttatgttgtttaggttggttttagattattatttttaattgatttttttgtttcggttttcgtaaagtgttggaattataggtaagagttattatgtttgggtcggaagagatatttatcgtttattattttttttttttttgagatggggttttattttgttatttaggttggagtgtcgtggtgtgaatatggtttattgtagtttttattttttgggtttaattaatcgttttattttagttttttgagtagttgagattatagacgtatgttatttcgtttggttaatttaaaaataaagttggtcgggtgcgatggtttacgtttgtaattttggtattttgggaggttgaggcgggtggattatttgaggttagaagtttaagattagtttggttaatatggtgaaattttatttttattaaaatataaaaattagttatggcgggtgtttataattttagttatttaggatgttgagatgggagaattatttgaatttgggagacggtggttttagtgagttgaggttatattattgtattttagtttgggtagttgagcgagatttcgttttaaaaaaaaaaaaaaaaaaagttggttgggcgtggtggtttatatttgtaattttaatattttaatattttgggaggttaaggtaggcgtattatttgaggttaggagttcgagattagtttggttaatatatagcgaaatttcgtttttattaaaaaaaatataaaaattagttgggtatggtggtatatatttgtagttttagttattcgggaagttgaggtagaagaatcgtttgaattcgggaaatagaggttgtagtgagtcgagatggcgttattgtattttagtttaggcgatagaaaaagatttcgttttttaaataaataaataatgttttgtagagacgggattttattttgttatttaggttggaatgtagcggtatgaatatggtttattgtagtttttattttttgggtttaagtgatttttttattttagtttttcgagtagttaggattatagacgggtgttattttatttggtttatttaaaaaaataaaaaataaaaaataataataaaaaaaaaacgtgttttatagagataaggttttattatgttagttaggttttaggtaagggagggttaagtaatttatttaaggttttatggtaagtgggtgttgtttaaatattgatttaattttagaaaatatgtatttaattttggggttcgtttgttatttataataatttattgtgattaaattttgaaataggtgtttattttgtttgttttattttttttttatatatatgtatagtttaaatattaattttttgaggaagagatttgcgttgattttcgttttttaaaagcgtagggttacgtaggtatagttgtatttagtggttaatacgagattagttgtttttttattttttttagtttgattttttttatatttttaattttttattttataaaatattttttgagtttttattgtgttttaggttttgttttatatgttagggatatagtaaagaataaaagggtaaaaaaaaatttttgtttgaggttgggcgcggtggtttatgtttgtaattttagtattttgggaggttaaggcgggcgggttataaagttaggagttcgagattagtttggttaatatggcgaaatttcgtttttattaaaaatataaaaaaatagtcgggtatggtggcgggtgtttgtaattttagttattcgggaggtagaggtaggagaattatttgaatttaggaggcggaggttgtagtaaattaagattatgttattgtattgtagtttgggtaataagagtaagattttataaattaattaattaattaattaattaatttttggtcgggtttagtgatttatgttagtaattttagtattttgggaggttgaggcggggggattatttgaggttaggagtttaagataagtttggttaatatagtaaaatttcgttttaattaaaattataaaaattagttgggtgtggtggtatatatttgtagttttaattattttggagtttgaggaaggagaatcgtttgaatttaggaggcgaaggttgtagtgagttaagattgtgttattgtattttaatatgggtaatagagtaagatattatttaaaaaaaaaaaaaaaaatttgtttttatggaatagtaagggtagcgaattaataataaaatattaaatatatgttaggtgataataagtatattggttataaataaaaataaaaaatttatttgtttaatagaaatagggtaggagtattgttattttattttatttatatttatttatatttatttatttattttatttatttatttttttgagacggagtttcgtttttgttgtttaggttggagtgtagtggtataattttggtttattgtaagttttatttattgggtttatattatttttttgttttagtttttcgagtagttgggattataggtattcgttattacgttcggttaattttttttatttttagtaaagatagggttttattgtgttagttaggatggtttcgattttttgattttgtgatttatttatttcggttttttaaagtgttgggattataggtatgagttattgtgtatggattatttatttatttttttgaaatagagttttaattttgttgtatagtttggagtgtaatggtgtgattttagtttattgtaatttttgttttttggttttaagtaatttttttgttttagttttttgagtagttgggattataggtatttattattacgttcgaatatatatatatattttttgagacggagtttcgttttgttattaggttggagtgtagtggtataatatcggtttattgaaattttcggtttttgggtttaagcgatttttttgtagttttttaagtagttgggattataggtatgtagtattacgtttatttaatttttgtatttttggtagagatggggttttattatgttggttaggatggttttgattttttgatttcgtgatttgtttatttcggttttttaaagtgttgggattataggcgtgagttatcgcgttcggtttacgtttggttaatttttgtatttttagtagagacgtggtttcgttatgttgtttaggttggtttcgaatttttgattttatgattcgtttgtttcggttttttaaagtgttgggattataggtatgagttatcgcgtttagttaattattattattttttgagatgtagttttattttgttgtttaggttggagttgtagtggtatgattttggtttattgtaatttttattttttagattgaagtagtttttatgttttagttttttgagtagttgggattataggtatacgttattatatttggttaatttttgtatttttagtagagatgggattttattatgttggttaggttggttttaaatttttgattttaagtgatttgtttacgtcggttttttaaagtgttgggattataggcgtgagttatcgggtttagtttaagagaataaaaatgtgggtggtaaaaattttttttttaaaaattcgtaaatgaaaattttatatattatgtatattgtttaggagtatggtttagtattgtgtaaatatttaattgttggtcgttgtaaggattattattggtcggttttagtggttcgtgttggtatttttagtatattgggagatggaggttggaggattgtttaagttcgggattttaagattagtttggataatatagtgggattttatttttataaagaattttaaaaattagttaggtgtagtgggaagattgttttagtttagaggttgtagtgagttatgattgtgttattgtattttagtttgggtgatagagtaatattttgagatagagagagagagggggaaggagggaaggagggaaggaaggaaggaaggaaggaaggaaggaaggaaggaaggaaggaaggaaaggagagagagagagagagagagagagagagagagagaaaataatttttatttatttttaggttgggaagagatgttgatttttgcgataaaattagtaggtatattttttggaatgttcgttatgtgttaggttagattttatagatgagaagtttgaagtttaggtaaggtaagttatttgtttagggttataaagaaaaaaaaaacgtgtgtttgaagttagaacgggagttgttgcggtttaatttttttttttgtttttaagcggtttttgggttcgggaagggtttttgttttttttcgttaggtatttatttttatttaggttgagtgttggtttcgttttttcggggatttgttatttagaggcgtttggtcgggaagggtttggttagttgcgttcggcggaggtagttgttgatttagttgtggattgtgtcgggggcgggggacggaggggtaggagttttgggtttttcgtggcgggggttgtattatggattatttcggggcgtttttttggttttaggtcggttttttttgttttttgttcgttggggtcgtttgggcgttttcgtttaatttttcggattttaagttcgagagtaaaggtaaggatgagttgcgtgtggatttttacgttggagtttgtaggattatgttggggtttgaatttttagtttaggttttgggggttatgtttgtttttggattttttgatcgggttttgggggttaagttggtatttgaatttttagattgggttttggatgggtggggggcggggtggggtatgttaggatttaagatttttgatcgcgtttcgggtaagagttagagtgggtttaatattttcgttttatttttttagggagtttgggatatgttaaattttaagggggttgatttggtgttaaggtttttggggggtggggattaagtcgattttttttaggggagggagggtaaagttcgggttcgagttagaggggttaagttataggttattgtaaatacggtttgtgtgagggcgttagattatttgttcggttcggtggagggagggaggcggggggtacggttggcgttatcggttggcggggagtttgtcggggtcgatagggggttcgttttttcgtatatatttttagtcgcgcgcgtgttttaggttggggcggggttggtagtttcgagttcgaggttttgaacgtcgcgtttagtttagttggtcgttgggtgggtaggtgtgcgttagtggtgacggcgggggatagtaaggcgagaaatttgtttttgggaattaggggggtattatttttgcggatttttttaagggattcgtttgggaagatggtagggcggggttttttttttatcgggttcgtttaggttgcgggagggaagaggagggggttgtttttcgaggatagagtttagatttttatgttttttttttgtcgtttttttttagt

SEQ ID NO: 636 - DNA, 6112 bp, Artificial Sequence
  chemically treated genomic DNA (Homo sapiens)
gttggggaggggcgataaaggaagggtatgggggtttgagttttattttcgggagatagttttttttttttttttttcgtagtttgggcggattcgataagaaaaaagtttcgttttgttatttttttaagcgggttttttggaggggttcgtagaggtggtgtttttttaatttttaggggtaagtttttcgttttattgtttttcgtcgttattattggcgtatatttgtttatttagcggttagttgagttgggcgcggcgtttaagatttcgagttcgggattgttagtttcgttttagtttaggatacgcgcgcggttgggggtgtgtgcggagaggcgggttttttatcggtttcggtaggtttttcgttaatcgatagcgttaatcgtgtttttcgtttttttttttttatcgggtcgggtaagtgatttggcgtttttatataaatcgtgtttatagtagtttgtggtttggtttttttaattcggattcgggttttatttttttttttttagggagggtcggtttggtttttattttttagggattttagtattaagttagtttttttaggatttagtatgttttagattttttgaaaaggtaaaacgggaatgttaagtttattttagtttttgttcgggacgcgattaggagttttggattttaatatattttatttcgttttttatttatttaggatttagtttaagggtttagatgttagtttggtttttaggattcggttaggaagtttagaaataggtatggtttttaggatttaggttgggagtttaggttttagtatggttttgtaggttttagcgtaggggtttatacgtagtttatttttatttttgttttcgaatttggggttcgggaggttaggcgggggcgtttaggcggttttagcgagtaggagataaagggagtcgatttggggttagagggacgtttcgaggtggtttatgatatagttttcgttacggggagtttagggtttttgttttttcgtttttcgttttcggtatagtttatagttgggttagtagttgttttcgtcggacgtagttgattaggtttttttcgattaggcgtttttaagtggtagattttcgagggggcggggttagtatttagtttgggtagagataagtgtttggcgggaggaggtaggggtttttttcgagtttagaggtcgtttgggggtaggggagggagttgggtcgtaatagttttcgttttggttttagatatacgttttttttttttttgtggttttggataggtgatttattttatttgagttttagattttttatttgtaaaatttagtttggtatatagcgaatattttaaaaaatgtatttattgattttatcgtagaaattagtatttttttttagtttggaaataaataaaaattatttttttttttttttttttttttttttttttttttttttttttttttttttttttttttttttttttttttttttttttttttttttttttttttttttttttttttttttttttttttttttgttttagggtgttgttttgttatttaggttggagtgtagtggtataattatagtttattgtagtttttggattgaagtaatttttttattgtatttggttaatttttaaaattttttgtagagatgggattttattatgttgtttaggttggttttgaaatttcggatttaagtaattttttagtttttattttttaatgtgttgggaatattagtacgagttattgaagtcggttaataataatttttgtaacgattagtagttgagtgtttgtatagtgttaggttatgtttttgggtagtatgtataatatgtgagatttttatttacgaatttttgggaaaaaaatttttattatttatatttttatttttttgggttgggttcggtggtttacgtttataattttagtattttgggaggtcgacgtgggtaaattatttgaggttaggagtttgagattagtttggttaatatggtgaaattttatttttattaaaaatataaaaattagttaggtgtggtggcgtgtgtttgtaattttagttatttaggaggttgaggtatgagaattgttttagtttgggagatgaagattgtagtgagttaagattatgttattgtaattttagtttgggtaatagagtgagattgtattttaaaaaataataataattggttgggcgcggtggtttatatttgtaattttaatattttgggaggtcgagataggcggattatgaggttaggagttcgagattagtttgggtaatatggcgaaattacgtttttattaaaaatataaaaattagttaggcgtaggtcgggcgcggtggtttacgtttgtaattttagtattttgggaggtcgaggtgggtagattacgaggttaagagattaagattattttggttaatatggtaaaattttatttttattaaaaatataaaaattagatgggcgtggtgttgtatgtttgtaattttagttatttgggaggttgtaggagaatcgtttgaatttaggagtcggaggttttagtgagtcgatattgtgttattgtattttagtttggtgatagagcgggatttcgttttaaaaaatatatatatatattcgagcgtggtggtgggtgtttgtaattttagttatttaggaggttgaggtaggagaattgtttgaaattagaaggtagaggttgtagtgagttgagattatattattgtattttaggttgtgtaataagattgaaattttgttttaaaaaaataaataaatagtttatgtatagtggtttatgtttgtaattttagtattttgggaggtcgaggtgggtggattataaggttaggagatcgagattattttggttaatatagtgaaattttgtttttattaaaaatagaaaaaattagtcgggcgtggtggcgggtgtttgtagttttagttattcgggaggttgaggtaggagaatggtgtgaatttagtgggtggagtttgtagtgagttaagattgtgttattgtattttagtttgggtaatagagacgagatttcgttttaaaaaaataaataaataaaataaataaataaatataaataaatataaataaaataaaatggtaatatttttattttgtttttattaagtaggtgggttttttgtttttgtttgtagttaatgtgtttattgttatttgatatgtatttgatgttttgttattgattcgttgtttttattattttatgaaagtaggtttttttttttttttttagatggtgttttgttttgttgtttatgttggagtgtaatggtataattttggtttattgtagttttcgttttttggatttaagcgattttttttttttagattttagggtagttgggattataggtgtgtgttattatatttagttaatttttgtagttttagttgaaacggggttttgttgtgttggttaggtttgttttgagtttttgattttaagtgattttttcgttttagttttttaaagtgttgggattattggtatgagttattgagttcggttagggattgattgattgattgattgattgatttgtggagttttgtttttgttgtttaggttgtagtataatggtatgattttggtttattgtaattttcgttttttgggtttaagtgatttttttgtttttgtttttcgggtagttgggattataggtattcgttattatgttcggttatttttttgtatttttagtagagacggggtttcgttatgttggttaggttggtttcgaatttttgattttgtgattcgttcgttttggttttttaaagtgttgggattataggtatgagttatcgcgtttagttttaggtagggatttttttttatttttttgttttttgttgtatttttagtatatagaatagggtttggagtatagtagaagtttaagaaatattttgtggagtaaaagattagagatgtagagaaaattaagttgagagaggtagagaaatagttgatttcgtgttagttattgggtataattgtgtttgcgtaattttgcgtttttaaaaaacggaagttaacgtaaattttttttttaggaaattgatatttagattgtgtatgtatgtgagagggaggtggaataaataagatggatatttgttttaaaatttggttataataaattgttatgaatggtaaacgggttttagagttaaatgtatgttttttggagttggattaatatttgaatagtatttatttattatgggattttgagtaagttatttaatttttttttgtttgaagtttggttgatatggtgagattttgtttttataaaatacgttttttttttgttgttgttttttgttttttgtttttttaagtaagttagatgaggtggtattcgtttgtggttttagttattcgggaggttgaggtgggaggattatttaagtttagaaggtggaggttgtagtgaattatgtttatgtcgttgtattttagtttgggtgatagagtgagatttcgtttttataaaatattgtttgtttgtttgagagacggagtttttttttgtcgtttaagttggagtgtaatggcgttatttcggtttattgtaatttttgtttttcgggtttaagcgatttttttgttttagtttttcgagtagttgggattatagatgtgtgttattatgtttagttaatttttgtattttttttagtagagacggggtttcgttatatgttggttaggttggtttcgaatttttgattttaggtgatgcgtttgttttggttttttaaagtgttggagtgttgggattataggtgtgagttattacgtttagttaattttttttttttttttttttgagacggagtttcgtttagttgtttaggttagagtgtagtggtatgattttagtttattggaattatcgttttttaggtttaagtgatttttttattttagtattttgagtagttgggattataggtattcgttatggttaatttttgtattttagtagagatagggttttattatgttggttaggttggttttgaatttttgattttaggtgatttattcgttttagttttttaaagtgttaggattataggcgtgagttatcgtattcggttaattttgtttttaagttagttaggcgaggtggtatgcgtttgtggttttagttatttagggggttgaagtgggacgattaattgagtttaggaggtggaggttatagtgaattatgtttatattacggtattttagtttgggtgatagagtgagattttattttaaaaaaaaaaaaaatagtggacgataagtgtttttttcggtttagatatggtggtttttgtttgtaattttagtattttgcgaaggtcgaggtaggggaattaattgaagatagtagtttgagattagtttgggtaatataataagattttgattttataaaaaagaagaaaaattagtttggtgtggtggtatgtgtcggtagttttagttatttaggaggttgagtaggattatttgagtttaggagttcgaggttgttacgagttatgatcgtattattgtattttagtttggttatagagtaagatattgtttttaaaaataaataaataagtaaataaataaataaaatgtataaagtgaaaataatgtttattttatagagttatggtaaggattaaattagattgtgttaagttttttttttttttttttttttttgagatggagtttcgtttttgttatttaggttggagtgtaatggtataatttcggtttattgtaattttcgttttttaggtttaagtgatttttttgttttagtttttcgaatagttgggattataggtatgtattattatatttcgttaattttgtatttttagtagagacgggtttttttatgttgaggttggtttcgaatttttgattttaggtgattcgttcgtttcggttttttaaagtgttgggattataggcgtgagttatcgcgtttggtttttgtgtta

SEQ ID NO: 637 - DNA, 5535 bp, Artificial Sequence
  chemically treated genomic DNA (Homo sapiens)
gttatttcgggtttcgggcgttataaatagagttcgtcgagtcgagtcgtttttttttattcgggtttttttgcgttttcggtttcgtcgcgatcgtcgggtcgcgcgttatcgcggttaagtttagaggcgggcggggacgttagtttggttattgcgtttttcggcggtgttcgtttttagagttttcggtcgggttgtttttcgtttttcgtttaggttttttttggcggaattgtcggtgagggtttcgtttttatagttttcgtttttattttattcgtttcggggcgaataaagggttcgaagttgagaggaggggaaggtttgggatgggagtaggggtcgtagttggggagtggtttaaattggagttgcggttgaattttggaatttggggcgtttggaagaaagaggcggaatcggagtttggatacggttgggggattcgaacgcgtaattttgggagtcggggagattcgaattcgggattttaaagtttagttttgaaatagtttaggttgggagtagtggtttattatagtaatttcgatattttgggagggcgagaagggaggatcgtttgagtttaggagttcgagattagtttgggttatagtgagattttatttttttatttttacgtttttataaaaaaaatataaaagttggttaggcgtggtggcgcgcgtttgtggtttagttattcggtaagttgatgtgggaggattatttgagttcgggaggttgaggttgtagtgaggtgtgatcgtattatcgtattttagtttgggtgatagagagagatttcgttttaaaaaaaaaaaaaaaaaagaaagaaagaaagaaaaagaaaaaaagaaaagaaattgagggtagaaatttaatatttaatttgttaatttggaaataacgtagaatttagggtaatttttttttttcgtttttaattaacgttaatcgatttagaattttattgatcgtaggcggcgggttttttatcgtatttttgttttaaggaaatgaatcgggagcggggaatgggtcgttttttagggggttttgttttcgttgggttttggcggagtagagaggtttcggttttttaatatttttaatttttttgtggtgtattatcgtttttttgtagaaaacgtaggagttgtagggttaagtttggtaattttattttttaaggggataattgagttataagtttttttatttgggatgatttatttttagaatcgttgtatggttttggatatagaggtatattttattttttttttttttcgttttttgagacggagtttcgttttgtcgtttaggttagagtgtagtggtgtaatttcggtttattgtaattttcgttttttgggtttaagtaatttttcgttttagtttttcgagtagttgggattataggcgttcgttattacgttcggttaattttttttttgtattttttagtagagataaggttttattattttggttaggttggttttgaatttttgatttcgtgatttattttttatcggttttttaaagtgtcgagattataggcgtgagtattgtgttcggttttttgggggaaaattatatttagtgatgagattattagattgatttttttttttttttattaggcgtgagtattttttttggtttttatattttttaatattgtaagaaataatattaagaatttaggattttggattttttttttttttttttttttttttttcgtttttttgtttgtttgtttgttttgttttgtttgtttttggttttattttgttatttaggttggagtgtagtggtataatcgtagtttattgtagtttttgttttttgggtttaagtaattttttttttttagttttttgagtatttgggattataggtgtatattaatatatatagttttttttttttttttttttttttagatggagtttcgtttttgtcgtttaggttggagtataattgcgtgattttggtttattataatttttatttttcgggtttaagtgatttttttgttttagttttttaaagtgttgggattataggtatgagttattttgtttagttaatttttgtgtttttttgtagagatggggttttgttatgttgttttggttggttttgaattttggagtttaagtaatttgtttattttggttttttaaattgttgggattataggtatgagttatcgtatttagtttagaattttggattttaattgttagggtgaaaagaaaaaggtatttgaggtaagtaaggtttaggataataaatttgggtaatagattaagattttgttttaaaaaaaattttttttttttttttgagatggagttttatttttgttgtttaggttggagtgtaatggtgcgattttagtttatcgtaatttttgtttttagggtttaagtaatttttttgttttagttttttgagtagttgggattataggtatgtgttattatgttcggttaatttttttttttttttttttttttgagatagagtttggttttgttatttaggttggagtttagtggtataatttcggtttattgtagttttcgttttttaggtttaagcgatttttttgttttagttttttgagtagttgggattataggtgtgcgttattacgtttaattaattttagtatttttagtaaagacggggttttattatattggttaggttggttttgaatttttgatttcgtgattcgtttgtttcggttttttaaagtgttgggattataggtgtgagttattgtatcgggattttaattttgtatttttaatagagataggatttttttatgttggttaggttggtttcgaatttttgattttaggtgatttattcgtttaggttttttaaagtgttaggattatagatattagttattatgtttagaaaaaaaaaattaagtaaaatgggaaaatgtagatatagatagatatttatagatgaaagattgatgtgaataaagaaatagagggatgttatgtatatgtaggtaagaataaataaaaagattaatgaatataatagaaatgttagaaatagacgtgtgtgtatgggaatttggtatgtgataaaggtagaattttagaatagtggagaaaagatttatttttggttaatttgagataattggttatattatttataaataacgatttcggtgtatttttaaaaataaattttggttaggtatcgtggtttatgtttgtaattttagtattttgggaggttgaggtgggtagattatttgaggttaagagttcgagattagtagggttaatatggtgaaatttcgtttttattaaaaatataaaagttagtttgtaattttagttatttgggaggttgaggtaggagaattgtttgaatgtgggtggcggaggttgtagtgagtttagattgttttattgtattttagtttaggtaataagagtaaaattttattttaaaaaataataaataaataaataaattttatatagattaaagttagatgatttgtttattttaggttattattgtttgggatcgtgtttgtgttttttattgaattgtaagttttgggaggataatacggggtttttattttttacgtagataaaagaaatgatagaatatattattatagtcgtgtattgtaattttagtattttgggaggttataaagtgattttaggattagttgaggttaggagtttgagattagtttggttaatatggtgaaatttcgtttttattaaaaatataaaaaaaaaaaaaaaaaaaaaaaattagtcgggtatggtggtatatgtttgtaattttagttattaaggaggtaggagaatcgtttgaattcgggagggggaggtgtagtgaattgagatcgcgttattgtattttagtttgggtaataagagcgaaatttcgtttcgaaaaaaaaaaaaaaaagaaaaaaaagaatttattattatgattttgggttatggtagggtttttaatatattaaaagtaaaagttagaacggaatagattgataaatagttgcgtataaatataaataatttttgtgttaaaaataattaaagttaaagtttaaagtagaaattaggaggaaatgtttgtaatatgggtaattaaggattagaattagaatttataaagtatttttagaaattaatagtaataaaaaagttatataatttattttaaaaatggataaggaatatgagtaagtaatttatagaagataaaatttataagattaatatttttataaaaaatattttatttttttagtaattagagagttgtaagttagaatagtgtgatattatttttttaggaagtgattaatattaatttattagttaggtttttgtttagatgtttttttttttaggaagttttttcggatttcggggttgagttaggcgttttttttgatttttattttacggttttttcgggattttttattttagatttgtttattttgggttagtattgggaacgtgtttgtgttttttattgaatcgtaagtttcgggaggataatacggggttgtcgttggttattgttgtgttattagtacggattcgtataggatcgggaagagaggaagcgcgtggggggaataggtgtggaataaatgaatgaatgaggaaattgaagttaagttaatgtttgagttggatttaaatttaagtttttttttattgagaggagggattaagttggattttttgcgatttgttttttattgagttttgttaggattttgggtatatagaagcgtttagtaagggttttgaaatttaatagtttgggagttagatttttaggttatatttttttttttttacgattttcgcggttttttagaattatagagagttgtatagagatcgttttgttttatgttttatttttttggggagcggggttagagaggtcggaagtgttgcgagttttgggttacgttggtcgtgttggtagtgggtcgtttcgatttttttgtagttttttttttgaggttttaagattagtaggtgaggtttcgcggcgttgaaatcgtgaggttcggattataggtgcgggaggcggagattgcgggtggagattggcgtcgcggaagttaattattgtcgagtttgagagatggataaggttaggcgtggggagggcgtttagatgttagtttcgggggtcggacgaacggaaggcgggggatggtggggacggagttaatagaattcggtgggggcgaggggcggagcgatgggatttgtggatttgtaaggggcggggcgagtcgaaggtggaggttaaaggggcgtggcgttatagagtttttagcgttgggtgttggggatttgacgttatggagttttcggagttttgtgggggacggttgtgagtggggggtttttgttgcgggatgagaacgtagacgttagtggtttattcgtttttggtatttttttttttagg

SEQ ID NO: 638 - DNA, 5535 bp, Artificial Sequence
  chemically treated genomic DNA (Homo sapiens)
tttgaaagggaaggtgttaggagcgagtgagttattggcgtttacgtttttatttcgtagtaggaattttttatttatagtcgttttttataaaatttcgagagttttatagcgttaggtttttaatatttagcgttagaggttttgtaacgttacgtttttttgatttttattttcggttcgtttcgttttttataggtttataagttttatcgtttcgtttttcgtttttatcggattttattggtttcgtttttattatttttcgtttttcgttcgttcggttttcgaggttagtatttggacgttttttttacgtttggttttgtttattttttagattcggtaatgattggttttcgcggcgttaatttttattcgtagttttcgtttttcgtatttgtggttcgggttttacggttttagcgtcgcgaggttttatttgttggttttggagttttaagggaaagattgtagagggatcgaggcggtttattgttagtacggttagcgtggtttagggttcgtagtattttcggtttttttggtttcgttttttaggagagtagagtatagagtagggcgatttttgtataattttttatggttttggaggatcgcggaggtcgtgggaggagagagatgtggtttgaggatttggtttttaaattgttaagttttaaagtttttattgagcgtttttgtgtgtttagaattttggtagggtttagtggagaatagatcgtaggagatttaatttggtttttttttttagtaaggagagatttaagtttgaatttaatttagatattgatttggttttagtttttttatttatttatttattttatatttattttttttacgcgtttttttttttttcggttttgtgcgagttcgtgttggtgatatagtagtgattaacgatagtttcgtgttgttttttcggagtttacggtttagtaagggatatagatacgtttttagtgttgatttagaatgggtaggtttgggatgggagatttcgggagagtcgtgggatgggggttagggggagcgtttgatttagtttcggagttcggaagggttttttggaggaagggatatttgagtaggggtttggttgatgagttagtattagttattttttgaaaggatagtattatattgttttaatttgtagttttttgattattaaggaaatggaatgttttttgtgaaagtattggttttgtaaattttgttttttgtgaattgtttgtttatattttttgtttatttttaaaatgggttgtatggtttttttattattattaatttttaggggtattttatggattttgattttaatttttagttatttatattgtaaatatttttttttagtttttattttgggttttaattttagttatttttggtatagaagttatttgtgtttatgcgtaattatttattaatttgtttcgttttgatttttgtttttggtgtgttaagagttttgttataatttagggttataatgataaattttttttttttttttttttttttttttcgagacggagtttcgtttttattatttaggttggagtgtaatggcgcgattttagtttattgtatttttttttttcgggtttaagcgatttttttgtttttttagtagttgggattataggtatgtgttattatgttcggttaattttttttttttttttttttttttgtatttttagtagagacggggttttattatgttggttaggttggttttaaatttttgattttagttgattttgaggttattttgtgattttttaaagtgttgggattatagtgtacggttataatgatatattttattattttttttatttacgtaaaagataaaagtttcgtgttgtttttttagagtttatagtttagtgagggatatagatacggttttaaatagtaatgatttagaatgagtaggttatttggttttaatttatgtaagatttatttatttatttattattttttgagatggagttttgtttttgttgtttaggttggagtgtaatggagtaatttaggtttattgtaattttcgttatttatatttaagtagtttttttgttttagttttttaagtagttgggattataggttaatttttgtatttttagtagagacggagttttattatgttggttttgttggtttcgaatttttgattttaagtgatttgtttattttagttttttaaagtgttgggattataagtatgagttacggtgtttggttaagatttatttttgaaagtgtatcgaggtcgttgtttatgagtgatgtaattaattgttttaagttgattaaaggtagattttttttttattgttttgaaattttatttttattatatattaaatttttatatatatacgtttatttttgatatttttgttatgtttattgatttttttatttatttttgtttgtatgtatatgatatttttttgtttttttgtttatattagttttttatttatgggtgtttatttgtgtttatatttttttattttatttaattttttttttttgggtatggtggttaatgtttgtaattttagtattttgggaggtttaggcgggtggattatttgaggttaggagttcgagattagtttgattaatatggagaaattttatttttattaaaaatataaaattagagtttcggtgtagtggtttatatttgtaattttagtattttgggaggtcgagataggcggattacgaggttaggagtttaagattagtttggttaatatggtgaaatttcgtttttattaaaaatattaaaattagttgggcgtggtagcgtatatttgtagttttagttatttaggaggttgaggtagaagaatcgtttgaatttgggaggcggaggttgtagtgagtcgagattgtgttattggattttagtttgggtgatagagttagattttgttttaaaaaaaaaaaaaaaaaaaaaaattagtcgggtatggtggtatatgtttgtaattttagttatttaggaggttgaggtaggagaattgtttgaattttggaggtaaaggttgcggtgagttgagatcgtattattgtattttagtttgggtaataagagtgaaattttattttaaaaaaaaaaaaaaaattttttttgagataaggttttgatttattgtttagatttattgttttgaattttgtttattttaaatgtttttttttttttattttaataattgaaatttagaattttaggttgggtgcggtggtttatgtttataattttaataatttaggaggttaaggtgggtagattgtttgggttttagagtttaagattagttagggtaatatgataaaattttatttttataaaaaaatataaaaattggttgggtaaggtagtttatgtttgtaattttagtattttggaaagttgaggtaggagaattatttgaattcgggaggtggaagttgtagtgagttaagattacgtaattgtattttagtttgggcgataaaagcgaaattttatttaaaaaaaaaaaaaaaaaaaaaaagttatgtgtgttggtgtgtatttgtagttttagatatttaggaggttgaggagggagaattgtttgagtttaggaggtagaggttgtagtgagttgcgattgtgttattgtattttagtttgggtgatagagtgagattaaaaataaataaaataaaataaataaataaataaaaaaacgaaagaaaagaaaggaaagaaaaaggaaatttagaattttaggtttttagtattgttttttgtaatgttagaagatataggggttaggagaggtgtttacgtttagtaggaaggaaggagaattagtttaatagttttattattaggtataatttttttttaggaggtcgggtatagtgtttacgtttgtaatttcggtattttgggaggtcgatggaaggtggattacgaggttaggagtttaaaattagtttggttaagatgatgaaattttgtttttattaaaaaatataaaaaaaaaattagtcgggcgtggtggcggacgtttgtaattttagttattcgggaggttgagacggagaattgtttgaatttaggaggcggaggttgtagtgagtcgagattatattattgtattttagtttgggcgatagagcgagatttcgttttaaaaaacgaaaaaaagaaaaaatgaaatatgtttttgtatttaagattatatagcgattttagaagtaggttattttaagtagaagggtttgtgatttagttatttttttggggaatggaattgttagatttaattttgtaatttttgcgttttttgtaagggggcgatggtgtattataagaggattggaagtgttggggagtcggggtttttttgtttcgttagaatttagcgggggtaggattttttagaaggcggtttatttttcgttttcgatttatttttttgaagtagaagtgcggtaaagggttcgtcgtttgcgattagtggaattttgaatcggttaacgttagttaagagcgaggggaaaaaattgttttgggttttacgttatttttaagttggtaagttggatgttggatttttatttttagtttttttttttttttttttttttttttttttttttttttttttttttttttttgagacggagtttttttttgttatttagattagagtgcggtggtgcgattatattttattgtagttttaatttttcgggtttagatgatttttttatattagtttatcgagtagttggattataggcgcgcgttattacgtttggttaatttttgtattttttttgtagaggcgtgggggtgggggggtggggttttattatagtttaggttggtttcgaatttttgggtttaagcgatttttttttttcgtttttttaaagtgtcgggattattgtagtgagttattgtttttagtttaagttgttttaaaattaaattttggaatttcggattcgaattttttcggtttttagagttgcgcgttcgaattttttagtcgtatttaagtttcgatttcgttttttttttttaaacgttttaagttttagaatttagtcgtaattttagtttgggttattttttagttacggtttttgtttttattttaaatttttttttttttttaatttcgagttttttgttcgtttcggaacgggtggggtggggacggagattgtaaggacgggatttttatcgataatttcgttaaaggggatttgaacggggggcggagagtagttcggtcgaaggttttggaagcgggtatcgtcggggggcgtagtgattaggttggcgttttcgttcgtttttaaatttagtcgcggtgacgcgcggttcggcgatcgcggcggggtcggggacgtaggggggttcgagtggaggggggcggttcggttcggcgagttttatttatagcgttcggagttcgaaatagt

SEQ ID NO: 639 - DNA, 6866 bp, Artificial Sequence
  chemically treated genomic DNA (Homo sapiens)
gttggttaggttggttttgaatttttgattttaagtgatttatttgttttggttttttaaagtgttgggattataggtatgagtattcgttatttaagatatattgtttaataaatgatgggttttgtgatttattaaggttaagtgattattcgggtaatgttggattttagtttaggtttacgtgattaaaggttatgttttgttttttagagtacgtagttattgtagatattgagttatgttaaagtagtggatttagagggatttttggtttatagttatttagtgtatattggtagaatttttttagatgtgtaaatattatatttagtatttaaattttttaaatttagtatgtttagtcggtaatgttagtaattagagggagttacgattgttgagaattatgtagtagggagtttgagggtagaaatttattaatttttagtataggcgtttttgtggaatattgatagttggtttaatatttaaatagagtatttttggttttttttatattagtaggtgttttttatttttggcgtttgaaatgtgtgtgttttttaagattgtaaaaataggtattttttatatttttatataggaatatttagaaataaatagtatttggaaagttgtatatattttatatgaagttattttatttttataagagttttgttataagtttgatgtatgagtatagatatttgtatgtttataaagttttggtgatgatgtttttaaaattttttgttttagagaaaagtagggagaggtaggataattgcgatgaagtattgttttgtttgagagttttttattaaataaatgtgtaaatatttaaatttatgttttatgtttttaaatttttatatgttatggattaggataaaagtattaaattttaagtagaatattgggaaaattttaaataaaatttaatttttttaattttataaattattttgttgttgtattgttattttttaattggttttttttttcgatatttttaaattatagttggttggatttatagatgtagaatttatagagggttaattgtaagtttttatttatttatatttatagtttaggtaaagataatgtgtatttatatttaaatatatttaggtagatatatagaaaatttgtatatatttaaatttatgtagagatagatagagaaataaatataaaattaagaagtttttatgaaataaaagtagggagttataaaggtaaagatagaaatgtagaataaaaagttaaattaagaaaagaataatgaggaaatttaaattttaatagaataattaaaatttttattggagataatttaaagtagaaaggatattaaaaattataagagatataaagaataaattttaggttggaagtggtggtttatgtttgtaattttagtattttgggaggttgaggtaggtagattatttgaagttaggagtttaagattagtttggttaatatggcgaagttttaattttattaataatataaaattagttggatatagtggtgtgtgtttgtaattttagttatttaggaggttgaggtacgagaattgtttgaatttaggaggtcgaggttgtagtgagttaagtttatgttattgtattttagtttgggcgatagggtgagattttgttttaaaaaaaaaaaaaaaaaaaaaaaaaaaatttttattttagattgaaagtttttatttagggataaaaataaaatgtgtagttataatttgttataatttataaaagtttatttttttagatattaatatttgatattaaatgttgtttattatatatatttaaatttagaatttataaggtgatattttttagtgttgatgaagtatttatatagtagttgggaagttttttttttttatttttattataaaagtaatataagtttatgataagaaagttaaatagagtagaagggtatatattgaaatataaaggtttaattttgaaatttattatttatgttagttttttagaagtaattgttgtggttaagatttgtttattttaggatttttttatgtatatattatttatcgttttgtttttatataaatgggattatattatatattattgttttgtaattgttttttttagtatataataatatatattgagtatttttttatatataggtttttatggttaatattttatttattagagatgtataaagaaattttaattatttttttatttttggatatttaggagaaatatttaagaaataataatagtttatataatgatataatgaatatatatttttatatataagttttttattagaatataagttttatgttcgttttgtttattagtaagtttttagagtttagagtagtgtttgatatattgggtgttttataaatatttattagatgattgtatgtgtatatgtatttatatatgtatttaaaatttttgtgtagattgattaatcgttttttaaaaagattgttttattgtatatttttatgtatagtttttgtttgtttggttggttggttggtttttttgagacggaatttcgtttttgttgtttaggttggagtgtaatggcgttatttcggtttatcgtaatttttgttttttgggtttaagcgatttttttgttttagttttagttgagattataggtatgcgttattacgtttggttaatttttgtatttttagtagagacggggttttattatgttggttaggttggtttcgaattttcgattttaggtgattcgtttgtttcggttttataaagtgttgggattataggcgtgagttatcgcgttcggttttatgtatagtttttaaattttattttgttttgattagtttgggacgttatttgattaaacggatttaatataaatttattattttttagttttgggggtcggaagtttaaaatgggtggatagagttgtagttttttcgggagttttaggggagaatttatttttttgttttttttagtttgtaagggttgtattttttggtttagtgttcgttttatattattttgaattcggttttttgttatatttttgaatttgatttttttattttttttttttttttataagtatatttgtgatatattgagtttatttggataatttatataatttttttattttaagaattttaatatatttatatttgtaaatttttttttgttatataaaataatttataggttttagggattaggatatgaatatttttgggaagtcgatattttgtttattatcgtttgggagttaggtttgaattttagttttgttattttaatttttattttttaaatatgtgttgagtatttttatattacgttttgaaatagatttaagaaatatattaattagttttcgtggttttgtttaagttatataatttttttgtatttttattttttttattggtagaattgacgagattaatatttgttttagaggaaacgttgtatgtaaagtgtttgtcggtaattttttttatttaaatagtatttaggaattatatgttatttttattttgataaaatgtaagtaaaatattagattaagtagtaaagaggtagaggaatagatttttttggaaacggttagtgtgaatgtgaattggtataggttttttagagggtaatgtggtaatgtgaatggaatgaaaagttttataaatttttttttttttattttagtgattatttatttttagacgtgtatttgaaggttacggttgaatttatatataaagatgtttagtgaaatattatttatattattggaagggaaaaagtagaaatagattaaatgttttttaataagtaattaggtaagtatatttatataatggaaattttattagttatataaaaggattttgtaaaagaatatgaaatattatgtttagaggtttgttaaatgttaatgataaagttggggatttaaattagggatattaattatttcgtgtcggtaaaagaatttcgtgtgatgagagaatgtgtatatagatagaaaaaaaaggattaaataaaatagatttcgtgatgttaatagtggttatttttaagtaatggaaataagtgatttttatttttgtttatttgtattttttattttttaataataaaggtggggggtttttatataaaataatttttttattagtttaattattaggtatttttaggtatagaataaatattgcgggaggtgtttttttagtggaaggagggatttttaaaaatagtttattgtattgaagtttttgggaggtaaatagaggtttgaagttagtaaatgattttgtttattttatagttattgtattttagtttgggtaatatattaatattttgtttcgggaaagaaaaaaaaaattaaaagaaggatggggagtaatcgtaaaaggaagggttaaaaattattttaggaaataggtgttattaatttttggcgtatttggaatattgattagtaatttttttaattgtcgatgtcgggggattaagttttttaggtttattttttttttttttgttttttggtagtttgaggttagggtgttaggggatgtggaaatttaaaagagacgtgaatggagtttgatatttgtaagttatatcgatagggggcgttagtttttataggtgattttatgaattttcggttttattcggttttttttcggttgagttcggttaacgtttgtttttttaggttcggtttttttcggttttttgagagcgcgtttgtcgtggtttcggttttttttcggttgcgttcggtttacgattattttagttttagtttttttcggttacgttcggttggttgtcgttttttcggattcggtttttttcggttgagttcggtttattttttattaggagtcggtttttttcggttgcgttcggttgcgattcggaagagtttttatggagttagggtagtcggttcgacggattgttatggcgtcgttgttggagtacgagcgatagttggtgttggaattgttcgatattgacgggttagtagtgtgcgttcgcgggttcggcgcggatcggtttttttattattttttttagttgtattgttatttagtttgtttggtgttggtgtttaatacgtagtcggtcgaggaggtgcggtcgcgttggcgcgggagtgaggggatttcgagagtgttgagggttttttgagcggatgcgaggtttttgatagggatggaggggttttgagggggatttaggtttttgatattacgcgatgatatagagaaggatggtaggggtttttagggggatgtaggttttttatattgcgggaatatagacgtatgtaaggggtcgttaggaggatatcggtcgtttatatcgtgcggggatattgataagaattggaggggtttcgagaaggttgtaggtttttggtaggagttgaagaatattaagaggaatgttagtttttgatattgtgcggggattttgagagggaagggaggggttttaagaaggatgtaagtttttgattagagtttaagaatattaagagaaatgggaggggtttttaggggatgcgggtttttgatattgtgtaggtatagtgagaatgatggaaggggtttcgagaaggatgtaattttttgataatattaagagggatgggaggggtttttagaaggatgtaggtttttgatatgggtgtaagggtattgaaaggtgaaggggttttgagtggtaggagaggatcggaggtcgttgtaggggagggggagatgtcggaaggaggatttggataggaataacgggagagttttgaagttggttattaagggagtttttgggggtagaaggaaggtttttgaaagggaatagtgatgaggatggaagatttttgagggtgatggggagatatgaaaggagatgttgaggcgttggaaaaattttaatagggaaaaggagggattaggaaataggatatttattaaggttgtgttaagagggttatagggttagaaagggattggagtttgacgttgaggatgttggtaaaggttaattatagttaaggataatggagaatattgagaaagatggaatggggttatatatgggtttgaggggtgttgagaggggatatagtttggtcggataagtttgatgattttttagatatattaggtggtcgggagaaaaatgttagttgagaagagtgattatagtttttttgagggtagggattttgtttgatttatttaggtatttttagtgtttggtatagggtttaaggtaatatatagggtttagtaaagatggttttaaattggggatataaataaattaagttaagggatttagtgatatgaagtttttttaggatagattagtatagaattgatagtttaaaatattgtttggggaaaggatttttttgttattattttatagaatgtgtttggttataaatttggttttggtgggaagtattttttaggtagtagaaattttttaatttaggtttttaaaagtttgaggttttgtatgtgtgtgtatatgttattgtagttgagtgttgataatgattgaagtgtaattattttttagtgtaaattttaaaataagaaaattttattaaatgtagattggttggttgaagttattataaagaagtaatttagtgtgtatatttattattaagtttattattttagagaaagatagtatattattttaaatatttgtgatttattaaaaattgttttgtattaaatagtttattaattaagtttgatttgatttagg

SEQ ID NO: 640 - DNA, 6866 bp, Artificial Sequence
  chemically treated genomic DNA (Homo sapiens)
tttaaattaaattaaatttgattagtaggttatttaatatagggtagtttttaataggttatagatatttaaaataatgtgttgtttttttttgagataatgaatttaataatgaatatatatattaagttatttttttatagtaattttagttaattagtttatatttaatgaggtttttttgttttggggtttatattaaggaataattgtattttagttattattagtatttaattataataatatatgtatatatatataaaattttaaatttttaaaagtttggattaaaagatttttgttatttagaaaatattttttattaaagttaggtttgtagttaagtatattttatgagatgataataagggaattttttttttagataatgttttagattattagttttgtgttaatttattttagagggattttatgttattgggttttttggtttggtttatttatatttttagtttaaaattatttttattaggttttgtgtgttgttttaggttttatgttaagtattggggatatttagatgaattaaataggatttttgtttttaaagagattgtggttattttttttagttgatatttttttttcggttatttgatatatttaggggattattagatttgttcgattaagttgtgtttttttttaatattttttagatttatgtgtagttttattttattttttttagtgttttttattgtttttaattgtagttaatttttgttaatatttttagcgttaagttttaatttttttttgattttatggtttttttaatatagttttggtgaatgttttattttttggtttttttttttttttattggggtttttttagcgttttagtatttttttttatgtttttttattatttttagagattttttatttttattattgtttttttttagggattttttttttgtttttagaaatttttttaatggttaattttaggattttttcgttatttttatttagatttttttttcgatattttttttttttttgtagcgattttcgatttttttttattatttagagtttttttattttttagtgtttttgtatttatgttagggatttgtatttttttggggattttttttattttttttagtgttgttagggaattgtatttttttcgggattttttttattatttttattgtgtttgtatagtgttagggattcgtattttttggggattttttttattttttttagtgtttttgaattttggttaaagatttgtattttttttgggatttttttttttttttttagagttttcgtatagtgttagggattggtattttttttagtgttttttaatttttgttagggatttgtagttttttcggggtttttttaatttttattagtgttttcgtacggtgtgagcgatcggtatttttttagcgattttttatatacgtttgtgttttcgtagtgtgagggatttgtatttttttggggatttttgttatttttttttgtgttatcgcgtagtgttaggggtttgaattttttttagagtttttttatttttgttagaggtttcgtattcgtttaggaggtttttaatattttcggagtttttttattttcgcgttagcgcggtcgtattttttcggtcggttgcgtgttgagtattagtattaggtaggttgggtggtagtgtagttggagaaagtggtagaggagtcggttcgcgtcgagttcgcgggcgtatattattagttcgttagtgtcgagtagttttagtattagttgtcgttcgtattttagtagcggcgttatggtaattcgtcgagtcggttgttttgattttatggaagttttttcgggtcgtagtcgaacgtagtcgaaggaagtcgatttttagtggagagtaggtcgaatttaatcgaagagagtcgagttcgagaggacggtagttagtcgaacgtagtcgaggagagttgagattgagatgatcgtgggtcgaacgtagtcgaagaggagtcgaggttacgataggcgcgtttttagaaagtcgaagagagtcgagtttgagaaggtaagcgttggtcgaatttagtcgaagaagagtcgagtggagtcgaagatttatggagttatttgtaggggttggcgttttttgtcggtgtagtttgtagatattaggttttatttacgttttttttgagtttttatattttttggtattttagttttaagttgttaaaaagtaagggaaggggaagtaagtttaaggagtttaatttttcgatatcgatagttgaaaaagttattggttaatattttaaatgcgttaagagttagtagtatttgttttttagggtggtttttggtttttttttttgcgattattttttattttttttttaattttttttttttttttcgagataggatgttgatatgttgtttaggttggagtgtagtggttgtggaataagtagaattatttattgattttagatttttgtttgttttttaaagattttaatataataaattatttttaaaaatttttttttttattagagggatatttttcgtagtgtttgttttatatttagaaatgtttgatagttgaattagtagaggaattgttttgtatagaaattttttatttttgttattagaaaatagaaaatataagtaaataaaaatgaaaattatttgtttttattatttggaaataattattgttaatattacgaaatttattttatttagtttttttttttttatttatatatatatttttttattatacggagtttttttatcgatacgagataattaatatttttgatttaaatttttagttttgttattaatatttggtaaatttttgaatatgatgttttatatttttttataaagtttttttatatggttgatgagatttttattatgtgggtgtatttatttaattgtttattagaggatatttagtttgtttttgtttttttttttttagtaatataaataatattttattaaatatttttgtatgtaaatttagtcgtggtttttagatatacgtttagaaatgaataattattgggataaagagaaaaaaatttgtaaggttttttattttatttatattgttatattgttttttagaaagtttatattaatttatatttatattagtcgtttttaagaggatttgtttttttatttttttattgtttaatttggtattttgtttatattttgttaagatgaaaatagtatataatttttgaatgttgtttaagtggaaagggttgtcggtagatattttatatatagcgttttttttgaggtagatattaatttcgttagttttgttagtgagaaaaatggaggtgtagggaggttatataatttgggtaaggttacgggagttagttagtgtattttttagatttattttaggacgtgatatgggggtatttaatatatatttaggaaatgaagattgaaatgataaagttgaaatttaaatttgatttttaagcggtggtaggtagaatatcggttttttaaagatgtttatattttaatttttggagtttgtaggttgttttatgtggtaaaggggggtttgtagatgtgagtatgttaaggtttttgagatggggggattatatggattatttaggtgggtttaatgtattataaatgtgtttataagagaaagagagaggtaggagggttagatttagagatgtgataggaggtcgagtttagagtgatgtggaacgggtattgaattaaggaatgtagtttttataagttgaaaaaggtaaggaaatggatttttttttagggttttcgggaggattgtagttttatttatttattttggattttcgatttttagaattggaagataatgaatttgtgttaagttcgtttgattagatgacgttttaagttgattaaaataaaataaaatttaaaaattatatatagggtcggacgcggtggtttacgtttgtaattttagtattttgtgaagtcgaggtaggcggattatttgaggtcgggagttcgagattagtttgattaatatggtggaatttcgtttttattaaaaatataaaaattagttaggcgtggtggcgtatgtttgtaattttagttaaggttgaggtaggagaatcgtttgaatttaggaggtagaggttgcggtgagtcgagatggcgttattgtattttagtttgggtaataaaagcgaaatttcgttttaaaaaaattaattaattaattaaataaataaaaattatatataggagtatatagtgaaataatttttttggaaggcgattggttaatttatatagaaattttaaatatatgtatagatatatatatatatatagttatttggtgaatgtttatggggtatttaatgtgttaggtattgttttaagttttgggagtttattagtgggtaaagcgggtatagaatttatattttagtggggagtttgtatatgaagatgtgtatttattatattattgtgtggattattgttattttttggatattttttttaaatgtttaagaataggagagtagttaaaatttttttgtgtatttttgataggtagaatattagttatgaaaatttgtatgtggaaagatatttaatatgtattattgtatattgaaaaaagtagttgtaaaatagtaatgtatagtatggttttatttgtataaaaataaaacggtaaatggtatgtgtatagaagagttttagaataaatagattttaattatagtaattatttttggggagttgatataagtagtgggttttaggattagatttttgtattttagtatatgtttttttgttttgtttgatttttttattatgaatttatattgtttttataataaaaatgaaagaaaaaaattttttagttattgtataaatattttattagtattaaaaaatattattttgtgaattttagatttaaatgtgtgtggtgggtaatatttaatgttaaatgttggtatttggggaagtagatttttataaattgtgataggttgtggttatatattttatttttgtttttgggtaaaagtttttaatttgaggtgaagattttttttttttttttttttttttttttgagatagggttttattttgtcgtttaggttggagtgtagtggtatgaatttggtttattgtaatttcggttttttgggtttaaataattttcgtgttttagttttttgagtagttgggattataggtatatattattatgtttagttaattttgtattattagtagagttggggtttcgttatgttggttaggttggttttgaatttttgattttaagtaatttgtttgttttagttttttaaagtgttgagattataggtatgagttattatttttagtttaaagtttgttttttatattttttatggtttttgatgttttttttgttttaaattatttttaatgaggattttaattattttattagaatttaaatttttttattattttttttttaatttggttttttgttttgtatttttgtttttatttttatagttttttatttttgttttatagaagttttttgattttatgtttatttttttatttatttttatatagatttagatatatgtagattttttatatatttatttagatatatttagatataaatatatattatttttatttaaattatagatatagatagatagaaatttatagttggttttttgtgggttttgtatttgtggatttaattaattgtggtttgaaaatatcgaaaagaaaaattaattaaaaaataataatatagtaataaaataatttataaaattagaaaagttaaattttatttgaggtttttttaatattttatttaaaatttgatatttttgttttaatttataatatatagggatttaagaatataaagtataaatttggatatttatatatttgtttagtgaagagtttttaagtaaagtaatgttttatcgtagttgttttgtttttttttatttttttttggaatagagaattttaagggtattattattagaattttatagatatataaatatttatgtttatatattagatttatagtaagatttttgtaaaagtggaatgattttatataagatgtatgtagttttttaaatgttgtttgtttttaagtgtttttatatagaaatatgagaggtgtttatttttatagttttagaaggtatatatattttaggcgttaggagtgagaaatatttgttggtgtaggaagagttagagatattttatttagatattagattagttattaatattttataagagcgtttgtgttgagaattggtgagtttttgtttttagattttttgttgtatgatttttagtagtcgtaattttttttggttgttggtattgtcggttgagtatgttgaatttaaagaatttaagtattaaatataatatttatatatttggaggaattttgttaatatgtattaaatgattgtgaattagaagtttttttgaatttattgttttggtatggtttagtgtttgtagtggttgcgtgttttaggggatagaatatggtttttagttacgtagatttggattgaggtttagtattgttcgaataattatttggttttggtaagttataaagtttattatttattaaataatgtgttttaggtggcgggtgtttatgtttgtaattttagtattttgggaggttaaggtagatggattatttgaagttaggagtttaagattagtttggttaat

SEQ ID NO: 641 - DNA, 11049 bp, Artificial Sequence
  chemically treated genomic DNA (Homo sapiens)
tgtttgaagtgagtattaaatattttagaagtgtgaattttatgtatttgagtttttttagttgttgttggttttttttttgttgttaatttgtgatttataaatgattaggattttttgttttttaattttagggttttgttttaggatttaaattagtaatttggtgattataaggtgttgaatgtgttggtaattatatcgtaatatattttaaggaaaaggtttagatttttatttttaaaatatttttattttttttttgaattttatattcgtttgtttattcgtatatgtttagtttatagaaggggatatatattatgaaatggttatttttttgaagagaatattttgtttgaaatgtaaaggattgaaagagatttgtaggttgttgattttgttattttatattggaatttttaaaaagattttattaaataaagttttgttttttatttttaattatatgaatgtttttaaattttgttttaggtagaaggtattattgtgtttttgaagtatatgataatttgttaattttgtttaattggtatattgtaagaaattattttgagttttttataattaatgaaataatatgtattatgatgattgtaattttagatttttaatttaataggaaatagaaaatttgatttttttattagtttgaattaaatgaagttgttatttttgtaggttaaaaatggttgaatattagtaattttatatagtttaattgaatattttagagaagacgtaggtaggaagaattaagaggaaaggagaaaaatgtaaaataaaataagaaattaaaggatagggagatatttagaaaaataggatgagttatttagattattgattataattaatttttataaaagttttgatttgttttaagtttggtttttaagtttggttttttagttattaagagtataatgaggtttgagtttagtgagattatttttttcgtagaagttgtaagtaagagttattgtatattttttttagaagattagtaaaatttttttgatatttgattttttggttagtttttaggaattttatagatatagtgaaagtttaaatattggttttgtatttataagttatattatttatagtgatataggtaagttaaggttaattttttttttgtgtttatttttttattagtaaagtgggggtaatagtatttattttataaatgaatttgaagaataagttaatatatgtagtgtttagaatagtgttttgtagataggaagtgttatttaagagtttgttattattttaaaagatgtgaattttattatttagagtttttagagagagttttttagatagtattttaaggagttaattttttttaaattatatatgtattttttagttgttgtttttttaaaagaatattttatatttaagaatgttgttttatttttttgagatagagtttcgttttattgttaaggttggagtgtagtggtgttttttgtaattttcgtttttcgggtttaagtggtttttttgttttagtttttcgagtagttgggattataggtatgtattattatgttcggttaatttttgtatttttagtagagattgggttttattatgttggttagggtggtttcgagttttcggttttaagtgatttgtttgtttcggttttttaaagtgttgggattataggcgtgagttattatgtttagtttttgttttggttttaaaagtatttataatatttaaatgtttatgttggttatttatttttatttagtttataggtagaaaaaaaaaagtttatttagattaaattttgtagtaatttttttttttattgttattattgttaaagaattgtgtgttattattaggttaagttggtgtagtatttaaaatatttgttaatttgtttttttttagattggaggggtttaggtagtttttttaggatttattatattttgtattttaattttattaataatatttttattttttttgtattagcgatttatttaataaattaaattatatattattattaggttagtttttaaatagtttagtagtaataagaataataagatgttggtcgtattttaattttattggtagaaattgagggttttattggtgaagaaatttgtttaggattatagtgttttagttttttagggttattataataaaatattatagatagggtggcgtaaataatagaaatttgtttttttatggttttggaaattagaagtttaggagtaggtaggtttggttttttttgaggtttgttttttttatttgtagagggtcgtttttttattgtgtttttataaggttttttttttgtgtttattatttttggagtttttttttgtggtttaattttttttttttataaagatattagttaaattggatttagggtttattttaatggtttcgttttaatttaattatttttaaacgttgtgtttttagatagttatattttgaggtatttaggtttttatagatgaattttggaggatataatttagattataatataaggtaatatatggtttagatgagatttgaatgaatgattagtttaatttttaagtagatttttttagtagattgtaaggtgtattggagagttttagattagaggtttaagaggttatttaggtaatatttatagaattgttaagtgttaggattgggggatgtagtagttacgaaaatcgtttttcgttttagtaagtttatagtttattatggggaagagataaatattgaataggtagttatattatttttagtaaaataataattgggaatagtttttggggattattttatatatggaggaaatgtaaaaaatattttgttaggattatttttgtagtaaattagatgtgattaggttaattaaatatggttattgtgaattattttattgagtatagaagtggttttgttaaaaatggatttttttacggagtacggtggtttatgtttgtaattttagtattttgggagattgaggtaggaggattgtttgagattagtttgggtaataaagtaagattttgttttaaaaaaaaaaaaattagggcgtggtggtgggggtttgtaattttaattattcgggaggttgaggtaagagtattatttgagtttgagaggtggaagttgtagtaagttgagattgtattattgtattttagtttgggcgatagagtgagattttgttaaaaaaataaaaaataaaaaaataaaaaaaattaatttttcgtatatttttgttataaagaagtttttaaaaaattgtttgtttttttaagttagtttttttattgagtttaaatttcgttttaatttgaataaatatggatgttaatattattttttatagttattagtgttaagtgcgttgtatgtaatattttgaatatttattgaagtttgtaaggttggttttatgttttgattattgatggagatataaattttgaataattgtgattttagggatgttaaatattatagtgaggtacgatgcggggatttgaattttggtttgagggttttagagttgtggttttttttggggttattttgttaattgatttttagttttttttgatttataagtcgcggtattataatttttagatgttgaagaaaattaaattatatgttaaggattaaggtttgtgaatttttaaaatttgggataggttttagttaatttagaaagtttattttgttaacgttaaggacgcgtagttgtgatatagttttaggaagtttagatgatatgtgtttaaggtggttggggtatagattggttttatatattttagggagataggagatattaattaatatatgtaagtatattggttttttttagaaaggtggggataattcggaagtaggaagggtttttaggttataggtagatgagagataaaaggttgtatacgagtttttgataagtttttttaaaggagataattagaatatgtatttattttagtgagtagaaggatgattgattagaatgggaggtaggttttgttttgagtagtttttagtttgattttttttttttgtttagtaattttgggattttaatatttttataggttttaaattttattattttttagttattacgtgttagtatataaataaatagtataaaattaagaaggtatttattttttggttgtttttttacgtgtaaaataatattttgtgttaagtatttttatatacggcggcgtaaaggtagaaatcgatattaaaaaagcgtgtagaaaatagtttttagtttgggtaatatagggagattttatttttataaaaataattcgttaagtatagtggtgcgtatttgcggttttagttatttgagaggttgagatgggaaagttgtttgagttcgggtagtaggagttttaggttgtagtgagttaagaatgcgttattggattttagtatgggcgatagcgtgagattttgttttaaataaaaataaaagttcgttattttattaagaaggcgtttttgtatattgttttaatgtttaacgtttttaggatgttagcgtgacggaagtaagtaattattaaggtattattattggcgttaaattttttattttcggagtgttgtaagcgtagaaaatatacgttatgtgcggaggcggagttttcgttttgcgcgtcgtattagacggaaatcgagcgggtttattttttatgggtttgcggatttattagcgaaggcgggaggtgtcgtagggatattttttggttgttttcgtcgtttgcgtggtttttgtatttcggttttttattagcggcgtagacgtttgggtttaagcgttgggcgaggcgaggttttgttttttttcgttaacggttattttttggatttgtttttttttcgggaggcggtgatagttgttgagacgtgttgtagttagagttttttcgttttaatgcgtttttattagtgtcgttttttattggaaaatcgtggtttttgtattatttgttatttttgttgtgtaggagtagggagggttttttttcggggttttaggcggcggtgtagttcgtcgtagaagaattagagtagaagttgtcggggttcgtttttaggacgtagtcgttttatgggggtttaggggttttggaagttgttggagtgtttcgggcggtaggttagtttcgaagcgttggaagggaagattttggttgttggtatttttaacgtcgcgttgggatttggggtgtagggattcggggttggatttttcgcggggttttgttttgggtatagtggtatttgtaggatgatggttttgggtcggggtcggggtcgttatagaatttttgttattaggttttttaagtatagtcgtttttcggtattttcggggttttggttttagtttttttttcgtatattacgatgtttaagtttttttaatttttttatataatggcgtggtatttgtatataaattatttattttcgtaattttttaaatcgtttttagtttatttgtaatgtcgaatgtaatgtaagtgatttgtaaatagttgttatattgtattttaaaattttttgtagtttttattggtatgttttatttatttatttttttttatcgtaaatatttttgattcgtggtaggttgattgcggaatcgggtgatgaggcgggtcgttttgtttgttttttttagttttgtagttttagcggtttgtgtattttggtttgttattttgtggtagtgttttatgtttttttttgttttagtttttttatttgtaaagtagaggtggtgatagtatttatatataggattggaatgaggaataaagaaattgtttatatgagagaagtttagtgcgattaatatagtaaattttaaagttattattttgttcgggaggttagtaaggagagtagagtagatttcgacgattagttttgtttgagttttgttttatttatgttttttagaggaaggatagtgtggataggtgttttatttattttttaaattgattttttaaggattattgtttttgtatatgtttggttggttttgtttgttattggaattaaattttttttttattagtaaaacgtgatattgtttttgaaatttttatttttttttttgttatgtagttattttttttttttttttgagtatttattttggtttagaatttggtgatattttatattaattttttaaatggggatttatgagtttaggggttcgtgggtttgtggaaagagttttgtaaatgattgcggggggattggggacgggaaatggagtgtaagagtgtgtgggcgtttagtaaaggaatttttgattgtggagttttaattttttagtaggtataaaatttataaataaaacgatattgataagttttaaaatataatgagattattattttttgtaagtgaataatttttaaataaatttgtaattgatttttggtttaaaagtttttatatagggtattttgaattggggaaagttaaaggatttttgttttgttttgttttgttttttgttttttagagtatatgcgttgttgttgtttttaagttgttgtttagtattattgtagtttaaagatttttttagaaataaagggtaaaggttagtttttagtgataagaatttttaaaattttagtaaagatttagattattttatgtagtagtttttgtgaagaattattaaagaggattgtggttaggtttagtggtttacgtttgttattttagtattttgggaggttaaggtaggaggattatttgagtttaggagtttaagattagtttgggtaatatagtgaatttttgtttatatatagttaaaaaattagttggacgtggtggtttgtatttttggttttagttatacggaaggttgaggtaggaagattgtttgggtttaggcggttaaggttgtaatgagtcgtgtttatgtttgtttttgaataaataaataaaaaggattgtgaaagatattttagttatgataattttatatatttataataaattcgtttatgttaaaggagtatatttgattatttgttttataatcggttttgttttattttatttttacgggaatttagatatttgaaattatttagattttattgtattgtttgttaatgataaatttattcgttattatattagttttataatttatttttgtatttttatattaaattgtttggtttttaaattatttatatagtttagtgttttatttatatagtttaaatgtttgtgttaaataatgtagaagtaagttaaatttttgttttttatagattttaatgtttgtaatatgcgtttaagtgtattagtaagatattattatttttttaggttatgtatattaatggagatttttaagttatttaattaaagaattaaagaaatttattttttgtattgaaatgttattggtttttgggttttatatcgaaagtgatttttggttttgttgtagattttaatttttttgttcgtagaaatttaattttgcgtatataaatttattgaaattagataagttaaattatataaatatttttagattgttttattttttatattttttgtttaataatttatgtgaatatttttaggtcgtttaattttatatattttatttttaagaatttaagttaaaatttttaattttagttgagaattggtattatttgtagttaattgaaaaataaaaaataaaagaagttttattttagtttttatgatttagaattttaggtttatggggtttaataattcgtatgttttagaagttttatattttattttaatggatagtagggatgagagttattgatttgaaattagatttttttattgaagttaaagtttaaagtagtgggttaagtagaaattaatttaattttatgtaatagtgagttttatggtttttttagattatatttgtagtaagtagaaatatcgatttaatataagatagatgtatattaatattaagttttatttttgagatgtattttttattcgattttttttcgtggtttttattattattgtttgcgttaatttgggttattgtaatttattttagaattggtttttttataatttgttttttatatgtttattaaagttatttttaaattatgttttagaaattttttagtggtcgtattattttttgttattttttttgttttgttgtattggttttttggagatagggatcgtttttgttttgtttatggttgaattgtttggtgtatatttttagggttttggatatgtttggtttatggtattgttaaatattatagaaataagtatagtagtagtttgttttttattaggtattttgttatatagtgttttgtaaattaattgttgatggatttatatttttttttatgttagtaaaagttaggtagtgtatatttatttaaatattaaattgtttaatttatttaatagtagatatttattgtgtataagagtttttgtgaaagggagtgtagtgtataaattgttcgggtaagttatggagtatataggttgggttttttttttgttagattataaattttatagggttaatattgtgttttgtttagtgtattggatatgttagtgtatagaaaaaatgttgttatataataaaaatagaaataacgtgataggtggtttttttaatgttttttttttatgttagaaatttatttgtaaatattagtattagtttaggtttttttttgttttttttttttttttgtttttttttgagatagagtttttttttgttacgtaggttcgagtgtagtggcgtgattttggtttattgtaattttcgttttttaggtttaatcgatttttttgttttagttttataggtatacgttattatgtttggttaatttttgtatttttagtagagataggattttattattttggttaggatggtttcgattttttgattttaggtggtttgttcgttttggttttttaaagtgttgggattataagtgtgagttatcgtattcggttttaatatattttttaaataggaatgtatataaggaggatgtttttatttagattgaggaggggatttttggattgagattttagagtaggagagaattaggcggagagagggagaaattgttttaggtagaggaagtagtatgtgagaagaatttggaggtaggaaggagtttagtgatttttgggtttgaggaaagtttagtagtaggaagtgagtagaggttagattatttaaggttttttagattaggagaagaagttttagatagtattttgaaggtagtgggaagttttggagggtttttattaaagatacgttggtgaaatttagtatatatttttaagatatattagaagatagaattgatagatttggtaatagttataggtggtgatgtttagtattttggtttaggtgaatggtagggatatttattgagatgggggtatgagtagttgagtggagaagatatggagtttagttttgattatgttaagtttgaaatgtttatgaggtatggggtagagacgttatttgggttttttgttttggggttaggagcgtgttttgggttagatatatatatggagttagggcgtggtgtatgtggaggggagtggaggttgatagtttagataggaggaaagaagagggtttgagaaagattattgatgaagtgaatattttaatagtgttataggagttggtaaagagtttgagagtaggaaaattagtagagcgcggtgttatttttttttttggataaatataatattttttgagaagtattttttagaaaagtttaaaaatataagaaaattttaagatgaaaatataagttatttttagttttagtagatataatatttattttaatattttggtatgtgaattagttttttatatttaatatatatattgtattagaaaatggagttatattttatatggttttatagtttgttttattatttttaataatatttaatgattattttttttattatatatgtttttgtaatttttatttttaagggttttttggtattttagtaaataggtttgttataattagttttttttttttgagacggagttttgttttgttattaggttggagtgtagtggcgcgatttcggtttattgtaatttttgttttttgggtttaagcgatttttttgttttagttttttgagtagttgggattataggtgcgtattattatgtttagttaatttttgtatttttagtagagatggggttttattatgttggttaggatggtttcgattttttgatttcgtgatttatttgtttcggttttttaaagtgttgggattataggtgtgagttatcgcgttcggtttatgattagttttttaaaaagatttgttggaaaatttttaagttgatttttatatttttattattataaataagtattttgtaaataatttttattatatatttatgatgattttttgaggattaatgtttggaagtggtaaaatagattgtaaagttttaaaaagttttttttattatgaattgttaaattgttttttagaaaatttgtgttaatttatgaaaattttttagtaattatttatttttttttaaagaagtaattttttgtaatgagattttttaaaaggatatgtttgtttttgtatgattttaaaatgtagtatgtgaataggggtaataagagtttaattaaaagttaattgattttaggtagattttatgagagttaaatgttttttaattttaaatgaatagtgataagtatttagtgtttaacgtttggataatattagttattaggaaattgaagttgtgaggatgaagagaaaaatttcggagttttttttattaataatttttttaga

SEQ ID NO: 642 - DNA, 11049 bp, Artificial Sequence
  chemically treated genomic DNA (Homo sapiens)
tttgggagaattgttaatggaaaaaatttcgggatttttttttttatttttataattttaattttttaataattgatattatttaaacgttgaatattaaatatttattattatttatttaaaattgaaaaatatttagtttttatgggatttatttaaagttagttaatttttagttgaatttttgttatttttatttatatattgtattttaaaattatataaagatagatatatttttttaagaagttttattgtaaagaattgtttttttaaaaaaaaataagtgattgttaaagaatttttatgaattagtataaattttttggaggataatttgataatttatagtgaaaaaaattttttaaaattttgtagtttattttattatttttagatattgatttttagaaaattattatggatatataatgagagttatttatagaatgtttgtttataataatgaaaatataaaaattaatttaaaagttttttagtaggtttttttaaaaaattaattataggtcgggcgcggtggtttatatttgtaattttagtattttgggaggtcgaggtaggtggattacgagattaagagatcgagattattttggttaatatggtgaaattttatttttattaaaaatataaaaattggttgggtatggtggtgcgtatttgtagttttagttatttaggaggttgaggtaggagaatcgtttgaatttaggaggtagaggttgtagtgagtcgagatcgcgttattgtattttagtttggtgatagagtaagatttcgttttaaaaaagaaaaattaattatggtagatttatttgttggaatattaaaaagtttttaaaaatggaagttgtaggagtatgtgtgataaggaagatagttattaaatattattaaagatagtaaaataggttataaaattatataaagtataattttattttttgatatagtatatatgttaaatataaaaaattagtttatatattaaaatattaaagtagatattatgtttgttgagattaaagataatttatatttttattttgaagtttttttatatttttaaatttttttaaaaagtgttttttaaaaaatgttatatttgtttaaaagaaagagtgatatcgcgttttgttggtttttttgtttttagattttttgttagtttttgtaatattgttaaagtatttattttattagtgattttttttaggtttttttttttttttttgtttgaattattaatttttatttttttttatatatattacgttttgattttatgtatatgtttggtttagagtacgtttttgattttagaatagagagtttagatgacgtttttattttatattttatagatattttaaatttaatatgattaaaattgaattttatgttttttttatttagttgtttatgtttttattttagtgaatgtttttgttatttatttgagttagaatgttgggtattattatttatagttattattaggtttattaattttattttttaatgtattttgaaggtatatattagattttattaacgtatttttggtgaaaattttttaaagttttttattgtttttaagatattatttaaaatttttttttttggtttaggaagttttgaatgatttggtttttgtttattttttgttattgggttttttttaaatttagaaattattaagtttttttttgtttttaggttttttttatatgttgttttttttgtttgaaatagttttttttttttttcgtttagtttttttttattttaaggttttagtttaggggttttttttttagtttagatgaagatattttttttgtatatatttttatttaaaaaatatattgaggtcgagtgcggtagtttatatttgtaattttagtattttgggaggttaaggcgggtagattatttgaggttaggagatcgagattattttggttaaaatggtgaaattttgtttttattaaaaatataaaaattagttaggtatggtggcgtgtgtttataaggttgaggtaggagaatcgattgaatttgggaggcgaaggttgtagtgagttaagattacgttattgtattcgagtttgcgtaatagagggagattttgttttaaaaaaaaataaaaagaaaaaaaaaatagagagaaatttggattgatgttaatatttgtaggtaaatttttaatataggaaaagaatattgaaggggttatttattacgttatttttgtttttattatgtggtagtattttttttatgtattggtatatttagtgtattgaataaaatatagtattggttttatggagtttataatttagtagggaaaaaatttagtttgtgtgttttatggtttgttcgggtaatttgtgtattgtatttttttttatagggatttttatatataataaatatttgttattaaataagttgaatagtttagtatttaaatgaatgtatattgtttaatttttattaatataaaaaaaaatgtaggtttattaataattaatttataaaatattatgtaataaaatatttagtggaaagtaagttattgttatgtttatttttataatatttagtaatattatgggttaggtatatttaagattttagggatatatattaaataatttagttatgaataaaatagagacggtttttatttttaggaagttagtgtagtaggataaaaggaatggtaggaggtgatacggttattgggaagtttttagaatatgatttaaggataattttgatgaatatgtgaagaatagattataaggaaattagttttaaaatgagttataatagtttaagttaacgtagatagtagtggtggagattacgagaagagatcggataaaagatatattttagaggtagaatttggtgttgatgtgtatttgttttgtattagatcgatgtttttgtttgttataagtatagtttggaaaagttatgaagtttattattatataggattaaattagtttttatttggtttattattttaaattttaattttagtgaggaaatttagttttagattagtggtttttatttttgttatttattagaataggatatgaagtttttgaaatatacggattattaaattttatgggtttaaaattttaaattatagagattgaggtaggattttttttattttttattttttaattaattataggtaatgttaatttttagttagggttgagaattttggtttgaatttttagagatgaaatatgtaaaattagacgatttgaaaatatttatataaattgttagataagaaatatgaaaaatgagataatttgaaaatatttgtataatttgatttgtttaattttagtaagtttatatacgtaaaattaaatttttgcggatagaaaagttaaaatttgtagtaaagttaaaaattattttcggtataagatttaaagattaataatattttaatataaaaaataagtttttttagttttttagttaggtgatttaaaaatttttattagtatatatagtttaaagagatggtaatattttgttaatatatttaaacgtatattataaatattaaaatttataagagataaaagtttaatttatttttgtattatttgatatagatatttagattgtataaataagatattaagttatatagatggtttaaagattaaataatttagtatagagatataagagtaaattatgaaattagtataataacgggtaagtttgttattaataaataatataataaaatttaaataattttaggtgtttgaattttcgtgaaaatgaaataaagtaaaatcgattgtagaataagtaattagatatatttttttgatataaacgagtttattataaatatatgaggttgttatgattagaatgttttttatagttttttttatttatttatttagagatagatatgaatacggtttattgtagttttgatcgtttgggtttaagtaatttttttgttttagtttttcgtgtagttgggattaaaggtgtaggttattacgtttagttaattttttgattgtgtgtagataggggtttattatgttgtttaggttggttttgaatttttgggtttaaatgatttttttgttttgattttttaaagtgttgggatgataggcgtaagttattgagtttggttatagttttttttagtaattttttataagggttgttatataaaatgatttaaatttttgttgaagttttaagggtttttgttattgaaaattaatttttattttttatttttgagaaaatttttagattgtaatgatattaagtaatagtttgagggtagtaatagcgtatgtgttttaaaaaataaaaaataaaataaaataaaataaaaattttttggttttttttaatttaaagtattttgtataaaaatttttaagttaaaaattaattatagatttatttaaagattatttatttgtaaaaaatgataattttattatgttttaaaatttattaatgtcgttttatttataagttttgtatttattgaagaattagggttttatagttagggatttttttgttgaacgtttatatatttttgtattttatttttcgtttttaattttttcgtaattatttataggattttttttataagtttacgagtttttagatttatagatttttatttaggaaattggtgtaaggtattattagattttgagttagaatagatatttaaaaaaaaaaaaaaaatgattatataataaagaaaaagataaaaattttaaaagtagtattacgttttgttaatgaaaaaagaatttaattttaatgataaataaaattagttaaatatgtatagaaataatagtttttaaaaagttaatttaaaaaatgggtaaaatatttgtttatattattttttttttaagaaatataaatggggtaagatttaagtaaaattaatcgtcgaagtttattttgttttttttattgatttttcggataggataataattttaagatttattgtattaatcgtattaaattttttttatgtaggtaatttttttattttttattttaattttgtgtgtagatattattattatttttattttgtagatgagagaattaaggtagagaggaatataaagtattgttataaagtgataaattaggatgtataggtcgttaagattgtaaagttggggaaagtagatagggcggttcgttttattattcgatttcgtaattaatttattacggattaaaaatatttgcgatggaaaaaaataaataaataaaatatattaataaaaattataaaaaattttaaaatatagtataataattatttatagattatttatattgtattcggtattataagtaagttagaaacgatttaaaagattacggaagtgggtagtttatatgtaaatattacgttattatataagggagttgaaggaatttgaatatcgtggtatacggaggaggggttggaattaaagtttcggggatatcgagggacgattgtatttagaaaatttagtgatagagattttatagcgatttcgatttcgatttaagattattattttgtagatgttattgtgtttaaggtagagtttcgcgaggaatttagtttcgaatttttgtattttaagttttaacgcggcgttaaggatattaatagttaggatttttttttttagcgtttcggggttgatttgtcgttcggagtattttagtagtttttagagtttttggatttttatgaggcggttgcgttttaagagcggatttcgataatttttattttaatttttttacgacggattgtatcgtcgtttaggatttcgggaggaagttttttttgtttttatataataaagatggtaaataatatagaagttacggttttttagtgggggacggtattaatgggagcgtattaaagcggagagattttggttgtaatacgttttagtagttgttatcgtttttcggaagaaagataggtttagagaatggtcgttggcggggaggggtagggtttcgtttcgtttagcgtttaggtttaaacgtttgcgtcgttaatggaagatcggggtgtaagggttacgtaggcgacggaaatagttagaagatgtttttgcgatatttttcgttttcgttggtgggttcgtaaatttatgaaaaatgggttcgttcggttttcgtttaatacgacgcgtagggcggaagtttcgttttcgtatatgacgtatattttttgcgtttgtagtatttcggaagtgagaagtttagcgttagtggtgatgttttggtggttatttgttttcgttacgttggtattttgaaggcgttaagtattaaaataatgtgtaaaagcgtttttttggtggagtaacgggtttttgtttttgtttgagatagggttttacgttgtcgtttatattggagtttagtggcgtatttttagtttattgtagtttggaatttttgttgttcgagtttaagtaatttttttattttagttttttaagtagttgggatcgtaggtgcgtattattatgtttggcgaattatttttgtagaaatgaggtttttttgtgttgtttaggttgggaattattttttatacgtttttttagtatcggtttttatttttgcgtcgtcgtgtgtgaagatatttaatataaagtgttgttttatacgtgaagagataattaaaaggtggatgtttttttggttttgtattatttatttatatgttagtacgtagtaattaaagaataataaaatttaaagtttgtgaaaatgttagggttttaaaattattaagtaaaagggaaaagttaagttgggaattgtttagggtaaaatttgttttttattttagttagttatttttttgtttattgagatagatgtatattttgattgttttttttggaaaggtttattagaaattcgtatgtagttttttgttttttatttatttgtgatttagaagttttttttgttttcgagttgtttttatttttttggaaggaattagtgtatttatatatgttgattgatgttttttgtttttttaaaatgtataaaattaatttgtgttttaattattttgggtatatgttatttggattttttggggttgtgttatagttgcgcgtttttaacgttggtaaaataaattttttaaattaattgagatttgttttaaattttgggggtttataagttttaatttttgatatatagtttagttttttttagtatttaaaagttataatgtcgcggtttgtagattagaaaggattagaaattaattaatagagtaattttagaaaaggttatagttttggaatttttaggttaagatttaaattttcgtatcgtgttttattatggtgtttagtatttttgaagttatagttgtttagaatttgtgtttttattagtaattagggtataaaattaattttgtagattttagtaagtatttaaggtgttatatgtaacgtatttagtattagtaattataaaggatagtattagtatttatatttgtttaaattggaacgaaatttaaatttagtgaaaaggttgatttaagggagtaggtaattttttaaagatttttttataatagaagtatacgggaaattgattttttttatttttttattttttatttttttgatagggttttattttgtcgtttaggttagagtgtagtagtgtagttttagtttattgtaatttttattttttaggtttaagtgatgtttttgttttagtttttcgagtagttgagattataggtttttattattacgttttgatttttttttttttgagatagggttttgttttgttgtttaaattggttttaaataatttttttgttttagttttttaaagtgttggagttatagatatgagttatcgtgtttcgtggagaaatttatttttagtaaaattatttttatgtttaataagatggtttatagtggttatgtttggttgatttagttatatttaatttgttataggaataattttgataaagtgttttttgtattttttttatatgtaaagtaatttttagaaattgtttttagttgttattttattgagagtaatataattgtttgtttagtatttgttttttttttatggtaaattgtaaatttattgaaacgaagaacgattttcgtgattgttatattttttaattttggtatttagtagttttgtaaatattgtttaaatgattttttaagtttttagtttaaagttttttagtgtattttgtagtttgttgaaagaatttgtttggaggttaggttgattatttatttagattttatttgaattatatgttgttttgtgttatggtttgaattgtgttttttaaaatttatttgtggaagtttgagtattttagaatgtgattatttgaagatatagcgtttaaaaatgattaaattgaaacgaggttattaggataggttttaaatttaatttgattggtgtttttgtagaaagaggaaattgggttatagggagagattttagggatgataggtatagaggaaaggttttgtgaggatatagtgagaaggcggttttttgtaggtgaaggagataggttttagaagaaattaaatttgtttgtttttggatttttagtttttagaattatgagaaaataaatttttgttgtttacgttattttgtttgtggtgttttgttatggtagttttgagaaattaagatattgtgattttaggtaggtttttttattaatgaaatttttagtttttgttagtaaaattagaatgcgattaatattttgttgtttttgttgttgttgagttatttaagaattgatttggtaatggtgtataatttagtttgttgagtgaatcgttggtataggaggggtgggagtgttattggtaaagttgagatgtagaatgtgatggattttagaagagttgtttgagtttttttagtttgggagaagataagttggtaagtattttgggtgttgtattaatttggtttaatgatggtatatagttttttaatagtaatagtagtagggaaaggaattgttgtagaatttgatttaaataaatttttttttttttgtttgtgagttgggtaaaaataaatagttaatataggtatttgagtattgtaagtatttttaaaattaaagtaaaggttgggtatggtggtttacgtttgtaattttagtattttgggaggtcgaggtaggtagattatttgaggtcgggagttcgagattattttggttaatatggtgaaatttagtttttattaaaaatataaaaattagtcgggtatggtggtgtatgtttgtaattttagttattcgggaggttgaagtaggagaattatttgaattcgggaggcggaggttgtagagagtattattgtattttagttttggtaatagagcgagattttgttttaaaaaaataaagtaatatttttgaatatgaaatatttttttgaagaaatagtaattaaggggtgtatatgtgatttaaaaggaattagttttttaagatgttatttaaagggttttttttaaagattttgaatagtaaaatttatattttttggaataatagtaagtttttaaatagtattttttatttataaagtattgttttaaatattatatgtattagtttattttttaaatttatttataaagtagatattattatttttattttattaatgaggaaataggtatagaaaaaaaattaattttaatttgtttatattattataggtgatatagtttgtaagtgtagagttagtatttgaatttttattgtatttataggatttttaagagttgattaagaaattaaatattaagggaattttattaattttttaagagaagtatgtagtaatttttgtttatagtttttgcgggaaagataattttattaaatttaaattttattgtgtttttaataattggaaagttaaatttggaagttaaatttagaatagattaagatttttataaaaattgattatggttaatagtttgaataatttattttgtttttttaggtgtttttttattttttaattttttattttattttgtattttttttttttttttttggttttttttatttacgttttttttgaaatatttagttgaattgtatgaaattgttaatatttaattatttttgatttataaagatgataattttatttggtttaagttaataaaagaattaaattttttattttttattaaattagaaatttaaaattatagttattataatgtatattgttttattaattataaaaggtttaagatggttttttataatgtattagttgagtagaattgataaattattatgtattttaaagatataatggtattttttatttaaaataaagtttaaaaatatttatataattaaaagtagaaaataaaattttatttgatgaaatttttttaaaagttttagtatgaagtaataaaattaataatttataaattttttttagttttttgtattttaagtaaaatattttttttagaaaaatgattattttataatatatatttttttttgtaggttaggtatgtacgagtgaataaacggatataaaatttaagaaaaaaatgaaaatattttaaaaataaaaatttgaattttttttttgaggtgtattgcgatatggttattaatatatttagtattttgtaattattaagttattgatttgagttttggaataagattttaaaattaaagaataagagattttagttatttgtgagttataggttggtagtagaagaaaaattaatagtaattagaggagtttaaatatatgaaatttatatttttgaaatatttaatatttattttaaata

SEQ ID NO: 643 - DNA, 6815 bp, Artificial Sequence
  chemically treated genomic DNA (Homo sapiens)
ttgtttgcgaattaaaaatttagagtttttttgtgaattatgttgttaagaattgtagatttaagttttaagattgtacgaatttaaattttgattttatggttttagttggtatgaagatataaagataattttttagtaaaaatagttttgaaagatcgggcgtgatggtttatgtttataattttagtattttgggaggttgaggcgggtggattatttgtggttaggagtttaggattagtttggttaatatggtgaaattttgttttaattaaatatataaaaaaattagttgggtgtggtggcggatatttgtaattttagttatttagggaggttgaggtaggagaatcgtttgaatttaggaggtagaggttgtagtgagtcgagattatattagtgtattttagtttgggtgataaaagtgaaattttgttttaaaaaaaaaaaaaaatggtagaatgttatatggaaagttaatttttagagatagtaatttagatatttataatattatattgtttttttaagtatttatattaataaattaattaatatttgttgatttaatatggttagggatagtgttgggtttttataatttttaagtaattttagttagattttgtttttaaggagtttatgagtagtatgaggagataaaaaatagataaataattttaatttaggaagaatttgataaatgtatgataattattattagaatttagaggagaggaaattttttttgaatagagattaaaggaaggaataatgaatgtggtagtatttgggttggatttattataagaggtatgtttttttttgataagttaagaaagtggggatttaaggtagaagaaaagaaaagttttgagtttttggagtattaaaattttgtttggttgaagtataggttatagtcggaggagatggattaggaaggatcgttatgggtagagaggaagttttgaatttatgggggaagttatgatttgggttaaagatagagttgggttatgttaagatggattttgaagtagtaaaaaaaaatttaagaaagtaaataggttgtagggtttaggatgaagttcgggaggaaagggtagagtggtttttaggaggtcgttaggataggtaaggtaatgggttttaaagggagtggtcgaaatgtaatggaaaaagagagattgtaaagttagaaggtttaggaattgttttttgattaggtgtggaaggtaagggaaaattagttttcgaagaagatagtgagattttaatttgggtggttggagagatagtgatgttgggtatagatacggggaagttgagaggaatattatgtttgagaatggtgatttatatttgaataagtttgtaatgtttagtagatcgttggaaaagtggggttggagatatatttaacggaggagttagattaatttttatttttttttatttgagagagttagtaagttacggttggaacgtgtgtgtttagtaggagagggtagggagggaagttaagagagttgggagttcgagtgaagtttttgttaaaggtagaagaggaaagtcggcgtagtatagtatatttttttatttatgtttattaagtttagggataaggtttattaagatgagtttggaagagaatgttggagagaaagtggttaagaaaattgtttttattgaattttttgggttaattttgattgtaagtttttgaataattaaagtttgtgaggagatagttaatttttttattttttttatgttaatagtgaataattgtagatttttttttttttttttttttttttttttgttttttttttttttttttttgaatatttttgtttttttttgggattggtttagagtatgggtggttattgttgatttataggaggtattattgttattaataaagggtaatagtttttttttttaatatttatttatatttagtatttatttttaatattgattatggagagagtttttttgtgtttaaatattgtaatattgggggttttttaaagtataaaaatatatatttgtatgatggtattattaatatttttatggttttttattttttttttgtattggttttaagagttatttataaattttttagtaattgtatagtgttttagggttagagatcggttatttttggtattgtgattagagttatttaatatttaaggtggtgattaatgtttggtaataaagtttttattgggtgttatgtgttttgggattttgagcgtgggtattttaggagtattttagtattgcgtgttagtattatggtcgagagaatagttgagaaagtggttaagaggtggatttatgtgaacgttattgggaaatgagagatttcgtttttaattacggttagtgtaattcgaaagtttaaaattagtttaaaataaaggtatttatttttattttatgtttatattttaggtttttaataatacgtattttttatatgtttatagaaagtagttaattgagttatttatggaaaggtttgtgggtttggttaacgaagtggaggagtattatattttagttggaaatatatttttagaatgttaaaatatttattttaaagtttggttttttggtgtaatcggaggtatggtaatgtttttgtttagagattgggggttagggttagtaaggtatttgatttatatgtattttagaaggtttttattgttaaattatattttttcggaaaaattatttatgttttattttgtaaatttgatatttatatatttttgattggtattttattttagtcgtaagattatgatttatagtaagtttgtttttttttttgtttggggtggtagtagaaagtatagggtattttttagtttttaagggtaggggtaaaggggttggggttttttttttttagtatagttttttttggttgtgttatattgttttttgtgagtagatagtaagtttttttttattttttattgttatttatttagcgttgtgtagtagtttagttgcgtgtttgtcgggaggggttgttaagtgttttgtttattggttgtttttcgaatttttgttattttacgtataaatatatttatatattttttttgtttagtttatatattgagttattcgtatatgcgagtatatttttttttttttttttattttttcggtttttgatttttataagtttatggaatatttttggaaagacgtttttgatttagtagggtaggtttgttttgatttttttttttgtagttttagtattttgagaaagtaatttatttttttggttagtgtttgtattttagtagggagatgaggattgttgttttttatgggggtatgtgtgtgtttttttttttttttaggatttgtaggattttttgtgttatttgtatataatttggtaggtttatattttttaagagttttatgaagtgttttttgtatgtgttttaaaaaggtatttgaaaattgaaagtgtgatttatggaaattaaattatttgtaaaaaattgttttggaaagtaatgattgttggttataaagggaaatatttgcgatgtatttaatgtgtttttaattttttatttgttgataatttatagttattaatgttaaattcgattttggttttagttatatttgtatattgtttaataatggtttatttttgtaagaattagataaaatgtatatttgatataaaatagttaaaaatgtaatttttagtaatagtaagtttggtatttagatagattatgaatatttcgttagatattttgttgggtgtttgggatagtaattaaaataaagtattgatagttgtattagagtttattaggttgtagtaaaggaagtttatttaaaagtataaattatttaagattatagacgtatgatatattttatttattttttgtttttttaatatgtatatatatatatatatatatatatatatatatatatgtgtgtgtgtatgtgcgtgtgtatgtttaatttttaatttagttaaaaatttttttttatttgttttttatttggatatttgattttgtatattttagtttaagtgaatcgagaagatcgagttgtaggattaaaggatagatatgtagaaatgtattttaaaaatttgttagttggattagatcgataatgtaatataattgttaaagttttggttcgtgatttgaggttatgtttggtatgaaaaggttatattttatatttagttttttgaagttttggttgtataattaatttgtggaaggtatgaatatttatgtgcgttttaattaaaggtttttttgaattattttttatatgagaatttttaatgggattaagtatagtattgtggtttaatataaatatataagttaggttgagagaattttagaaggttgtggaagggtttatttattttgggagtattttgtagaggaagaaattgaggttttggtaggttgtatttttttgatggtaaaatgtagttttttttatatgtatattttgaattttcgtttttttttttttagatgttttttgttagtttttttagttgttaaatatagttgtttgtggttggttgcgtatgtaatcgtatattttattttatttgttttatttcggttatagtgtagttttttttagggttattttatgtatatattacgtatttttagttaacgaggagggggaattaaatagaaagagagataaatagagatatatcggagtttggtacggggtatataaggtagtatattagagaaagtcggtttttggattcgtttttcgcgtttattttaagtttagttttttttgggttatttttagtagattttcgtgcgttttcgttttttggtcgtgaaatttagtttttatttagtagcgacgataagtaaagtaaagtttagggaagttgttttttgggatcgttttaaatcgagttgtgtttggagtgatgtttaagttaatgttagggtaaggtaatagtttttggtcgttttttagtatttttgtaatgtatatgagttcgggagattagtatttaaagttggaggttcgggagtttaggagttggcggagggcgttcgttttgggattgtatttgttttcgtcgggtcgttcggttttatcggattcgtaggttttcggggtagggtcggggttagagttcgcgtgtcggcgggatatgcgttgcgtcgtttttaatttcgggttgtgttttttttttaggtggttcgtcggtttttgagttttttgttttgcggggatacggtttgtattttgttcgcggttacggattatgattatgattttttatattaaagtatttgggatggttttattgtattagatttaagggaacgagttggagtttttgaatcgttcgtagtttaagatttttttggagcggtttttgggcgaggtgtatttggatagtagtaagttcgtcgtgtataattatttcgagggcgtcgtttacgagtttaacgtcgcggtcgtcgttaacgcgtaggtttacggttagatcggttttttttacggtttcgggtttgaggttgcggcgttcggttttaacggtttggggggtttttttttatttaatagcgtgttttcgagttcgttgatgttattgtattcgtcgtcgtagttgtcgttttttttgtagttttacggttagtaggtgttttattatttggagaacgagtttagcggttatacggtgcgcgaggtcggttcgtcggtattttataggtattcgcgttcgcgtcgttcgtcggggtggtcgtcgcgttcggtaggagggagggagggagggagggagaagggagagtttagggagttgcgggagtcgcgggacgcgcgattcgagggtgcgcgtagggagttcggggcgcgcggtttagttcgggggttttgcgtgtagttcgcgttgcgtttagagttaagttttttcgtcgggtagttgaaaaaaacgtattttttatttatttatcgttcgtgcgagaggtagattcgaaagttcgggttttttaataaaatatacgttggaaaattagataaagtagtagttatttgtgggggaaaatatttttaggtaaataaatacggggcgttttgagttatttgggaaggtttcgtttttggtatttaaagttgggggtgtttggagttagtagagtttagtagagttttatttatttttttaatgtttttgtttaatgtgttttttaaatttttttttatttagattatttgattggaaatatgttagttatgatgatgattttttgggaagcgatttttgttattcgttttttttttttttttattttacgttttggggttttagagagcgattgggagttgaatgggtttgatttcggagttagttggttgagttcgcgttggagcggattgttggtatgtgatttttgatagtcggaaatttgtaggtgtttcgcgagtttaaaataagttatatggaagtataagtgtttaaaaataattttttgttagtttagtgataagtttgttttattcggggagaatgtttcggagtggcgtgcgggttagttagggtttgcgtttcgtagttattgtggaaggagcgcggtcggtttaggatataggagattattttgtgattttaatggcgaaggttgtgtgtttttattttaatttttttttttataagaattgttttttttttttttttttttttttttatttttttttgtttagttttttttttt

SEQ ID NO: 644 - DNA, 6815 bp, Artificial Sequence
  chemically treated genomic DNA (Homo sapiens)
aaaaggagaaattgggtaagagaaaatgggagggagaggagagggagaaagaataatttttgtagggaaaaaaattaaaatgaggatatataattttcgttattgaagttataaagtggttttttgtgttttggatcggtcgcgttttttttatagtggttgcgaggcgtagattttggttgattcgtacgttatttcggggtatttttttcgggtgggataggtttgttattgggttggtaggagattatttttaagtatttgtgtttttatatggtttgttttaaattcgcgggatatttataaattttcggttgttagaagttatatgttagtaattcgttttagcgcggatttagttagttaatttcgaaattagatttatttaatttttaatcgttttttaaagttttaggacgtggggtggggaggaggggaaagcgggtgataggaatcgttttttagaaagttattattatagttgatatatttttaattaaatagtttagatgaaaggaaatttggggagtatattaaataaaaatattaaaaggataaataaaattttgttgagttttgttaattttaaatatttttaattttaaatgttaagagcgagatttttttaagtgatttaaagcgtttcgtgtttatttgtttggaggtgtttttttttataaataattgttgttttgtttggttttttaacgtgtgttttgttaggaagttcgggttttcgggtttgtttttcgtacggacggtaagtgggtggagagtacgttttttttagttgttcggcgagagaatttgattttgaacgtagcgcgggttgtacgtagaattttcgggttgggtcgcgcgtttcgggttttttgcgcgtattttcgggtcgcgcgtttcgcggttttcgtagttttttaggttttttttttttttttttttttttttttttttttgtcgggcgcggcggttatttcgacgggcggcgcgggcgcgggtatttgtagaatgtcggcgggtcggtttcgcgtatcgtgtagtcgttgggttcgttttttaggtagtagggtatttgttggtcgtggggttgtaggaaaggcgatagttgcggcggcgggtgtagtagtattagcgggttcggagatacgttgttgagtggggggaaattttttaggtcgttggagtcgaacgtcgtagttttagattcggggtcgtaggggaggtcggtttgatcgtagatttgcgcgttggcggcggtcgcggcgttgaattcgtaggcggcgttttcggggtagttgtatacggcgggtttgttgttgtttaggtatatttcgtttaggggtcgttttagggggattttgagttgcggacggtttaggggttttagttcgtttttttggatttgatgtagtagggttattttagatgttttggtgtggagggttatggttatggttcgtggtcgcgggtagggtgtagatcgtgttttcgtagggtagaaggtttagaaatcggcgggttatttggaaaaagagtatagttcgaggttagaggcgacgtagcgtatgtttcgtcgatacgcgagttttggtttcggttttgtttcgggagtttgcgggttcggtgaagtcgggcgattcgacgggagtaagtgtagttttaggacgaacgtttttcgttagtttttgggttttcgggtttttaattttaagtattggtttttcgagtttatatgtattataaaggtgttggaggacggttagggattgttgttttgttttgatattggtttaaatattattttaggtataattcgatttggagcgattttaaagagtagtttttttgaattttattttatttgtcgtcgttgttggatagaggttgagttttacggttagggggcgggggcgtacgaggatttgttaaaggtggtttagggaagattgggtttaaaataaacgcgaaagacggatttaggggtcggttttttttaatgtgttgttttatgtgtttcgtgttagatttcgatatatttttgtttgtttttttttttgtttgatttttttttttcgttggttagaaatacgtagtgtgtatataggatgattttggggaggattatattgtaatcgagatagggtagatagaatggggtgtgcggttgtatacgtagttagttatagatagttatatttagtagttgggggaattgatagggggtatttgaggggaagggggcggagatttagggtatatatataggaagagttgtattttgttattaggagaatgtaatttgttaggattttagtttttttttttgtaaaatgtttttaaagtagatagatttttttataattttttgagatttttttagtttgatttgtgtgtttatgttggattatagtattgtatttggttttattaggaatttttatgtgaaggatgatttagaaaaatttttggttagggcgtatatgggtgtttatgttttttataggttggttatgtaattaaaattttagaaaattgaatataaaatgtgatttttttatattaaatataattttaggttacgaattaaagttttggtaattatgttatattgtcggtttggtttagttaatagatttttaaaatgtatttttgtatgtttattttttagttttataattcgattttttcggtttatttgggttaggatatgtagaattaaatatttagatgaaaaataaatagaaaaaagtttttaattgaattaaaagttaaatatgtatacgtatatatatatatatatatatgtgtatatatatatatatatatatatatatatatattaaggagataaaaaataggtgaagtatattatgcgtttataattttggatagtttatatttttgaataaattttttttgttgtagtttaatagattttgatataattattaatattttgttttaattgttattttaaatatttaatagagtatttgacgaagtgtttatggtttatttaaatgttaagtttattgttattaagagttatatttttgattattttatattaagtatatattttatttaatttttataaaaatagattattgttggataatatgtaaatgtagttgaagttaaaatcgagtttagtattaatgattatagattgttagtaaataaagggttaaaaatatattaggtgtatcgtagatatttttttttatggttagtaattattattttttaaagtaattttttatagatgatttaatttttataaattatatttttaatttttaaatgtttttttaaaatatatgtaaaaagtattttatagggtttttaaaaaatgtgaatttgttaaattatatgtaaatggtataaagaattttataagttttgaaagaaaaaggagatatatatatatttttatggagaatagtaatttttatttttttgttaggatatagatattagttagaaaggtaagttgtttttttaaaatgttaaagttatagagagagaaattaaaataagtttattttgttggattaagaacgtttttttagaaatgttttatgggtttgtagaagttaagggtcgagagagtgagaaggaaggaaggaatgtgttcgtatgtgcgagtggtttagtgtgtgaattaggtagagagagtgtgtggatgtgtttgtgcgtggaatggtagggattcgggaagtagttagtaggtagggtatttggtagtttttttcggtagatacgtagttgggttattgtatagcgttggatgaatggtagtggggagtgaggggagatttgttgtttgtttatagggagtagtgtggtatagttagagaaagttgtattggggaggagaaattttagtttttttgtttttatttttggaggttggaaagtattttatgttttttgttgttattttaagtaagaggaaaaataggtttgttgtgaattatagttttacggttaaaatagaatgttagttaaaagtgtatggatattaagtttataaaataggatatgggtggttttttcgaaagaatataatttaataataaaagttttttgggatatatgtggattaaatgttttattggttttagtttttagtttttgaatagaggtattgttatgttttcgattgtattaggaaattagattttggaataaatgttttggtattttagggatgtgtttttagttgaaatgtaatatttttttatttcgttaattaaatttataaatttttttatgaatagtttagttgattgttttttgtaaatatgtgaaaaatacgtattattaaaagtttaggatatgaatataagataaaggtagatatttttgttttaaattgattttaggttttcgagttgtattgatcgtgattgggaacgaggttttttattttttagtggcgtttatatggatttattttttgattatttttttaattattttttcggttatagtattaatacgtaatattgaggtgtttttagagtgtttacgtttagggttttaggatatatgatatttaatggaggttttgttgttagatattagttattattttggatattaaatgattttaattataatgttaggagtggtcggtttttggttttgggatattatgtagttattgagagatttatgagtggtttttgagattagtataaaaaagaaatagaaagttataaaaatgttaatgatgttattatgtaaatatatgtttttgtgttttgaaagatttttagtattgtagtgtttgagtataggagagttttttttatagttagtattgaaaataaatattggatataaataaatattgaaaagaaagattgttattttttgttggtgatagtggtgttttttgtaggttaataatggttatttatgttttagattagttttagaaaaaagtaagagtatttagggagggaggagagaggaataggggaaaggagaaggaaaggaaaggggatttgtaattgtttattattgatataggaagaataagaaggttagttgtttttttataggttttgattgtttagagatttataattaaagttagtttaagaagtttagtaaaggtagtttttttaattattttttttttagtatttttttttaaatttattttggtgagttttgtttttgggtttggtgagtatgggtgggaaagtatattgtgttacgtcgattttttttttttgtttttggtaaaaattttattcgggtttttagtttttttggtttttttttttatttttttttgttggatatatacgttttagtcgtgatttattggtttttttaggtgaagaagggtaaagattgatttggttttttcgttgaatgtgtttttagttttatttttttagcggtttgttgggtattgtaggtttgtttaaatatgagttattatttttaaatatggtgttttttttaattttttcgtgtttgtgtttagtattattgtttttttagttatttagattaaaattttattgtttttttcgagggttgatttttttttgttttttatatttaattaagaggtaatttttaagttttttagttttataatttttttttttttattgtatttcggttattttttttgagatttattattttatttgttttaacggttttttaaggattattttgtttttttttttcggattttattttaaattttgtaatttgtttatttttttggatttttttttattgttttaggatttattttgatatgatttagttttgtttttaatttaaattatagttttttttatgagtttagggttttttttttgtttataacgattttttttagtttatttttttcgattgtaatttatgttttagttaagtaaaattttaatattttaagaatttaaggtttttttttttttttattttaaatttttatttttttggtttgttaggggaaagtatgttttttgtaataggtttagtttaaatgttattatatttattatttttttttttagtttttatttaaagaaaatttttttttttttgaattttagtagtagttattatgtatttattaaattttttttgaattagagttatttatttgttttttatttttttatgttgtttataagttttttgaggataaggtttggttagaattatttgggaattatgagaatttagtattgtttttggttatgttaagttaataaatgttggttaatttattgatatagatatttaaaaggataatgtaatattataggtgtttggattattatttttaaaagttaattttttatgtgatattttattatttttttttttttttgagatagagttttatttttgttatttaggttggagtatattggtgtgatttcggtttattgtaatttttgttttttgggtttaagcgatttttttgttttagtttttttaagtagttgggattataggtgttcgttattatatttagttaatttttttgtatgtttagttgagataggattttattatgttggttaggttggttttgaatttttgattataggtgatttattcgttttaattttttaaagtgttgggattataggtatgagttattacgttcggttttttaaaattgtttttgttagaagattatttttgtatttttatgttaattgaggttataaagttaaaatttaaattcgtataattttgaggtttaagtttgtaatttttggtagtatgatttataagagagttttgaatttttagttcgtaagtag

SEQ ID NO: 645 - DNA, 16287 bp, Artificial Sequence
  chemically treated genomic DNA (Homo sapiens)
atgggtttaaaggataatatgaggtagttatagtaattttttatgatatgaataaagaaattgaaaatgttagatatatttataagaagatgtagaaaaaattttagttaaaatttttgaaatattttttgaaatattaaattatgaaattagatagttttatttatggttttaagttatgtttgtttgtattttttttttttttattttattttagggaatattatattggttgatttattaatattttttgagttagaaaatgtaaggaagttgtatttttagaattgtatttgagttatttgtgaaattgtatattataatttgtcgttatttttaatagttttataattttttttttttttttttttaattgggtgtttatatttatgttaatgatttttaggggttagttttttttttagtttaagagaattgttgtagagttggaagtaaggataaaaatgtgtatgttttatgtttgattttaaatgtatagaaaattagaaatttaaggtatgtaagggatttgtgtggaatttaagtatttttgaggggtagtggataggataaaaagttattttttatttgtttgtttataaatagtaaagattaagattgaaatatatgagtgtgatttagaaagagttggttgtaggtgttgtttgtttaggtggtttatttaaattgtaggttagagtaattttgttttatggttttggtgtttaggtattaggttgggtttgttttgttgtttatgtttttgttattttttgagggttttagtttaacgtagattaataaagaataagttatataaatatgtttataggtggttatttttagataagaaattgataatattttatttaatagtatttgggttttataggatagatatgtttttatttatgtaataaataagaatagtattttatgatagtggagaaaatatgggatgtgtaggtaggtaggtaaagttgggtggaaatttttattttattaaatgtatatgggtgattttataaaataaatgttagttttttgagttttagtttttttatttgtaaaatagatagttttagggaatttttaaggattaaatgaaataaaagtgaattaatttatgtaagtttgtttattgtggtgtttaggttagaaaaatgtttaataaatattaggtttgtttttatttttataaaagatgtgattttaaagagttttatttaaatttaagttttaaatgttaaattatattttgtgaattttatgtttagttgagatgatttttgatatattaattagtaattttattttttttatttattattattaaaaaaaggtgttattgtacgtttaattaattttttttttttattaattttataagtgtagggttttattttttagatttttttaaaatagattaatttatatttatataatataaataagtttgtttttataatattttggagtagataattattttagaatttaaatttttttatttggttttaagtttagagaataaagtaataatttaaaggtattttttggtatgatatttttttagatatttgtagtattttttttttttttttattttttttattagtttttgtttttttgttttttatagggttttgttttgttttttggtagttttttttttacggaaaattttttttttgatttttttaagttaaaggttttagtaaatatttgttgaacgcgtggattgtgttaggtgggtgttatggattatggagaatgttagagatgtaagatatgcgttgtttaatcgtagcgtaggttgtgttgataggtaagatgagggttgtgggggagttaatgtgtacgttttattgggttaatgtgttttttattttatttaggtttttggttttgggatgtgtaagattttgttagatagagaaggggtggggtgagaagatgaggaaggtgtattttttatggagaggtttttttttttttttatagtaaattatatttgtattatattgattttttttgtttttttaggtgatatttagtttatgttgtaagtttattttgttaattataaatgttagtaagttaatattatttattatatataatatgatttaattttaataatttaatgttttatttttaaaagatgatttaatggtgataattttaatttttattgtaggatattttggagataggtagtttttttaatgttatatgtgggtgtttttttaggtaggttaggggtgaggtggaaatgaggttgggattttgtttatttatatagtaggtatcgtttttaatattaggttttagggggttttttggtttagttattggtatgaattgttttaagaataatttttttattattgtggttataatttaggtagaattggaataattattttttttattttgtattaaattaggtaaagtttttatttttgggtattattgttttttttgatggatagggtgagttagaaggaaatttatttatttttatttattttttgtttattattttttgtagtgaggtttttttgtataataaatagtttttgtgggtgtttgagttgttttgaaaagagaatatgttgtttttgtgtgtagaatgttttttgaaggaagtattatagtgaatatagagtagaagtttggtatataggtggtagaagtttgtttgtagtgttttgtatagagtagagagttaagttatttttattttgattgattggaggtatggtatggaggtaaatgggtttttggttttttttttggatttaagttttttttagttattgataggttatgtgattatagggaggttgtttaatttttttgaatatttatttttttaagtataaaatgggggtaatagaatttgttttataggtttgcgtataaaataagaattattgagagaaagcggggtataaatgtttaataagcggtagttgtttatgaagttattgttgttattgggttttttttttattaggtggttttaggtagttgatagaagttttgtgagttttaatttttttattggaaaagtggagttaatattttattgagttggtgtgaggattaaatgagatgttgtgtaggtgtttagtatagcgttaggtatgatgttaatattgatagatgtattttttttatttttatttatttttttttgtttgttggtttatggttgaaatttttttatgacggtttttatttttagagatattttgttaataagtatatattattaaatgaagttgatttttttttttttttttttttttgagatagagtttcgttttgtcgtttaggttggaatgtagtggcgcgattttggtttattgtaattttcgttttttatgtttaagcgatttttttgttttagttttttgagtagttgggattattggtatgtgttattacgtttagttaatttttgtatttttagtagagacgaggttttattatgttggttaggttggttttaaatttttgatttcgtgatttatttgtttcggttttttaaagtgttgagattataggtgtgagttattatgtttggttatgaagttgatttttttaaattattatttaatattttttttataaggtggtaaggaggaagagtatatggggattgggtattttgagagattttaggataggagatagggaggttgagattggtatgttgtttgttgtagttatttgttagcgatatatttttttcgtttaaattaatttttttgttttaaggatagggagattttgttttttaatttgagagaaattaggatttttagttttaatgaaaattggatttagggtggggtagtggagattttttatagttattgtttagttgatgaagtagatgtttttttatttttggagtttgtttttattatttgtggattttatttttattaatttagagtatatttgcgtttttttattttggttaaatattaaatagttgaggttggtattgtaaaattttttttttaaatgttttttttcgtttttttttattagagatttggattataatttttaaaaattatgttttttatgttatttgagtagatggtttgatgattaattaggtatagatgtgatattggggggtttttataatggtttgtgggttatatgttatttttttttttatttttattagtaatagttgttttaaagttagttaagattgtggttttagtttcgtattttggggtttttgttggggtgggtgaggggaatattttattaagttgggggaattggggttgttattagggggcgcgaggggttttcgttcgagaagaggggtgggtaggtgtttttagcggagaagggcgtcgtggtcggaggtataggttttttcggtgttattttaagtgagttcgaggaagtatttgggatttttgatttaacgcgaaaggtttttttagtgattttttgagagttgagaatttattttttttatttttagtttacggttttgttattttagggttcgaggttacgtttgttgttggggatttgataaatttaaagtttttttggttttattattggttttttagaattagatatttgttttgaatgatatttatgtgagttaggggttgaggacgtgattttcgaagtgtggtttttagattggttgtattagtgtcggtattttttaggatttggttggaaatgtatatttttaggttttattttagattttttaaatttgagattggggttgcggggagcgttatttgtgcgttattatttttgtgggtggattaggagtcggttcgagggtgtttttatttagaggttacgcgcggcgtcgggcgtttttgagatcgtcgggttttttggttcggttacgtgggtttaggtattatttttttttatttttttttcggtttttaaaaggaagaaggggtttatcgttaagtcgtttgtgatttttttagtttttttagttgttggttttttggatatttattttttcgttaggaggtagttgtaagcgcggaggttgcgagaaataattgttttttgaaatttgtagggcgaagagtaggcggcgagcgttgggtcggggagggattattcgagttgcgacgggttttggggttgcggggtagggttggcgttcggagtttgagttgtaggaggtgcgttcgttttttttaataggtggcggcggggcgcgcgtcgggagattttttttaatgcgggaaaagtacgtgttcgtattttagagaaggtaaggtcggtgtgtttatttgtaaggtaagcgttttttcgttcgaggtgtggtttaattgttttattttgtttgaaattttgcggtgagaaattagtcgtgttgagaataataaaagattaaaaaacgattattaaaattaattgttttgaaagttattggaaagttggaaaatgtatgttttgattaaatgtttttatttaagatattggtaagttaatttatttagtttgtgtcgtgagttttgggttgattgtgttaatatgaataattgaaaaatattttatttttttatggtttttttcgatggatttttttattatgggtgaaatgataatggagttgaatatattttttgattgaattttgagggtttgggaagatgtatacgttttaggtaagatgataggggttttaaaatgtattaattggtattttttagttatgttagtaagttgcgtttttttttttttgggtagattaagttaagttttaattggttttttttatttgttgaagaggagtttaataattgttttttaatattttgcgtgttatttttattggaaggataatattaagttaagtgaatgttatttttgtgaaaaaattttgagtggatttttatttaggaagataaggttgatttaattttattcgttgtttaaaaagtaggattgtgttttggtgtggtaggtaatattttggaggatagattttgttttattttgttatatttttagtatttatatgggtattttattagaaagttttatttttgttttaagtttcgtaattcggtgtttagtgaggggaaatatgtttgtaatttaaaaagtgaatatgtgaaaggaaaggtttttttgagagtgttgtaaaataaatgtaacgtgattatgaaaagaatatgattaatatttttgatttttattttttttgaagaaaatgtattttgatatgagttttagaagaaggaaattataaggatttgtttattaataggtattagagtatatatcgtaggattgtattttacgtttaagtatttttttagatgaatttttgaaatatttttattttaaaagttattagatgtttgttaatatttaagttttgtttaagatatagaagtttttgaaattaattaatatgtttaggatatatttcgtagtgttttgagggatgtgaataaatttaattatagtttatattttttaatgtatttataatttagaaaaggtagaatttagtagtaaatttaatttataattatataattaatatttaatagatattgatatgtttatttttaagaataagaaggaaattttttataagtgtatgttgaatatataataatttaaaatttatgtgataattttaggtgatgttttgagtcgttttatagaatataaatatggataaaatataaaatattgaaggttgaatttaaagtgtttaatgataagtttttgataatatatttagaaattttgagaattgtatgtttgaacgttagattttataatttagtgtttagtatattgttttatatgtaatagtattttaaaaaaattaggttatagtagtataatttatatatagtaaaatttagtttttgtaaatgtatttttatgaattttgatagatgtatagttatgtaattagtatcgtatatatgatatagaatagttttattattttaaaagttttttttgtatttttatttattttattgtttttgaaaattattgattaaaattatataatgattatgtggttttgttttttagtacgtttttatttagatatatttttttttattttttttgaaagaaaaatttgtttttttttttttataggatgagttagtttgtgttatttttaattttagtattttgggataaattaaggtaaagataatgttatttgtaaatgggaaatttgagatttggattaagtgttaaatttatatagggttaatagatttagtttttagtagatttagattttattgtggtttaagtttttggttatggtatatattattagttattttgaattgaaatataaggttattaaaagttatttatattatattaatagaatgtattatttttttataatttttgaattttaaaatttttttattaaaaaaaaaattattttttattatatttgagattaagaaagttatttgaaattgtatattattaaatagtgagaagtaaaatagggattgaaaatgataaattgaagatatttaaaatgtagagtgattataattgttgaaggtaaaatatttatttttataggggtttaggtttgtgtttaatttatttgtagatgttaggatttttaaatttttgtgtttatgttttgaagtttagatttttttgtagggtggagatgtataattttttgtaaattaatattttttattgtttaatatagtatttaatttagtatatagttaggagtttgttattggtaggtattgttaatatatatatatataaaattgatgtttttttttttttttttttgttttatgaaaaatagtttgtattttaaatatgtaatttattttgtatatttagttatagtggtagtaattaggatatgtagagtggtaagtttatgaggagttagtaaattggatagttggtttttttagttggaattatgataggttttgaaaatgaagggtttttagtggagaatttttgtgtgggtgtatttgagagagggtaggagagttagggtgatttagaaagatagattgttggatttgtatatgtttttttaaagttagattgtagtattttgttagtaaattgttgtgtgttttattgttaaatttaggtttggaaggggagttgagtgtatttagtttaatttttggattggttgtgttattttgaatttttttattcggaattttttttgattttgttttaaatgaatatttgaatttggtttagtttttatagagtatggtttgtggttgttgttggtgttagggaagagtagaaatttgttgttgagagagaagatatttgagaagattgatgaatttttttttatttttgttttcgaggtttggtttttttattttatttaaatttttgaaatttttttttatttaattaaataagcgttaattggttattaggagaattagtttttttttattttagaaggaaatagggtttttttatgtatatgtttttaagaattatatgtaaattagttattaatgatgagttttttggtgattttggagtgttttatttttttaatattaaattaattgagggttttaatattttgttttgaaagaatatatttaaaaaggttgggtgtggtggtttacgtttgtaattttagtattttgggaggtttaggtggttggattatttgagggtaggagtttaagattagtttggttaaataatgaaattttgtttttgttaagaatataaaaaattagttggttatggtggtttaagtttgtagttttagttatttaggaggttgaggtatgagaattgtttgaatttgggaggtcgagtttatagtgagtcgcgattatgttattgtattttagtttgggtaataaagtaaaattttatttttaaataaataaataaataaataaataagaatatatttaaagataataattggttaggtgtggtggtttatgtttgtgattatagtattttgggaggtcgaggtgggaggattgtttgaggtaaggagtttaagattaatttgggtaatatagtgagattttatttttataaaaatttaaaaattagttgggtatgatggtgtatgtttttagttttagttatttggggggttgagtttggaggattttttgagtttaggagattaaggttgtagtaggttatgattttgttattatattttagtttgagttatagagttagagtataatttttattttttaaaaaagttaataattgttaaatagttatttatgtatattaaggatgtttgttgtttaagaaatttttttaaattttttttatgaaattttttttagttgttgttttgtgagcgtgaattttttatttttgtaggatatataaatgtggagtatttgaattgaatgtttgggaaagtgtgatgggtaggtggaagaagaatagggatgaggatttattttttatttttatttttttagatttatttttttagtttgtaagtttgagaatatggtattaggaatatgtggtattttgtttatatatatagtgttggtaggttattagtagtttagttatttggattaggggtgatggatttttgtggatagaagttaaaaagtaaaattaggaggtaaaaatttttagggtggttataaagatattgtaatttgtttggaaattttaattaatattaaatgtgtatttagtgatatattaatagattggttttatttttttggatgtgtaataatattttatagaatgttttttttttttttttttttttttttttttttattttttttgaaatgaagttttgtttttgttgtttaggttggagtgtaatggtataattttagtttattgtaatttttattttttaggtttaagcgattgttttgttttattttttcgagtagttgggattataggtatgtgttattatgttcggttaattttgtatttttagtagagacggggtttttttatgttggttaggttggttttaaattttcgattttaggtgatttgtttattttggttttttaaagtgttggggttataggcgtgagttattgcgttcggttttagaatttttttatagatattattttattttatttttagagtatcgtgaaaaggtatagtattaaataggtatttgattttattgaagaagatgtggtagtttagggagtttgtggatttgtttaagattgtttggtttttaggtagagttggggttagaatgaatgttttgttttatttattgatagaatatatataagaataggtttgatggtggttgattttttttttttttttttttttgagatagagttttgtttttgttatttaggttggagtgtagtggcgtgatttcggtttatcgtaatttttattttttgggtttaagcgatttttttgttttagttttttgagtagttgggtttataggtaagcgttgttatattcggttaattttgtatttttagtagagattgggtttttttatgttggttaggttggtttcgaatttttgattttaggtgatttgtttattttggttttttaaagtgttgggattataggtatgagttattcgcgttcgggtgattgattttttattaattagatttataggtgttttgataaaaattagtttagttttggttggtacggtggtttatgtttgtaattttagtattttgggagtttaaggcgggcgggttacgaggttaagagattaagattattttggttaatatggtgaaatttcgtttttattaaaaaatagaaaaaattagttgggtatggtggcgggtatttgtagttttagttatttgagaggttgaggtaggagaatggttgaattcgggaggtggagtttgtagtgagttaagattgtattattgtattttagtttgggtaatagagtaagattttattttaaaaaaaaaaaaaaaaaagtgtagtttttttggagtgtttttttgttatttttagggttaaatttttttttgtttatgaattattgttaaaattgggaattttaaatattattttttttttttaatttaaaagttatagtatgttttttagttagtatattagaatattatgtacgattttatgtgtataaaaagttttttggttgaatttagatgtgatttgagagggttaaatataggggtgtgtgttgggagagagagagaggtttttggatagaaaataaagtttgtttattatttaggatatggattaattattttaggttatggtgattaaagaaaattgatatgtaaataaatgaataatttttagaattaggatgtttgggtattggttttttggttggttaggtgaaattttatgttaggtttaataattaaattttttagagataatttttttttgttgtattagaatattgtattgaggttatgtttgaatatttaatcgatgtgttgggaaaattttgttttataatgttaaagaaattaaattttttggggagttttttttttgattagtttatatttttgttttagaggagggttttttaattagaatgggtttgttgatttatttttatagatttttggtagaaaggaggtttttttttgttatttgtttttttgttttagagaattattataatggtgtaagtttattattttttttttttattatggttttgtttaggaagaaaaattttttgtattggttattaagtatttaattatttaagatgttattgataaagagttaatttgtgaattatgtgaatttgatatatttgaaatatatttaaataaaaagtatttagttttttaatgattttttagaagttagttttttaattttaattattatttttttggggatatgtggaaattttatagaagttgattggtgatatgttgagatgtgagatttgtattttttaagtaaagttgttatgtatttgattgattggttaggtgtattttggtatttgttatttgttggtggggtttgatagttggttttattattgttgggtatttagagttattatatttatagagatagaatgtaggttggtggttgttaggggttgggggaagggaggagtggggaatttgtttaatagagagttttagttttgtaagatgaaatgagttttagagattggttgtataataatgtgaatatttttaatattattgaattttatatttagaaatggttaagatggtaagttttatgttatatgtattttaatataattaaaaaagaaaaaaaaaaaaataattttaggttaggtacggtgatttatatttgtaattttagtattttgggaggttaaggcgggtagattatttgaggttaggagtttaagattagtttggttaatatggtgaaattttatttttattaaaaatataaaaattagtttggtttaattgtgtatgtttataattttagttaattgtgaggttgaggtaggggaatcgttttaaattttggaggtggaggttgtaatgagtcgagattatattattgtattttttagtttgggtgatagagtgagattttattttaaaataaaaaattattttagaaattgttagttttggtaatagttattattatatgttttattttgtatattttttgttaagaataaggaattgtttatgttgattaggaatttaagtaattaaaatataaaattttggttggtggttttcgtttgtaattttagtattttgggaggttaaggcgggtggattatttgaggtcggaagtttaagattaggttggttaatatggtgaaattttatttttattaaaagtataaaaaattagttgggtatggtggtaggtatttgtaattttagttattagggaggttgaggtaggagaagtatttgaagttaagaggcggaggttgtagtgagttaagattgtattattgtattttagtttgggtgatatagcgaaattttatgtaaaaaaaaaatgaaatataaaattttatatttattattaattatatatagtattaaaataaaatttaaatattaaattttttttgattttatatttttttttagttattatttttttttttttttttggtttaaatttttgatttataatgttggttggaagtggtattattttggtgttagttttttattattttatttggtttgttttgtttttttttggtatattagttttttgaaggtagggtgtatgttttagaattttttgaagtttttttttttagtatattattatgtttattgtagtattttttatttttaatgtttttgatttggtgaaatattatattttgaatatatttttttatttttttatgataaatattgattgagttttagtgtaaggtgagtaagaaatggtatttgtttttaaggagttaaaaatttgaattttttttttttttttttttttttttttttttttttttttttttgagatagagttttattttgttatttgggttggagtgtagtggtacgattttagtttaatgtagttttcgttttttagatttagtgatttttatgttttagtttttcgagtagttgggattataggtatgtattattacgtttggttaatttttgtatttttagtgaagatggtgttttattattttggttaggttggttttaaatttttgattttatgtgatttatttatttcggttttttaaagtgttgagattataggtattgattttattttttatttttttatgtatttttattattttgaagaagggtttaaggtagttttgataagtaggattaggtttgtatgtaagtgattaaaggggtgttatgagtaaaaaaagtgtgaaggtataataagttaattattttataatgtagtttgtatgttttttaatggatatagtaggttttttgtaagaaaatagtaggagattcgtgtggaatgatgggttgaggtaatatagtggtattttttgaatgttcgaagaatgtgatttagagtttggtgggaagtagagagttgggttttaagaatatgaatttgataattttatggatttggaggagaagttaattggggacgaggagtagtaagaagtttgttatagatgtattgataagaagtaatgagagttggtcgggtatagtggtttacgttttgtaattttagtattttgggaggtcgaggcgggtaaattataaggttaggattttaagacgagtttggttaatatggtgaaacgtcgtttttattaaaaatataaaaagttagttgggcgtggtggcgggcgtttataattttagttattcgggatgttgaggtagaagaatcgtttgaatttggaaggtggaggttgtagtgagtcgagattgcgttattgtattttagtttgggtgatagtgcgagatttcgttttaaaaaaaaaaaaaaaaagtaatgcgataatgagagtttattttaagatggtagtaaaagatagtggaaaaaaggtattgggaaaaaaagttaatgtgttttgatgagtaaagttaattgagttaaggggagaagttaaaggtaattatgatgggttttttttattaatataaataggaaatgagtggttttgggaaagaaagtgatgaattattttttagatattgtattaattgtttattattgtggtcgggtatggtagtttatgtttgtaattttagtattttgggaggtcgaaataggtagattatttgaggttaggagttcgagattagtttggttaatacggtgaaattttgtttttattaaaaatataaaaattagtgtggtggtgtatgtttgtaattttagttatttaggaggttgagatatgataattgtttgaatttgggaggtagagattgtagtgagttgatatggcgttattgtattttagtttaggtaataagagtgaaattttattttaaaaaaaaagatttgtttgtaattagttagtatttttagttttgtgtttattttatatataaaaattttgttttttagagtataaattgaagggtatatttaaaattgatacgtaggttaggtatggtgatttatgtttgtaattttagtattttgggagatcgaggtaggtggattattcgagattaggagtttgagattagtttggttaacgtggtgaaattttatttttattaaaaaatataataaattagttagttatagtggtgcgtatttatagttttagttattcgtgaggttgaggtaggagaattattagaatttgggaggtaggaggttgtagtgagtcgagattatgttattgtattttagtttgggtgatagagtgagattttgttttaaaaataaagataaaattaaaataaaataaaattgagaagtaatagattgataagtgatatagttatattggttagtttttttagttaatatttattgttttttattattggagatttataatgtgtttttttttttttaaaaatttttttcggaaatggtaatttttttttttttttttttttttttttttttttgagatagggttttattttattatttaggttggagcgcggtggtataatttttgtttattataatttttgttttttgggtttgagtaattatattttagttttttgagtagttgggataataggtatatgttattatttttggttaatttttagtagagacggggttttattatgttgtttaggttggtttcgaatttttgattttaagtaatttgtttattttagttttttaaagtattgggattataggcgtgagttattacgtttggttttatagcgtattttaatattggttgagattagttttgtttattgatttttttttagcgtttatttggttatttttgtttatttttttataagaatttttatttttatttaattttgtgttttttggttttaaagattattttataataaattttcgtgattaaatttttgtgtttaaatttttgattaaataaataagtaatgaagagatgaatgaagtagaaaatgtgagttttatgttttatatttttatttttttgaggttaatatttttatgtatattttttaggatgtatttgtaattttatataaacgtatgtatttttttaatgaaaatatttaaatttttatagttaatagttgtagttttaatttggtaatattttttgtgtttttttatagt

SEQ ID NO: 646 - DNA, 16287 bp, Artificial Sequence
  chemically treated genomic DNA (Homo sapiens)
gttgtaaagaaatatagaagatattgttaagttagagttatagttgttaattatgaaaatttaaatatttttattaaaaaaatatatacgtttgtatgagattataaatatattttgaaaaatatatatgaaaatattaattttagaggagtgggaatgtgaggtatgaaatttatattttttgttttatttatttttttattgtttgtttgtttaattaagagtttaagtataagagtttaattacgaaaatttattataaaatagtttttaaaattaaaaaatataggattaaataaaaatgaaagtttttatggaaaaataagtaagaataattaagtaaacgttaagagaagattaatgagtaaggttagttttaattaatattaaaatacgttatgaggttaagcgtagtggtttacgtttgtaattttaatattttgggaggttgaggtgggtagattatttgaggttaggagttcgagattagtttgggtaatatggtgaaatttcgtttttattaaaaattagttaggaatggtggtatgtgtttgttgttttagttatttaagaggttgaggtgtgattgtttaagtttaggaggtagaggttgtagtgagtagagattgtgttatcgcgttttagtttgggtgatagagtgagattttgttttaaaaaaaaaaaaaaaaaaaaaaaaagagagaaattattattttcgaaaaaagtttttaaaagaaagaaaatatattatgaatttttaataataaaaaataatgggtattagttgaagagattgattagtgtaattgtgttatttattaatttgttgttttttagttttgttttgttttggttttgtttttgtttttgagataaggttttattttgttatttaggttggagtgtagtggtatgatttcggtttattgtaattttttgttttttaggttttagtgatttttttgttttagttttacgagtagttgagattatgggtgcgtattattgtgattggttaatttgttgtattttttagtagggatggggttttattacgttggttaggttggttttaaatttttgatttcgagtgatttatttgtttcggttttttaaagtgttgggattataggtataagttattatgtttggtttacgtattagttttgaatgtgttttttaatttatgttttaaaaaatagaatttttgtatgtaaagtgagtataaggttgggggtgttggttgattataggtaaatttttttttttgagatggagttttatttttgttgtttaggttggagtgtaatggcgttatattagtttattgtaatttttgttttttaggtttaagtaattattatgttttagttttttgagtagttgggattataggtatatattattatattaatttttgtatttttagtagagatagggttttatcgtgttggttaggttggtttcgaatttttgattttaagtgatttgtttgtttcggttttttaaagtgttgggattataggtatgagttattatgttcggttatagtaatagataattaatataatatttgaggggtaatttattatttttttttttaaaattatttattttttatttgtgttaatagaaaaagtttattatagttatttttgatttttttttttgatttagttaattttatttattaaggtatattggtttttttttttaatgttttttttttattgttttttgttgttattttgaagtaagtttttattatcgtattattttttttttttttttttgagacggagtttcgtattgttatttaggttggagtgtagtggcgtaatttcggtttattgtaatttttattttttaggtttaagcgatttttttgttttagtatttcgagtagttgggattataggcgttcgttattacgtttagttaattttttgtatttttagtagagacggcgttttattatgttggttaggttcgttttgaaattttgattttgtgatttgttcgtttcggttttttaaagtgttgggattataaggcgtgagttattgtgttcggttagtttttattattttttattagtgtatttgtaataggttttttattgtttttcgtttttagttagttttttttttagatttatagagttgttagatttatgtttttaaaatttagttttttgttttttattaaattttaagttatatttttcgagtatttaagggatgttattatgttgttttaatttattattttatacgaattttttgttgtttttttatagaaaatttgttatgtttattaagaaatatgtaaattgtattgtgaggtggttggtttgttatatttttatattttttttgtttatagtatttttttaattatttatatataaatttaattttgtttattagaattattttgaatttttttttaaaatgatagaggtgtataggagagtaagaagtaaagttaatgtttgtaattttagtattttgggaggtcgaggtgggtggattatatgaggttaagagtttgaggttagtttggttaagatggtgaaatattatttttattaaaaatataaaagttagttaggcgtggtggtgtatgtttgtagttttagttattcgagaggttaagatatgagaattattgaatttgggaggcggaggttgtattaagttgagatcgtgttattgtattttagtttaggtgatagagtgagattttgttttaaaaaaaaaaaaaaaagaaaaagaaaaagaaaaaaaaaaggaaatttagatttttagttttttgaaagtaagtattattttttatttattttgtattgaaatttaattaatatttgttataaggaagtgaggaaatgtgtttaaaatgtaatattttattaagttaaggatattaaagatggggggtgttgtagtaggtatggtagtatgttgagaaaagggattttaaggagttttgggatatatattttgtttttagggagttaatgtattaggaagaggtaggatagattaggtaaaatgataaggaattaatattaaagtggtattatttttaattaatattgtaaattaaaaatttggattaaggagaggagagagaatggtagttggagaaggatataggattaaggaaggtttggtgtttgggttttattttaatattatatgtaattaataatgagtatggaattttatattttattttttttttatatggagtttcgttgtgttatttaggttggagtgtagtggtataattttggtttattgtaattttcgttttttgattttaagtgttttttttgttttagtttttttagtagttgggattataggtgtttattattatgtttagttaattttttgtatttttagtagagatggggttttattatgttgattagtttggttttgaattttcgattttaaatgatttattcgttttggttttttaaagtgttgggattataagcgagagttattagttagaattttgtattttaattatttagatttttgattaatataaataattttttatttttaatagaaaatatgtaggataaaatatatagtgataattattgttaaaattagtagtttttaaagtggttttttgttttgaaatgaaattttattttgttatttaggttggagagtgtagtggtgtgatttcggtttattgtaatttttatttttagggtttgaggcgatttttttgttttagttttataattagttgggattataagtatgtataattaggttaggttaatttttgtatttttagtagagatggggttttattatgttggttaggttggttttgaatttttgattttaagtgatttgttcgttttagttttttaaagtgttgggattataggtgtgagttatcgtgtttggtttgaagttgttttttttttttttttttttaattgtgttaaaatatatgtaatataaaatttattattttagttatttttaagtataaagtttagtagtgttaaggatatttatattattgtgtaattaatttttagaatttattttattttgtaaaattaaaattttttgttaaataaattttttatttttttttttttttagtttttggtaattattagtttatattttgtttttatggatgtgatgattttgggtatttagtagtggtgaaattaattattagattttattaataaatgataaatgttaggatatatttagttaattaattaggtgtatggtaattttgtttagaaaatatagattttatattttaatatattattaattaatttttgtagaatttttatatatttttagaaggatgataattaaagttagagaattgatttttggagagttattaaaaggttaggtgttttttgtttggatatattttagatatattagatttatatgatttatagattaattttttgttagtggtattttgaatagttaggtatttggtagttaatgtaaagagtttttttttttaagtagagttataataaggggaagaaatgatgaatttatattattgtaatagttttttgagataggagaataggtagtaaaaaaagattttttttttattagaggtttgtaaaaataagttaataaatttattttggttgagaagtttttttttaaaatagagatataaattggttaaaggaaagattttttaaaagatttaatttttttaatattgtagggtagagtttttttaatatatcgattgaatgtttaaatatggttttagtataatgttttggtataataggaaaaaattgtttttaaagagtttaattgttgggtttggtatggaattttatttggttaattaaagaattagtatttagatattttgattttaagaattatttatttatttgtatgttaattttttttagttattataatttaaaatagttggtttatattttgggtggtgaataggttttgttttttgtttagagattttttttttttttttagtatatatttttgtatttggtttttttaggttatatttgaatttagttagaaagttttttgtatatatgggatcgtgtatggtgttttaatgtattggttgggaaatatattatggtttttgaattaaaagaaaaaagtagtatttaaaatttttaattttgataatgatttatggataagaaaaagtttggttttagaaatggtagaaaaatattttaaaaagattatatttttttttttttttttttgagatggagttttgttttgttgtttaggttggagtgtagtggtgtaattttggtttattgtaagttttatttttcgggtttagttatttttttgttttagttttttaagtagttgggattataggtgttcgttattatgtttagttaattttttttattttttagtagagacggggttttattatgttagttaggatggttttgattttttgatttcgtgattcgttcgttttgggtttttaaagtgttgggattataggtatgagttatcgtgttagttaagattagattggtttttattaaagtatttgtaaatttagttaataagaaattagttattcgggcgcgggtggtttatgtttgtaattttagtattttgagaggttaaggtgggtagattatttgaaattaggagttcgggattagtttggttaatatggagaaatttagtttttattaaaaatataaaattagtcgggtgtggtagcgtttgtttgtaaatttagttatttagaaggttgaggtaggagaatcgtttgaatttaggaggtggaggttgcggtgagtcgagattacgttattgtattttaatttaggtgataagagtaaaattttgttttaaaaaaaaaaaaaaaaaaaaggttagttattattaagtttgtttttatgtatattttattaatggatagagtagaatatttattttagttttagttttgtttgaaagttaggtaattttagataaatttataaattttttgagttgttatattttttttagtagaattaggtatttatttggtgttgtatttttttacggtgttttgagggtgaaatgagatgatgtttgtgaaaggattttgaggtcgggcgtagtggtttacgtttgtaattttagtattttgggaggttaaggtgggtagattatttgaggtcgggagtttgagattagtttaattaatatggagaaatttcgtttttattaaaaatataaaattagtcgggtatggtggtatatgtttgtaattttagttattcgggaggatgaggtaggataatcgtttgaatttgggaggtggaggttgtagtgagttgagattgtgttattatattttagtttgggtaataagagtaaaattttattttaaaaaaaataaagaaaaagaaaaagaaaaaaaaaaagaaagtattttgtaaggtattattatatatttaagaagatgaagttagtttattggtatattattggatatatatttagtgttggttggaatttttagataagttataatgtttttatggttattttgaagatttttgttttttaattttattttttgatttttgtttatagaaatttattatttttagtttagatagttgggttgttggtagtttgttaatattgtgtgtgtggataaaatgttatatatttttgatgttatatttttaagtttgtagattaggaggataagtttaggaggataagaatagaggataagtttttatttttattttttttttatttgtttattatatttttttaagtatttagtttaaatgttttatatttgtgtgttttgtagaagtaaaaaatttacgtttataaagtagtaattagaaggaattttatggaaaagatttaaaaagattttttaagtaataagtatttttgatgtgtataagtagttgtttgataattattagtttttttggggggtgggggttatattttagttttgtaatttaggttagagtgtagtggtaagattatggtttattgtagttttgattttttgggtttaagggattttttaaatttagttttttaagtagttgggattaaaggtatgtattattatgtttagttgatttttaaatttttgtagagatagggttttattgtgttgtttagattgattttgaattttttgttttaagtaatttttttatttcggttttttaaagtgttgtgattataggtatgaattattatatttggttaattattatttttaaatgtatttttatttatttatttatttatttatttagagatagagttttgttttgttgtttaggttggaatgtagtggtatgatcgcggtttattgtaaattcggttttttaggtttaagtaatttttatgttttagttttttgagtagttgggattataggtttgagttattatggttagttaattttttgtatttttaatagagataaggttttattatttggttaggttggttttgaatttttgtttttaagtgatttagttatttaggttttttaaagtgttgagattataggcgtgagttattatatttagtttttttaaatatatttttttaaaataaaatattaaggtttttaattaatttaatattaggaagataaaatattttaaaattattagagaatttattattaataattgatttgtatgtaatttttaagaatatgtatataaggaaattttgtttttttttaaaatgaggaaaagttaatttttttagtaattaattggcgtttatttagttggataggaaagagttttaagggtttgaatagggtaggaggattaagtttcgaaggtaggggtgggagagagtttattagtttttttaagtgtttttttttttaatagtaagtttttgtttttttttaatattaataatagttatagattatgttttgtaggaattggattaaatttaaatatttatttgggatagggttagagagaatttcgagtgaagggatttaagatgatatagttaatttagaagttaggttgaatgtatttaattttttttttaggtttgggtttgatagtagaatatataataatttattaataaaatgttgtagtttggttttgaggaaatatatataagtttagtaatttatttttttaggttattttaatttttttgtttttttttaagtatatttatataaagattttttattaaaagttttttatttttaagatttgttataattttagttaggaaggttaattatttagtttgttagttttttataaatttgttattttgtatattttagttattattattgtaattgggtatgtaaggtaagttatatatttaaaatataggttgttttttatagaataaaggaaaaaggaaaaagatattaattttatatatatatatgttagtagtatttattaataataggtttttaattgtatattgaattgaatattgtgttaaatagtgaaaaatattagtttataaaaggttatatatttttattttgtaggaaaatttagattttaagatatgagtatagaaatttaaaaattttgatatttataaataagttggatatagatttaagtttttatgaagataaatattttatttttagtaattgtaattattttgtattttaaatgtttttaatttgttatttttaatttttgttttgttttttattatttgataatatgtaattttaggtagtttttttaattttaggtataatgaaaagtagttttttttttaataaagaagttttaaaatttaaagattataaaagaatgatgtattttattaatatgatataaataatttttaatggttttgtattttaatttaggataattaatgatatatgttataattaaaggtttaaattataatagaatttaaatttgttaagaattaaatttattagttttatatgaatttaatatttagtttaagttttaagttttttatttgtaaatagtattgtttttgttttgatttattttaaggtattagaattaaaaatagtataaattgatttattttataaaaagggaaaaataggttttttttttaaaagaagtaaaggaaaatatgtttaagtaaaaacgtattaaagagtaaaattatataattattatgtagttttgattagtgatttttaggggtagtggggtaggtagaggtataaaggggatttttggggtaatggaattgttttgtgttatgtgtgcggtgttggttatatgattgtgtatttgttagaatttatagaggtatatttatagaggttaaattttattgtatgtaaattatattgttgtagtttaatttttttaaagtgttattgtatataaaataatgtgttagatattgaattatgaaatttaacgtttaagtatataatttttaaggtttttagatgtattattaaaaatttattattaaatattttgagtttagtttttagtattttatattttatttatatttatattttataaaacgatttaaagtattatttaaaattattatatgaattttgaattattatgtgtttaatatatatttatagaaaattttttttttatttttaaaagtgaatatattaatatttattaaatgttaattatatggttatgagttgaatttattattaaattttattttttttgaattataaatatattaagaaatgtaaattgtgattagatttatttatattttttagaatattacgaaatgtgttttaaatatgttaattgattttagaaatttttatgttttgagtaagatttaagtgttaataagtatttgatggtttttaaaataagaatgttttagaaatttatttaaaaaaatgtttgaacgtaaaatgtaattttacggtgtatattttaatgtttgttgatgaatagatttttatagttttttttttttagaatttatattaaaatatattttttttagaaaaaataggagttaaagatgttaattatgttttttttatagttacgttatatttgttttataatatttttagaaaagtttttttttttatatgtttattttttaaattataaatatgtttttttttattagatatcgagttacgaaatttagagtaaaagtaaaattttttaatggaatgtttatgtaaatattagaaatataataaaataaggtaaagtttgttttttaaaatgttgtttattatattaaaatataattttgttttttaaatagcgagtaaaattaaattaattttatttttttaaatagaagtttatttaaagtttttttataaaaatgatatttatttgatttaatattgtttttttaataagaataatacgtagggtgttagagggtagttgttggatttttttttagtaaataaaggagattagttagagtttagtttggtttgtttaggaaaggaggaacgtagtttgttgatatggttaaggaatgttaattaatatattttaaaatttttattattttgtttgagacgtgtatatttttttaggtttttaaagtttaattagaaagtgtatttaattttattgttattttatttatagtggggaagtttatcgaggaaaattatagggaaataaaatgttttttagttatttatattagtataattaatttagagtttacggtataaattaaataagttaatttgttagtgttttgaatgaagatatttaattaaagtatgtattttttaattttttagtagtttttaggatagttggttttggtgatcgttttttggttttttattgtttttaatacgattggttttttatcgtaggattttaaataaaatgagataattaaattatatttcgagcgaaggggcgtttattttgtagataaatatatcggttttgttttttttaaaatgcggatacgtgtttttttcgtattagggggggtttttcggcgcgcgtttcgtcgttatttgttgaggaaagcgagcgtattttttgtagtttaggtttcgggcgttagttttgtttcgtagttttagagttcgtcgtagttcgggtggttttttttcggtttagcgttcgtcgtttgtttttcgttttgtaagttttaagaggtagttatttttcgtagttttcgcgtttgtaattgttttttggcgggggagtgggtgtttaaaaagttagtagttggagaaattgaaaagattataagcgatttaacgataagtttttttttttttttaaagatcgagaggagggtagaggggagtagtgtttgagtttacgtgatcgagttagggagttcgacggttttaggaacgttcgacgtcgcgcgtgatttttaagtgggagtattttcgaatcgatttttggtttatttataaggatagtggcgtatagatggcgtttttcgtagttttagttttagatttaagaggtttggagtagggtttgagaatatgtatttttaattaggttttgggggatgtcgatattgatatagttagtttggggattatatttcgaggattacgtttttagtttttgatttatataagtgttatttagaatagatgtttgattttaaggagttagtggtgaaattagagaggttttgggtttgttaaatttttagtagtaaacgtaatttcgggttttggagtggtaaagtcgtggattagaggtggagggagtgggtttttagtttttaagaggttattgggaaggtttttcgcgttagattaaagattttaggtattttttcgaatttatttgaagtggtatcggggagatttgtgttttcggttacggcgttttttttcgttggaggtatttgtttattttttttttcgggcgaaggtttttcgcgttttttggtggtagttttagtttttttagtttaatggggtgttttttttatttattttagtaggagttttagggtgcgagattaggattatagttttaattggttttaaggtagttgttgttgatgaaaatgaaaaggaaagtagtatgtgatttataggttattgtgagaattttttagtgttatatttgtgtttaattaattattaaattatttatttaggtggtataagggatatggtttttgagggttgtgatttagatttttaatagaggaagacgagggggggtatttggagggaaagttttatagtattagttttagttgtttggtgtttagttaaaatagagagacgtaagtgtgttttgggttgataaagatgaggtttataggtaatgaagataggttttaaagatggagaagtatttgttttattagttaaataatagttgtgaaaagtttttattgttttattttaagtttaatttttattaaagttgagagttttggttttttttaggttgaaaggtagagtttttttgtttttgaggtagagaagttagtttggacgggaagagtgtgtcgttggtaaataattgtagtagataatatgttaattttagtttttttgttttttgttttggggttttttaaagtatttagtttttatatgttttttttttttgttattttatggagaaaatgttaaatgatggtttaaaaaaattagttttatggttaggtatggtggtttatatttataattttagtattttgggaggtcgaggtaggtggattacgaggttaggagtttgagattagtttgattaatatggtgaaatttcgtttttattaaaaatataaaaattggttggacgtggtggtatatgttagtaattttagttatttaggaggttgaggtaggagaatcgtttgaatatgggaggcggaggttgtagtgagttaagatcgcgttattgtattttagtttgggcgatagagcgagattttgttttaaaaaaaaaaaaaaaaaaaaaaattagttttatttggtggtatatatttgttaataagatatttttggaaatggaaatcgttatgaaggaattttaattataagttaataggtagaaaaagataggtgagggtgaagaaaatgtatttattaatattaatattatatttgacgttgtgttaagtatttgtatagtattttatttaatttttatattagtttagtgagatattgattttatttttttagtgaggaaattgaggtttatagagtttttgttagttatttgaagttatttagtgagaaaggaatttagtaataatagtggttttatagatagttatcgtttattggatatttatgtttcgtttttttttaataatttttattttatacgtaagtttataaggtaaattttattatttttattttatatttgagaaaatgaatgtttaggaaggttaaataatttttttatggttatatgatttattagtggttaagaaggatttgaatttaggagagaggttaaggatttatttatttttatattatgtttttaattaattagaatgaaaatggtttgattttttgttttatgtagaatattgtagataaatttttgttatttgtgtgttaagtttttgttttgtgtttattgtgatgttttttttagaaggtattttatatataggaatagtatgttttttttttagagtagtttaaatatttatagaagttgtttattatataaggaaattttattgtaggaaataataagtagaaaatgaatgggagtgagtaagtttttttttgatttattttgtttattaagaaagataatggtatttagagatggaaattttgtttggtttaatgtagagtggagaggatgattattttaattttatttgaattgtgattataatgatgaagggattatttttgaggtagtttatattaatggttagattaaaaagttttttgaagtttggtattgagaacgatgtttgttatataagtgagtagggttttagttttatttttattttatttttgatttgtttaaggaagtatttatatatgatattgaaaggattgtttgtttttaaaatattttataatggggattgaaattgttattattaagttattttttggggataaagtattgaattgttaaaattaagttatgttatatatgatgggtaatattaatttattagtatttatgattaataagatgagtttgtagtatgagttagatgttatttgggaaagtaaaggaagttaatgtagtataggtatggtttgttgtgaagaggaaggaaagtttttttataaaaggtgtattttttttatttttttattttattttttttttgtttagtaaagttttatatattttaaagttaagagtttaaataaggtgaagagtatattagtttagtggaacgtgtatattggtttttttatagtttttattttatttgttaatataatttgcgttgcgattggatagcgtatgttttatatttttagtattttttatggtttataatatttatttagtataatttacgcgtttaataaatgtttgttgaagtttttgatttggaaagattagagggagaatttttcgtaggaaagaaattattaagaggtaaaataaaattttgtaaaaggtaagaaagtaaaagttaataggaaaagtggagggaaaggaggaatgttatagatgtttagaagggtgttatgttaaagggtgtttttggattgttgttttattttttgagtttgaagttaagtaggaggatttgggttttgggatagttatttgttttagagtgttataggaataagtttatttatattatgtgggtataaattggtttgttttaagagaatttgagagataaaattttatatttatggaattaataaaggggaaagattaattgaacgtgtaataatatttttttttggtggtgatgaatgaaaaagataggattattaattaatatgttagagattattttaattgaatataaagtttataaaatgtgatttgatatttgaaatttgaatttggatagagttttttaggattatattttttgtagaaataaaaataaatttaatatttattgagtatttttttagtttggatattatagtaggtaggtttgtataggttgatttatttttattttatttaatttttgaaaattttttgggattgtttattttatagatgggaaaattgaggtttagagagttaatatttattttataaagttatttatgtgtatttggtagggtgaaagtttttatttaattttatttatttatttgtatattttatgttttttttattgttatgagatgttgtttttatttgttgtataaatggaggtatgtttgttttgtagagtttagatattgttgaatgaaatgttgttaattttttgtttaggaatgattatttatgagtatatttatgtaatttattttttattgatttgcgttggattggggtttttagagggtaataaggatataagtagtaagatagatttaatttgatatttgggtattaggattatgagataaggttgttttgatttgtagtttaaatgaattatttgagtaagtagtatttgtagttaattttttttaaattatatttatgtgttttagttttgatttttgttatttgtaaataaataggtaaaaaataattttttgttttgtttattgttttttaaaggtatttaaattttatataaattttttgtatattttaagtttttaattttttatgtatttgaaattaaatatgaagtatatatatttttgtttttatttttaattttgtagtaatttttttgagttagaagagaaattagtttttagaggttattggtatgaatgtgaatatttagttaagaaaaaaaaaaaaaaaagttataggattgttagaaatggcggtaaattgtaatatgtaattttataaatgatttaaatgtaattttgaaaatgtagtttttttatattttttggtttagaagatattaataagttagttagtgtaatattttttgaaatgagataaaaaaaaaaaaggtatagatagatatggtttgagattatagataagattgtttgattttatagtttaatattttaaaaaatattttaaaaattttgattaaagttttttttatatttttttgtaaatgtatttaatatttttaatttttttgtttatattatggaaagttattataattgttttatattgttttttagatttat

SEQ ID NO: 647 - DNA, 11622 bp, Artificial Sequence
  chemically treated genomic DNA (Homo sapiens)
gttgtggttttgggtttcgtgttgttatttttatagatagatagatatttttaaaaggggagtaattatgttgggtacgattgttgtggttatcgtgtttttagttatttttttatgtttaaataaaacgataaaagattgggggtttttgtttattttgttttatttgattaagagtttagaagaggatgcgatatttagggttttatgggattatcggttggtaggggttttgtttattgggtttatgggtgagacgagtatttttaggagggttattgggtcgggaagaattgtggagaatcggggtacgttttgtttttttagttgttagggtatagtattttttttttattttaatatttagattttagatttattttagtttatttgtttttatacgagttataggttgttatttggggtaggttggttttattttggggttagatgtaggtttttttgttttagaaggagattgtagtttttgtagatttagaaatggttatagtttatttttatgtattagggggtgaggtggtaggtggtggaaagggtttgaggggggttttttttttttaggcgagtacgattttagcgagtacgacggggatgagtagagtcggcgggtggcgtaggttattatttttagtacgtacgtttcgggtattattaattacgatatcgcgttgtttcgtttgtattagttcgtggtttttattgattatgtggtgtttttttgtttgttcgaacggacgttttttgagaggacgttggttttcgtgcgttttttattggttagcggttggggttagttgttggatcgtggcgttacggttttggagtttatggtttttaacgtgtttcggttgatgatttaggattgtttgtagtagttacggaaggtgggagattttttaaatattacggagtatatgttttgtgtcggttattcggatggtagtaaggatttttgtaagggggatagtggaggtttatatgttatttattatcggggtacgtggtatttgacgggtatcgttagttggggttagggttgcgtaatcgtgggttattttggggtgtatattagggttttttagtatatcgagtggttgtaaaagtttatgcgtttagagttacgtttaggagtttttttgcgagttttatttttttagtttagtagttttggtttgtggagagaaagttaaggttgcgtcgaattgttttggtattaaattttatatatttttttgtagttaatggggtagaggagggtatgggagggagggagaggtggggagggagatagagatagaaatagagagagatagagatagagagagattgagggagagattttgaggatatggagagagatttaaagagattttaagatttaaagagattaatagagatatagagatggaatagaaaagatgagaggtagaggtagataggcgttggatagaggggtaggggagtgttaaggttgttttggaggtagatagtttagttgagtttttttatttttttttagttaagtttatttgtacgtgatttgttggttttaggttgttgttttgtttttattgttggagatagtagaggtatgaatatatatggatgtatatatatatacgttaatgtatatatatagagatatgtatatatacggatgtatatatagatggttatatagagatacgtaaatatatcgatgtatacgtatatagagatatgtatatatagatgtatatatagatatatatatggatgtacgtatatgttaatgtacgtatatattagtgtatacggatgtatagagatatgtatatatcgatgtgcgtatatatagatatgtatatatatggatgagtatatatatattaatgcgtatatatatcgatgtatatatatagatgtatatatagatgtatatatatcgatgttgattttatgtgtgttgttttttgaaggcggttgtttagtttttatttttttggtttttatttattattatttttattttagataatttagaagtattattatgtatggtggcgaatgtttttaaatttttttttaaatgtattttttttttcgttgggtgtcgggttgtatagattattttttatttgttttttagttttataataaacggttgcgtttttttcgtatatttgtggtgtttgttatttattgggttgtttatgatttatttttggagttttcggtgtttattttttgagatgttttttttttttataatttttaatattattgaaatgaatttttatatggaagttattttttaaaaataaaagttgtttgatagatgtttgaggttgtagtttttaggattttgtggaattggatgttttttttttgttatagtttttgttaatgatattttatagagattttgggagtatttgtttaagagttagggatatacgtattattaaatgtaagtttttaggttttggttgtagtgggaggatttggtaagttgtatttttgttgagtttttagggtggtggaagaagaatgagaaatatatgaatagagaaatggggaggtgataaatagtgtttttatttagatttcggtaagtacggtttagagagtggattcgatgttatttttgtagggtcgttttgggtattattggtatttatagtagtaaggtgggtattattggtatttatagtagtaaggtaggtattagtaatttatttcgggggtatttaggtattatttattttagagtagatagggtttatgaattatagtcgtgggttgtttttaaggtattttgtttttgtaaataaagttttatgggaatatatttatattagtgtttatggagtggtcgtggtagagacgtttagtcggatagattagttgattcgttaagtttagtatggttagtgttaggatttttgttgaagatgtttgttgattttggttagatttcggtttttaatgttttttaaacgggacgggagttagtggcgggttttgatttaggttagagttggttttgtttttttttttgttcgagtgattatgttttagtttttttatgtgtaaaataggagtttatcgtgatgtttatggtgggatgagattagtatggatggaataaggttttggaagggtttatgttatggttatcgatagtaaagttattttgtagatagatgttttagtgaattggtagaaaattttgtaattagaatgttcggggtttttgagggtttaagtttagtttagggttttggaagttattttgattttttgggagtggaagttggtaggattttttttgggaagaagcggagggtggggatgagaggatagtttaggagtttatttagatttataggaggaaattaggggagttatgcggggttttggtggagcgttagtttttttttttgttaatgggaaatgtaggcgtttattttatggtgttgtcggaggagggggttcgggattttttagaggtttcgttgaagggtttgggcgtttttaaaggttatatgttttatatgggacgtgttatttgttacggtttagttttagttttttgtgagtggcgagatagaatacggggaggttattggttatgggtttgggatagggtgggatgaggcggtaggtttgggttattaaagttagtatcgttatttagtattgatgataaagattgcgtgtttgttatgagtattttgttgttggtgtatatatcgtattggtttttttatataaatatgtttagaggcgatgttagagggtggagattaggagaggtaggagttagatatttggtgttattaggaaggttttttttagaggattaggttgtgcgtggtgttcgtcgtgggaggttagtttggcgttggtatttagtattattagtttgtgtagtcgggtggggtttagtgagtgttttttgtgtgttaggtataatgacgtataatgtgtgtatattaggtttatgtgtaggtggttgcgagatagggcgatttattaaggtagatgtattatgaggtagtggttagtgtcgtgggtgttaggggtattgtttttcggttattacggtatagtaggtagtgatcgttatattggttaagttttagattatttattttagagattttagaggtaaaaagttcggttgtattttttagtgatttttatagttattgagtagagacgtttaggattttgtgatgggaggtttttgtattggagaacgagtttagaagtttttttagtttcggaatagtgtggttagtggtgggtaggttaggaggggttttagatatagtttgtttttttagatggttacgggaaggttattttttatagaagtacgttttggggttatgcgggtatagaaggtttgggggtgggtggggtaggtgttagtttggtttgtgggaggttatggtgtagatgttaagtttttttcgtgatatgagattatttgatattatttagagagtggttgtgagcggaagggttcgtttagaaataagtagggttttggggtagaagttttgggtttagattttacgtttattgttagcggtttcggtttaggtttttgcgttttttaaatttagtttttttttttggaaaaatgatggggaaaatgatatttgtatgtgaggattgagagttaaatgtaaatatttggaaattataaaatgagtacgaaatgatgtttttatttttagaatagaaagtttttatattcgcggttttggtgattgatgaggatgaggttttgcggggtttttttggtcgtttagttttgtttggggaaggtggggttagagtggatgtgtttttagcgtggttatttttttgtttcgttagtaggtttcggttttaattaggaggtttaagttaagtgataagtagttagataatagttattttagttggggcgtggattttgttttagtagtttgttttagtgaggatagggatatagtattcggttatattatggggcgtttattgtatttcgttttgtttagtgtttttttggttggttttttgttgttcggggaaagtcgtaagtgtttttcgttttttagatttaaaagtagcgttagggagtagggaggggcggtagttggggaaatttttttatttttgtagtttggacggtgggtgttttgagtgttgttagaggttgggttcggatggttgggtttggtttttttagttaacggtatttttaaggttagttgtggttttttggggttgagagttagacgggcggattagaggttatagagataaaaatataaggatagagttagagagagaaagggagagggaaggagaaacggagatatagtgagatgggaggttaagaggtagagatagaggtagaaagacggagatagagagagagggaggggttggggtaggtagagataggatagttagttatttgttattatagggaggtataggacgaggggtatagtagaggagtttttagggaggaggaggttgagtcgagttagtgttattattttcggattggtttcgtcggggaaggagttgtttaatgtatagttggataggtgggggtagtagggttgtttaggattttcgggtttgtttaaaagtagaggtttagataggatagaagttaggtaagtttggggatagcggaggaagaggaggtttttttggtggggatacgagagatagggattttagatttgtttgtattttggataaagtggataggtaggggtattaaggggatttaggtttgggaagggaatgtgtgagggagagacggagtagggggagattttcgtggggtggaaaggggagatttttgggaaggttgagtggatttttagtgtattattgatttaaacggttttttcgtttggtgatttggagttttagttatattatacgggggttttttttattttatttttaattttttgttttttttagtttttgttttttgagttatatttttttgttttttacgcggaacgggattttcgtttttatggggtattgtgtggttttaattcgtttagtttttttttttttttttaggttatattgttttttgtaggagtttattgtgatgtttgtggtgggatgagattagcgtgggtggaataaggttttggaaggatttatgttattattatcgatagtaaagttattttgtaaatagatagatgttttcgcgaattggtagaaaattttgtagtcggaatgttttaggattttgaggttttaagttcggttcggggttttcgaggttttaagttcggttcgggattttggaagttgttttggtttattgggaatggaagttggtaggatttttttttttgggaagaagtagagggtggggatgagaagataggttaggagtttatttagatttataggaggaaattaggggagttatgtagagttttggtggagcgttagtttttttttttgttaatgggaaatgtaggcgtttatttcgcggatttttgggtttatagggtattggtatttttagttgtgtgatgcgggtttggtttataattatggtttgtggtgttttcgggggtcggtttggattttgggtggatatggttagtttcggagagttagggttaggttattttttttttttattttgttttagaggtttcggtagttgtattgtggggtgggtggggttgaatataggttttagaaggttttatttaggattttgttgtgtatatttttgattttaataaaattagaatgcgtatagtatttgtagtttagtttttaaacgagtatagttgttttggtagttacggaagtttttttggggcggtgggattttagtatttttttgttggtattgttataagaaaggataatggattaagtagtttaaagtaatagaaatattttttttatagttttggaggttggaagtttaaaattaaggcgttagcggggttggtttttttagaggttgggagagagtttgttttaggtttgttttttggtttcggggtgttagcggttttatagtttatggtttgtgggagtattgtttttatcgttgtttttattatcgtatggggtttttattatggttgtttttttgttttttttttttttagaaggatattagttattggatttagggtttattttatttttataaaatgtttttttaattaaatatattataaaagttttatttttaattaaggttaggttttgaggttttgggaaagatatgaatttggagggatattatttagttttgttttgttatttgtgagtgttttttgtaatttaattttttattttaataaaattagaatacgtagagtatttgtagtgttagtttttaaattattgttgttgtattggtaattattaaagttacgtggttttagttttaatttttatatttaataagtttaaatttattttttatgagtttggattttattgattgaaaattttgtttgttggtaaaatttgtttaaatgtagttgttgattgtggaatttattgatgttgttaaaataataaatataattgtgtgttcgaggattgtaatgtttttaatagtttttgaagaaataaattatacgataaatgtttattaatttggatgttttatattagagttttagagtgttttattaattttttgagataagtgtttaaaaattttgttttaatttcgttttgttaaaattttattttatttatattagaaagtgtggttacgtggtttagattcggtttgtttagtttgattgaagcgttgatgcgatttagttataatagatagtagaagcgtttagatttagtttagagggttgagttaggtacgttattttttttttatttttttaatatatattggttaagtttcggtcgtgttaggtacgggtatatagttgtgattaaatacgttaagtttttttttagcggagggaaggataagtttgttagtatgtaatgttagagaggggttgggtgttagaagataaatagtatagtgtaaggggatgaaagagatacgagtgggggtaacgttagagggcgtggttagggagggtgtttcggagggcgttgggtttgagttatttgggtatttgtggaaagaatgttttagatagggaggtgattggtgtaaaagttttggggtgtgagtgttgggtttagttagggttagcgtagagtttagtgtggtagagagaggtgaatgagggtagagttgaaggtggtgaggtttgggaggtttggttatgggaagattttgggttttgttttaagattattagaggtagattttgggtagtttttgatttttttgtattattttttttatttcgtgtttgttatttgtatttttttttttatatagtttagtttaattttataggtcgtgttttatttttatgagttggggagagttgagtaggttttagggagatgggaaaaggcgggaattggataggggttgtaaaggaaaggtgattttttattggttaattagtttggggatgttcgggggtggatgttaaggggaatagagttgtggtcgttattatagaatagcgagtttttttaagaggttagaggaggcgtaagggatcgattagagatagtgagggcgttaggttttagttgagtggggattaatttttgtggtaagtttgtgaattattattgtggttttagggtagtagagaaaaaagtaggtatatgtttatttggttataaggaaggagattaaggggaagagagaaggtattaagagaggtgtttatatggaggtgcgttagaatatcgagggtaaggtagaacgcggtttttagattttaattggagtttaggaggttcgcgagttttagtttgggaaatattaagttaggtttggataatttgtttgaggttgtggttattttaatatgagagttagaggttttaagggagatgggtattttttattttttagtttttttagtgttttttgtggagtggaggtgatatgaggttgtaggttgtagggagttacgtgtgggttgtattttagagtaagtgtgtgggagtggagtagatacgtagagtaatggggtagggttaagaaataataaatttaagtttagcgttggtgggataatgtcggtgttattaaaagaaatggggaatttggaaggtaaagtaattggaggtaggaatgaatttaagatttattaagtattttttgtatattaaatttaatattaggagtttatataatttttaaaatagttttaagagtagatattataatttttttttgttaataataaataataagtgattaaggtgtttttgaagtttaagattgtttgattttgtagttttgttttaaattttggatatggagagtttggagttttgagatgagggaaggtatttgttatagtgagagagttgaaaatatggagtttaggataaaagttagtgttagagagattagttggaagagttatttttattgtagtgagatattgaattttttagtggaaaaaaagtatagaaaaagattatagagggttaagaaaagaaattgaggttgttaaaatgaaaagaggaggaggagtgggtgagagataaaggagatataggtagagagatgtggatagtatagtttatagatatatattttataagggatatagattttcggatttagggtattttaattagtagattaagatttatttgttagttatgaaattaatttagtatttttttttaaaagagtagaattaaatagaaaattttgtattaagtattgtattttaggaaatattaataaatattattttttgaaagttggtatgtatgtgtgttttggtattttataaattgtattattatagtttgtaattgaaatagtattattaatttttatataataaagagtagagattttaaagacgagtggggttaggttgaaggggtatagtttgagttaaagtatagaatagtgggttgaaagtattttagggagggagaatttaaggaagggggtttgggtggttaggttgagttagcgtgagtatgtgaggaggttggtgagttgattgggtgggatgtgtttatttttttagagaagggtgtatgggtttagagtaggtgttttatgttgtattttatagagaattggggggaggggggaaatgggtatttttttttatagtttttaaagtgtttgaggaaagtgttgataaagaagttaaattttgtaaaatatttgaagagatttattttgagttaaatgtgaggattacgatttatgatatagttttggaaggttttgagaatatgtgtttaaggtagttgggttatagtttgattttatgtattttagggggatagaagttatatatagatattaattaataagtataagttgtatattggttcgttttagaaaaggggaaggtgggggtttttaggttataggtggttttaaagatattttgattggtaattagttgaaagagttattatttaaagatttggaataaatggaaaggagtatttgggttaagataagaggttgtggagattaaggtttttgttatgtagatgaagatttataggtggttatttttagagggaatagatggtaattgttttttttttagatttttaaaaggtgttatatatatggttaggcgttttggtttattttgtaattttagtattttgggaggttgaggtaggtggattatttaaggttaggagtttaagattagtttggttaatatggtgaaattttatttttattaaaaatataaaaattagtcgggtgtggtggtgtttgtttgtagttttagttattcgggaggttgagatagtagaatttttttttgaggtaggataatggtttgaatttgggaggtagatgttgtagtgagttgagattgtgttattgtattttagtttggatgatagagtaaaatattattttaaagagaaaaaaaaaaaaaaaaaaaaaaaaaggtgttagatttttagtttagaaaaagatttggaatggtaagggggttttttatagaatgtggatttttttgagatagttttgtagggttattttaaaatatgttaaataaatataatttggagtaaaattatttattttagggtttgttatatgttatgtgattttatattagagaagttaggttggaaattggtattttattgttataaagattttgtttggttagttttaaggttttttaacgtgaatgttggttagttgtgttcgaattttaaaggaagaaataatgaggcgtgtgggatttgtttttttttatggttttaattagttttttaggtttttatggaatttttttggtagagaggacgggtttatttagtgagttgggggtttagaattttatttttggtttataagagagtgattcgttttttgtgatttggatatggtaagggatatggtagttagggagtataggtgagggggagtttgggtgagggtgattagagtttttaattttgttttttttgttttttagt

SEQ ID NO: 648 - DNA, 11622 bp, Artificial Sequence
  chemically treated genomic DNA (Homo sapiens)
attggaaggtagggaggatagggttaaaagttttggttatttttatttaggtttttttttatttatgttttttgattgttatgttttttgttatatttagattataaaaggcggattatttttttgtaaattaaaaataaaattttaagtttttaatttattgagtggattcgttttttttgttaagggaattttataggaatttgaaagattagttgaggttatgaggggaagtaggttttatacgttttattatttttttttttggaattcgggtatagttgattagtatttacgttaagagattttgaggttgattaaatagagtttttgtagtaataagatattagtttttaatttgatttttttagtataggattatatgatatatagtaggttttaaaataaatgattttattttaaattgtatttgtttgatatattttgaaatggttttgtaaagttattttagggaaatttatattttgtagagaatttttttattattttaggtttttttttgagttgagagtttagtatttttttttttttttttttttttttttttttttaagatggtgttttgttttgttatttaggttggagtgtaatggtataattttagtttattgtaatatttgttttttaggtttaagttattgttttgttttaggaggagattttattgttttagtttttcgagtagttgaaattataggtaagtattattatattcggttaatttttgtatttttagtagagatggagttttattatgttggttaggttggttttgaatttttgattttaagtgatttatttgttttagttttttaaagtgttgggattataggatgagttaaggcgtttggttatgtgtgtagtattttttaaaggtttgaagaggaaatagttgttatttattttttttaagggtggttatttatgagtttttatttatataataagaattttggtttttataattttttattttaatttagatatttttttttatttattttaggtttttagataataatttttttaattgattgttaattagaatatttttgaagttatttatgatttggaagtttttattttttttttttttggaacgaattagtgtataatttatgtttattgattggtgtttgtatgtaatttttgtttttttaaaatatataaaattaagttgtgatttaattattttggatatatgtttttaggattttttaaggttgtgttatgggtcgtggtttttatatttggtttagaataaatttttttaaatattttatagagtttggtttttttattaatattttttttaggtattttgggggttgtggagggaaatgtttattttttttttttttttagttttttatgaggtatagtatgaggtatttgttttagatttatgtatttttttttggagaagtagatatattttatttaattagtttattagtttttttatatgtttacgttggtttagtttggttatttaagtttttttttttgaattttttttttttagggtgtttttagtttattgttttgtgttttggtttaagttgtgtttttttagtttggttttattcgtttttaaggtttttgttttttgttatgtggggattggtgatgttgttttaattataaattataatagtataatttatgaagtgttaggatatatatatatgttaatttttaagaaatagtatttattagtattttttaaaatatagtatttagtataaagttttttatttgattttatttttttaaaaaaaaatattgagttgattttatgattggtaaatgagttttgatttgttggttaaaatgttttggattcgagagtttgtgttttttgtagagtgtgtgtttgtgggttgtgttgtttatatttttttgtttgtgttttttttgttttttatttatttttttttttttttttattttgatagttttagtttttttttttggttttttgtagtttttttttgtgttttttttttattgaaaaatttaatgttttattataataaagataatttttttaattgatttttttagtattgatttttgttttgagttttatgtttttagtttttttattatgatagatgtttttttttattttagaattttaaattttttatgtttaaaatttaaaataagattgtagaattaagtaattttgagttttaaaaatattttagttatttattatttattattggtagaagggaattataatatttatttttagagttgttttaaagattgtataaatttttagtgttgagtttggtatatagaaggtgtttagtaaattttgggtttatttttatttttagttattttattttttaaattttttattttttttagtgatatcgatattattttattaacgttagatttagatttattattttttgattttgttttattattttgcgtgtttgttttatttttatatatttgttttgaaatgtagtttatacgtggttttttgtaatttgtagttttatgttatttttattttataaaaggtattgaggaagttgaggggtggggaatgtttattttttttggggtttttggtttttatgttgggatgattatagttttagataagttatttaagtttggtttagtgttttttaaattgggattcgcgggttttttgggttttagttggggtttgaagatcgcgttttgttttgttttcggtgttttgacgtatttttatgtgaatattttttttggtatttttttttttttttttggtttttttttttgtggttagatggatatatgtttgtttttttttttgttattttagagttatagtgatggtttatagatttgttataaggattggtttttatttaattggagtttgacgtttttattgtttttggtcgattttttgcgttttttttgattttttagaggaattcgttgttttgtgatagcggttatagttttgttttttttggtatttattttcgagtatttttaggttgattgattagtaagaagttattttttttttgtagtttttgtttagttttcgtttttttttatttttttgaagtttgtttagttttttttagtttatgggggtaggatacggtttataaggttgagttggattgtgtgaggaagagggtataggtggtaggtacggggtggaaagggtgatgtaaggaagttaaggattatttagaatttgtttttagtggttttagaatagagtttagggtttttttatggttaggttttttaggttttattatttttaattttgtttttatttatttttttttgttatattgggttttgcgttgattttggttgagtttaatatttatattttaggatttttgtattagttatttttttgtttggaatattttttttatagatatttaagtggtttaggtttagcgtttttcgagatattttttttgattacgttttttgacgttgtttttattcgtgttttttttatttttttatattgtgttatttgttttttagtatttaatttttttttgatattatatgttgataggtttattttttttttcgttggaaaaagatttgacgtgtttggttatagttgtatgttcgtgtttagtacggtcggaatttaattaatatgtgttgagggaatgaaggaaagatggcgtgtttggtttagttttttggattgaatttgggcgtttttgttatttgttatggttgagtcgtattaacgttttagttagattgagtaggtcgggtttgggttacgtggttatattttttgatgtgagtaaaatgggattttggtaaaacgaaattaaaataaggtttttaggtatttgttttaagaaattaatggaatattttagaattttgatatggagtatttagattggtagatatttgtcgtgtggtttgtttttttagaagttgttgggagtattgtaattttcgagtatatagttgtgtttgttgttttggtaatattagtgaattttatagttagtaattgtatttgagtaagttttattagtaagtaaaatttttagttagtaaggtttaaatttatgaagaatgggtttaaatttgttgaatgtaaagattgaaattgaagttacgtagttttaatgattgttagtataatagtagtagtttaaaggttggtattgtaggtgttttgcgtattttgattttattaaaataaaaagttggattgtagaaaatatttataggtggtaggatagggttgaataatgtttttttaaatttatgttttttttagaattttagaatttgattttaattggaaatagaatttttgtgatgtatttagttaggaagatattttatgggagtagagtgagttttaaatttaatgattggtgtttttttgagagaaaagaagatagaaaaatagttatggtgagaattttatgcgatgatggaggtagcgatgggagtaatgtttttataagttatgggttgtgaggtcgttggtatttcgaggttaggaaataggtttagagtagatttttttttagtttttggaggaattagtttcgttgacgttttgattttgaatttttagtttttagagttgtgggagaaatgtttttgttgttttaagttatttggtttattgtttttttttgtagtagtattagtaaaggaatgttgaggttttatcgttttagaagaattttcgtgattgttaggatagttgtgttcgtttaaaggttagattgtagatgttgtgcgtattttgattttattaaaattaaaagtgtgtatagtagggttttgagtgggattttttgggatttgtgtttagttttatttattttatagtgtagttgtcgaggtttttgaggtagagtaggggagagagatggtttggttttggtttttcggggttggttatgtttatttagggtttaggtcggttttcggggatattataggttatggttatgagttaggttcgtattatatagttaagggtgttaatattttgtggatttagaggttcgcgaggtgggcgtttgtattttttattggtaggaagggaagttggcgttttattaggattttgtataatttttttagtttttttttgtgggtttgggtgggtttttggtttgtttttttatttttattttttgtttttttttaggaagaggagttttgttaatttttatttttaataagttagagtagtttttagagtttcgggtcgggtttagggtttcgggagtttcgggtcgggtttagggttttaggattttagagtatttcggttgtagaattttttattaattcgcggaagtatttgtttgtttgtagagtagttttgttgtcgatgatgatggtatgggtttttttagggttttgttttatttacgttgattttattttattataagtattatagtgggtttttgtagggggtagtgtggtttgagggggaggaagaaggttgggcgagttggagttatatagtattttatgaagacgggagtttcgtttcgcgtgggagataggaagatgtggtttaggggatagaggttggggagggtagggggttgagggtgggatggagaagattttcgtgtgatgtgattggagttttaagttattaggcggaggggtcgtttaggttagtgatgtattgaggatttatttagtttttttaggggttttttttttttattttacgagggtttttttttgtttcgttttttttttatatattttttttttaggtttgggtttttttggtgtttttgtttgtttattttgtttaggatgtaaataagtttagggtttttgtttttcgtgtttttattagaggggtttttttttttttcgttgtttttaggtttgtttggtttttgttttgtttgggtttttgtttttggatagattcgggggttttggatagttttgttgtttttatttgtttagttgtgtattaggtagtttttttttcgacggagttagttcgagagtggtggtattggttcggtttagtttttttttttttgggagtttttttgttgtgtttttcgttttgtgtttttttgtggtggtagatggttaattgttttgtttttgtttgttttaatttttttttttttttttgttttcgtttttttatttttgtttttgttttttggttttttattttattgtgttttcgtttttttttttttttttttttttttttttgattttgtttttgtgtttttgtttttgtgatttttgattcgttcgtttgatttttagttttagggagttatagttggttttgaggatgtcgttggttggaaaggttaagtttagttattcgagtttagtttttggtagtatttaaggtatttatcgtttaggttgtagagatgagagggtttttttaattgtcgtttttttttgttttttggcgttgtttttgggtttgaagggcgaggggtatttacgatttttttcgagtagtaggaggttagttagggaggtattgagtaggacgaggtgtagtgggcgttttatggtgtggtcgagtattgtgtttttgtttttattgggataggttgttggagtaaagtttacgttttagttgggatggttgttgtttggttgtttattatttggtttaggttttttgattggagtcgagatttgttggcgaggtaggggagtgattacgttgggaatatatttattttggttttattttttttaggtagagttgggcggttagagaggtttcgtagaattttatttttattagttattagggtcgcgggtgtggggattttttgttttaagaataaaaatattatttcgtgtttattttgtagtttttagatgtttatatttaatttttagtttttatatataaatattattttttttattatttttttagaagagaaaattaagtttagagagcgtagaagtttgagtcgaggtcgttggtagtgagcgtgggatttgagtttaggatttttgttttaaggttttgtttgtttttgggcgggttttttcgtttatagttattttttgggtggtattaggtggttttatgttacggggggggtttggtatttgtattatggttttttataggttaggttggtatttgttttatttatttttaaattttttgtgttcgtatggttttaaaacgtatttttgtggggagtgattttttcgtgattatttggagggataggttgtgtttgaagttttttttgatttgtttattattggttatattgtttcgaggttgagagggtttttgggttcgttttttagtgtagaaattttttattataaggttttgagcgtttttgtttaatggttgtgggagttattgggaggtgtagtcgggttttttgtttttggggtttttggaataaatggtttaaagtttggttagtgtggcgattattgtttgttatgtcgtagtggtcggggagtaatgtttttaatatttacggtattggttattgttttatggtgtatttgttttgatgggtcgttttgtttcgtagttatttgtatatgagtttggtgtgtatatattgtgcgttattgtgtttggtatataggaggtatttattgagttttattcgattgtataaattgatgatgttggatgttaacgttaggttggttttttacggcgggtattacgtatagtttggttttttgagaagggtttttttggtggtattagatgtttgatttttgttttttttggtttttattttttgatatcgtttttaggtatgtttgtatggagagattaatgcggtgtgtgtattaatagtaggatgtttatggtagatacgtagtttttgttattaatgttgggtggcgatgttggttttggtggtttaagtttgtcgttttattttattttgttttaggtttatggttagtggttttttcgtattttatttcgttatttatagaaagttggagttgagtcgtggtaggtggtacgttttatatgaaatatgtagtttttgggggcgtttaggttttttagcgaagtttttggggagtttcgggttttttttttcggtagtattatgaggtgggcgtttgtattttttattggtaggaagggaggttggcgttttattaggatttcgtatgatttttttagtttttttttgtgggtttgggtgggtttttgaattgtttttttatttttatttttcgtttttttttaggaagagttttgttaatttttatttttaagaagttagagtggtttttagaattttgggttgggtttaggtttttaggagtttcgggtattttggttgtagaattttttattaatttattgaagtatttgtttgtagagtggttttgttgtcgatgattatggtatgggtttttttagggttttgttttatttatgttgattttattttattataagtattacggtgggtttttgttttatatatgaggaaattgaggtatggttattcggataaaagagaaagtagagttagttttgatttggattagggttcgttattggttttcgtttcgtttagggggtattaggaatcggggtttggttagggttagtaagtatttttagtagaggttttgatattaattatgttgggtttggcgggttagttggtttgttcggttggacgtttttgttacggttattttatggatattaatatgggtgtgtttttataaaattttatttataagagtagggtgttttggaagtagtttacggttgtagtttatagattttgtttgttttgaagtagatgatgtttgagtgttttcgaggtgggttgttggtgtttgttttgttgttgtgagtgttaatggtgtttattttgttgttgtgagtgttagtggtgtttaggacggttttgtagggatggtatcgagtttattttttgagtcgtgtttgtcggagtttgagtgggggtattgtttgttatttttttatttttttgtttatgtgttttttattttttttttattattttggggatttagtaagagtgtagtttgttaggtttttttattgtagttagggtttgggaatttgtatttagtgatgcgtgtgtttttgatttttgagtaggtgtttttagggtttttgtgaaatattattgataagggttgtggtagggagagaatatttaattttataggattttgggagttatagttttaaatatttattaaatagtttttgtttttaaaaaatagtttttatgtgagggtttattttagtgatgttgaaaattgtgaaagaaaagagtattttagaggatgagtatcgggggttttaaaaatgaattatgggtaatttagtgggtggtaggtattataggtgtgcggaggagacgtagtcgtttattgtgaagttgggaagtaggtggggaatagtttgtgtagttcggtatttagcgaagggagaaatatatttgggggagagtttgggggtattcgttattatgtatggtgatgtttttgaattgtttgaagtgaagatgataatggataagaattagaaaagtgagagttaaataatcgtttttagaggatagtatatatggagttagtatcggtgtgtgtgtatttgtgtgtgtatttgtgtgtgtatatcggtgtgtgtgcgtattggtgtgtgtgtgtttatttatgtgtgtgtatatttgtgtgtgcgtatatcggtgtgtgtatatttttgtgtattcgtgtgtattgatgtgtgcgtgtattggtatgtgcgtgtatttatgtgtatatttgtgtgtgtatttgtgtgtgtatatttttatgtgcgtgtgtatcggtgtgtttgcgtatttttgtgtgattatttgtgtgtgtattcgtgtgtgtgtatatttttgtgtgtgtgtattggcgtgtgtgtgtgtgtatttatgtgtgtttatgtttttattgtttttagtaatgaaggtagagtagtagtttgaggttagtagattacgtgtaggtgggtttggttgaagggaggtaaggaggtttagttgggttgtttgtttttaggataattttggtatttttttgtttttttgtttagcgtttgtttgtttttgttttttattttttttattttatttttgtgtttttattagtttttttgaattttggagtttttttgagtttttttttatgtttttagagttttttttttagtttttttttgtttttgtttttttttgtttttgtttttgtttttttttttattttttttttttttttatgtttttttttattttattaattgtagaagaatatatgggatttggtgttaggatagttcgacgtagttttggttttttttttataggttagggttgttgggttagggaaatggggttcgtaggaggatttttgggcgtggttttgagcgtatgagtttttgtagttattcgatgtattgggagattttggtgtatattttaaagtggtttacggttgcgtagttttggttttagttgacgatgttcgttaggtattacgtgtttcggtagtgggtggtatgtgggtttttattgttttttttgtaggagtttttgttgttattcgagtagtcggtatagaatatgtatttcgtgatatttggggagttttttatttttcgtgattgttgtaggtagttttgggttattagtcggggtacgttgaggattatgagttttagggtcgtggcgttacggtttagtagttggttttagtcgttgattaatgagaagcgtacgaaggttagcgtttttttagagaacgttcgttcgggtaggtagaggggtattatatggttagtgaggattacgggttggtgtaggcggagtagcgcgatgtcgtggttggtggtgttcgggacgtacgtgttggggatgatgatttgcgttattcgtcggttttgtttattttcgtcgtgttcgttgaggtcgtgttcgtttggaaggaagaagttttttttaggttttttttattatttgttattttattttttggtgtatggggatgggttgtggttatttttaggtttgtaggggttgtagtttttttttggggtaaggggatttgtatttaattttaaggtggggttagtttgttttaggtggtagtttgtggttcgtgtggggataagtgaattggggtgaatttggggtttgggtgttgaggtggggaagggatgttgtgttttggtagttgggaggatagggcgtgtttcgattttttatagtttttttcggtttagtggtttttttgggagtgttcgttttatttataaatttagtgagtagaatttttgttagtcggtggttttatgaggttttgggtgtcgtatttttttttgggtttttggttaagtgaggtaggatgggtagaagtttttagttttttatcgttttatttgggtatgggaaagtggttgagagtacggtggttatagtagtcgtgtttagtatggttgttttttttttggggatgtttgtttgtttgtggaagtgatagtacgaagtttagagttatagt

SEQ ID NO: 649 - DNA, 6015 bp, Artificial Sequence
  chemically treated genomic DNA (Homo sapiens)
ttttgttaaggtatgggaaatttttacgtaaatttggaatttttttttttaattgttgtttatgtttgttattttatttgattgtgagtagtttttagggaggtttttttatttatagtgtatattatgggtatttagtaaacggttaatgatgatgatatatttttattataaaaataaaggtaatggagattgaagaggtgaaatgattagtttaaggttattggtaaggatagagttggaataaagtttagtatttttatgttaggtaatgtttttttattgatattcggttgttttttattaggagaaggatgaaagatgatagagtatttataattattatttgttatttttattattaattgatattggtgttttttcgttcggagcgattttgttttttttttattttaggaaatattcggtaacgtttagagatatttttggttgttttaatgggagagggtatgtaattggttgtagtgggtagaggttagggatgtagttaaatattttgtagtgtgtgggatagtttttcgtaagagagagttattttgttttaatattaataatgttagggttgggaaagtttgattttatgttagtattaaaattttgtaatgaaaagaggatatttcggtcgggcgcggtggtttacgtttggaattttagtattttgggaggttgaggtgggcggatcgcgagattaggagatcgagattattttggttaatacggtgaaatttcgtttttatttaaaatataaaaaaaaaattagtcgggcgtggtggtaggtatttgtagttttagttattcgggaggttgaggtaggagaatggcgtgaattcgggaggtggagtttgtagtgagtcgagattatattattgtattttagtttgggcgatagagcgagatttcgttttaaaaaaaaaaaaaaaagaaaagaaaaagaaaaataaaagaggatattttaggaatagtaagaaaggggttgtaggatatggcgggttgtgttttttttttttttttattttttattttttgatatattttatttgtatatatttgtggggtatatgtgaaattgtgttatgtgtatagaatgtgtaatgattaagttaggatgttggtatatttattatttaattatttttatgtgttgagtatattttaagtttttttttagttatttagaaaattataatattttgttgtttattgtagttattttatttttttgttaaatattagaaagtattttttttatttaattttgtggttgtatttttttattaattttttttcgtttttattattttttttatatatatatattttttttagtttttcgtaattattatatattttttacggttatgaaattatttttcgtgggattacgtaatgtttgtttttttgtgtttggtttattttatttaatataatgatttttagttttatttatattgttgtaaatggaatgattttttttttttttattgtgtttatttttaaagtaagttttgaaagataagagaaggagttttgagagttgattatggttatgtttgagaaggggttttagttaattaatgtcgttgtggatatttttgttttaagtagaaggttttaggttataatatgtttaaatgtttaatatattttttatttatgatttattggaaagaaaataaatttcgggatttttaaaattattaagttatatggaaaagtaaagttgggaattgtattgggtaaattttttttttattttatttttaaataaaatagtttttttaagttataaaaaattttttttaagttttaaaaaggttttaaaaagttatattttttataatttgtttatgaggaaattttttgtggaaaaaggataggtagaagttagagttatttttttgttgatatgagataggtgcgtatttgattgtttcgtttgttatattgttttattgggttatattaaggtatgagtgattatttttgtaaattgcgtatttggtgaaaggttaattggaaattcgaaaaaatgtttttgtttgttttttatttatttatgatttggaagtttttttttttttttcgagttgttttattttttaggattaaattaatgtatattttgtatagattgattgatgttttatatttttttaaaatgtataaaattagtttgggttttgattattttggatatatgttattaggattttatgaggttgtgttataggtatatttttatttttggtaaaataaattttttaaattgattgggatttgttttagatattttttgatttagaattttaatttttgatttgtatttgggtttttgtagattaatttttatattttttttaagattttgtttagttattttttatttttattagttttcgaatatttaaaaatattttattttattgaaaaaaaattgaaaaaagtagttgatattagaattttaaattgtaatgtattagttgaaaataattttttaaggatatttatggttagtttaaaagaaaggtttatttaattttaaagagtttttatgtagttaagatttttattttaggttgggtacggtggtttatgtttgtaattttagtatttgggaggttaaggtaggtggatcgtttgtgtttaggtattttagattagtttggggaatatagtaaaattttgtttttataaaaaatataataattagttatgcggagtgatatgcggttgtatttttagttatttaggaggttgaggtgggaggattatttggtggttgcgttgagtggagattatattattgtattttcgtttgggcgataggagtgagattttgtttgaaaaaaaattattttatttttatttgaatagataaaatttttttgaattttgatattattttaaagattttaaagattttattaattagttaaattaaatttaggaaaatattatttggttttttagtgaagtattttttttatttagagtttttttgttttttttaatagggttggagagttatttttattttttttttattggggtttaagaagagagatgaggttttatggagtaaataatataaggatataaggattttatataattttacgtatttattttttatgaaagttatttttggtacgaatttgttattttatgtttgagttttataaaaggtaatgtattataaatatgtattttttgggtagttggaatgtattttaaacgggaaatttaagaaaatagttaggaattttttatgttaggataagttaaatgtattggtaatagattaaataaaaatatttgagtaaatgttttttagatagaatattattttagttttttagtattttataaaaagatttgtttttagtttatatttttttaattttttgttattttttttcggttttttaaatatgttttttaaattatgattttatgtataaatataagatcgtattttgtttttttatgaaaaattgagagttttttttgaattataaacgtatttttttttaaaatgtatttaaattaggtatattgaaaattgttttgtgttcgtgttgtgaggttttttaggggatcgtatagaaatttttagtattagttagtgttttgtgttttaaatgaggaaacggaagttaaggatttgtaggtggttggggattgtgtataggttggtttcgtttaagttatatgattcgttagttagtgagtaggtttgggtagtagttggtatggatgaatatgttttttataggtttttagattttttttaaggttaaagggaaggtttttatggaaatataattatgtgaaatattttagaatttttttataaatttttttgtttataaacgttaggttttattattgtttagtgttttattttttattgtttagtgggaagattttttttaggataaaattatttttttttttagggatgtgacgtgttgtgttttcgttgatagttatgtagttgttagatatgttattttttagttttttattcgggtttgtgttttaggatttaaagaaagttaaaagaagtcgggcgtggtggtttatgtttgttattttagtattttgggaggttgaggttggcggattattggagattaggagtttgagattagtttgattagtatggtgaaattttgtttttattaaaaatataaaaaaagaaaagaaaaaagaaaaaaaaataagttgggcgtggtggcgcgggtttgtagttttagttatttcggaggcggaggtaggataattatttgaatttggaaggcggaggttgtagtgagttgagatcgcgttattgtattttagtttgtgcgacgagagattttgttttaaaagaaagaaagaaagagagaaagaaagaaagaaagaaaagaaagaaagaaagaagaaagaaagaaaagaaagaaagtaagaagtaagtaagttgaaatagtttatttttttgttttaaaaaatagatttttagtgtttataagtaagaataaaaaaaaaaaagtttggttttaggaggaattttatttgtttaggtttttgagaggtagcgttatttgaagggaaattgattgggtaagagttaggtttttaggagttgtttgtattttgttttttattcgttcgtttttttttagtagttaaagttttttttttttattatattgtaaattaattaatttattagattttttatgttttttttttagattttgagatttaaggttagttagaattaatggttaatagttgataggtgaaagtgtggttaaatgtagttttggttagtaggtatataggtaaaatgaagttttatatttgtttttgtgtatgttatttgtttgaatacgaaataaaattaaaaaaataaatttagtgtattgagaaagtaagtaatttttttaaggtatatttttgatatattaagattttaacgatttttataaatatgttgtattgagagagaatgttatataatattgagaattagtataagtaaatattaaagtgaagtgattattttttatataagtttatttagaggaggatgaagattattttggaggaagaaaagtatttttattaagaattgtagtaagtaagttaataaggtttttttaggtatagttttagaatttattatttaatattttttttaagtaaatacgttttgaaatgttttttttaaattataggaatttaaaaatattttataatagagaatgattgatttttaaaatgtgtttgatttagttttgtagagatgtttcgttaatatttataattaatttgagaggaaatgtggaataatagaagagtaatagtgtttatttagtaataagcgttttacgagttaaaaagatatttaaatgtagtattgaaaaattagaagttttgatttgttttattgatgatttcgttttttttagagtagtttgtttaatgtttattggagataaatagatttataggtgattaagataatcgattaatgtattagttatagatttttttaaatagaaaattttttaagtaggaaattatttatagttttttgaaagatatagggagaggttttaaggaaagaaagaaaggaaaaaaattgggaaaggaaataaagatgaaaaattggggtggggagagcggttagatggtggttatgagaaggatttgaatatagagagcggcggggtcggcggggaaggagggaggaggggagagcgttgtttttttgtgggtttcggtttttgtagagttgtaagagttgaatgttatatatagttatattaaggaatgttttaggattgggaaagataaaatttaattttataatgagaatattgtgaatgttattgaattaattatttttttttttttttattttttgtaagttttagtgttagtaaattaattataaatttatattttatgttttaaaagtatgtattttttttttattgtagg

SEQ ID NO: 650 - DNA, 6015 bp, Artificial Sequence
  chemically treated genomic DNA (Homo sapiens)
tttataatgagaaaaaggtgtatgtttttagaatataaaatgtaaatttataattagtttattgatattaagatttataagaaatagggagagaggggagtagttaatttaatagtatttatagtgtttttattataaggttgaattttattttttttaattttggagtattttttagtgtgattgtgtgtggtatttaatttttatagttttgtagaagtcggaatttatagggaagtagcgtttttttttttttttttttttttcgtcggtttcgtcgttttttgtgtttagattttttttatggttattatttgatcgttttttttattttaattttttatttttgtttttttttttaattttttttttttttttttttttttgaggtttttttttatattttttaaagagttatgaatgattttttatttagaaaattttttatttaaaaaagtttgtggttgatatattaatcgattgttttggttatttataaatttatttatttttagtaagtattaaatagattgttttaggaaaaacggagttattagtgagataaattaagatttttgattttttagtattgtatttggatgtttttttaattcgtaaaacgtttgttattgagtagatattgttatttttttgttgttttatatttttttttagattagttatggatattagcggaatatttttataaagttaaattagatatattttaaaaattaattattttttattgtaaagtgtttttaaatttttatgatttaaaaaaagtattttaaggcgtatttgtttgagaggaatgttaaatagtaagttttgaaattgtatttgaaaagattttgttggtttatttgttgtaatttttaataagggtgtttttttttttttaaaatggtttttatttttttttgaatgagtttgtgtaggaaatggttattttattttaatatttatttgtattagtttttaatgttatgtaatatttttttttagtatagtatatttgtgaaagtcgttaaaattttagtatgttagaaatatattttgagagaattgtttgtttttttaatatattgaatttatttttttaattttatttcgtatttaaataagtgatatatatagggatagatgtagaattttattttgtttgtgtgtttgttagttaaagttgtatttaattatatttttatttgttagttgttaattattaattttagttgattttgaattttaaagtttaaaaagaaaatatggaaagtttaatggattaattgatttgtaatataatggagggaggagattttggttgttgggggagagcggacggatgggaagtaaagtatagatagtttttaagagtttggtttttgtttagttagtttttttttaggtgacgttgttttttagaggtttaagtagataggattttttttaaggttaagtttttttttttttatttttatttgtgaatattaaaagtttattttttaaaatagaaaaataagttattttagtttgtttgttttttattttttttttttttttttttttttttttttttttttttttttttttttttttttttttttttttttttttttttttttgagatagagtttttcgtcgtataggttggagtgtaatgacgcgattttagtttattgtaattttcgttttttaggtttaagtgattgttttgttttcgttttcggagtagttgggattataggttcgcgttattacgtttagtttatttttttttttttttttttttttttttttgtatttttagtagagatagggttttattatgttggttagattggttttaaatttttgatttttagtgattcgttagttttagttttttaaaatgttgggatgataggtatgagttattacgttcggttttttttagttttttttaggttttgggatatagattcgaatggagagttaggaagtgatatgtttagtagttgtatgattgttaacgaaagtatagtacgttatatttttgaaggaaagggtggttttgttttggagggagtttttttattggatagtgggaagtgggatattggatagtggtaggatttggcgtttataggtaggaaagtttgtgaaaaaattttggggtgttttatataattatatttttatgaaggttttttttttggttttgaagaaggtttgaaagtttatggagggtatgtttatttatgttaattgttatttagatttatttattggttgacgagttatgtgatttgagcggaattagtttgtgtatagtttttagttatttgtaggtttttggttttcgtttttttatttagaatataaggtattaattagtgttgagggtttttgtgcggttttttaaaaaattttataatacgaatataaaatagtttttaatatgtttgatttgaatatattttggagaaagatacgtttatggtttagagaaggtttttaattttttatagaaaagtaaaatacgattttgtgtttatatatggaattataatttaaaaaatatatttggaagatcggggagaaatgatagggaattaagagaatgtgaattgagaatagatttttttgtaaagtgttgaagaattagggtgatgttttatttggaaggtatttatttagatatttttatttgatttattgttagtgtatttgatttattttggtataaagagtttttagttgtttttttgagtttttcgtttaaagtatattttagttatttaaaaagtgtatatttatgatgtattgttttttatgaggtttaaatatagaatggtaaattcgtgttaagaatggtttttatggaaaatggatacgtgagattatatgaggtttttatatttttgtattgtttattttatggaattttatttttttttttaagttttaataaaaagaagataaggataattttttaattttattgagagaaatagaaaggttttaaataagagaaatgttttattggaaaattaaataatatttttttaagtttgatttagttagttagtgaaatttttaaggtttttgaaatagtattaggatttaaaaaaattttgtttatttaaataaaagtagaataatttttttttagataaggttttatttttgtcgtttagacgagagtatagtggtgtgatttttatttaacgtagttattaggtgatttttttattttagttttttgaatagttaggaatatagtcgtatgttatttcgtatggttaattgttgtattttttgtagagatagggttttgttgtgttttttaagttggtttggaatgtttgggtataagcgatttatttgttttggttttttaagtgttggaattataggtatgagttatcgtgtttagtttagaataaaagttttgattatatagaaattttttgagattaaatagattttttttttaaattgattatagatatttttaaaaaattatttttaattaatgtattgtagtttaaaattttgatattaattattttttttaatttttttttaatgaaatgaaatgtttttgaatattcgaagattgatgaaaatgaggaataattagataaagttttaggaagaatatagaagttagtttgtagagatttaagtataagttagaagttaggattttaaattaaaaagtatttgagataggttttaattaatttagaaagtttattttgttaaggataaggatgtatttatgatatagttttatgaggttttgatgatatgtgtttaaggtggttagggtttaagttgattttgtatattttagggagatataagatattaattaatttatgtaagatgtatattggtttggttttaaaaggtgggataattcgaagaagggaagggggtttttaggttataggtagataagagataaatagaagtattttttcgagtttttaattagttttttattaaatacgtaatttataagaatagttatttatgttttagtgtggtttagtgaaataatatggtaaacgaggtaattagatacgtatttgttttatgttagtagaggggtgattttgatttttgtttgttttttttttataaggaatttttttatgggtaaattgtgaggaatgtagttttttaaaatttttttaaagtttaaaaaaggttttttatagtttaagaaagttattttatttaggaatagaatgggaggaaggtttgtttaatgtagtttttagttttatttttttatgtggtttagtgattttgggggtttcgaggtttgttttttttttaatggattataggtgggagatgtattggatatttggatatattgtgatttaaagttttttgtttgggataggaatgtttataacggtattagttgattgagatttttttttaggtatggttataattaatttttagagtttttttttttgttttttagaatttgttttgaaaatggatataataaaaaagaaggaaattattttatttgtagtaatgtggatggaattggaggttattatgttaagtaaagtaagttaagtatagaaagataaatattgcgtgattttacgaaagatgattttatggtcgtagagagtatatggtggttacgagaggttgggaagggtgtgtgtgtgtggggggggtggtgaggacgaagagaggttggtgaaggggtataattatagagttagatagaaggaatgttttttaatgtttgatagaagagtagggtgattgtagtgaataataaggtattatagttttttaaatagttagaaaaggatttgaaatgtatttaatatatagaaatggttgggtgatgggtatgttaatattttgatttgattattatatattttatgtatataatataattttatatgtgttttataaatatgtataaatagaatgtattaaaaagtaaaaaataaaggaagagaaagggtatagttcgttatgttttataattttttttttgttgtttttgaaatgtttttttttgtttttttttttttttttttttttttttttttttgagacggagtttcgttttgtcgtttaggttggagtgtagtggtgtgatttcggtttattgtaagttttatttttcgggtttacgttatttttttgttttaatttttcgagtagttgggattgtaggtgtttgttattacgttcggttaattttttttttgtattttaagtagagacggggttttatcgtgttagttaggatagtttcgattttttgatttcgcgattcgtttattttagttttttaaagtgttgggattttaggcgtgagttatcgcgttcggtcgaaatgttttttttttattataaggttttaatgttgatatgagattaggtttttttaattttggtattattgatattggggtaggataatttttttttgcgaggggttgttttatatattgtaggatgtttagttgtatttttggtttttatttattatagttagttgtatatttttttttattaggataattaaaagtgtttttagacgttgtcgaatgttttttgaggtgaagggaggataaaatcgtttcgggcggagaaatattagtgttagttgataatgaaaataataaatggtggttataaatgttttgttattttttattttttttttagtgagaagtaatcggatattagtgagaggatattgtttggtataggaatgttgagttttgttttagttttgtttttgttagtgattttgagttaattattttatttttttagtttttattgtttttatttttgtaataaaggtgtattattattattagtcgtttattggatgtttatgatatgtattatgaatgaaagagtttttttagaagttgtttatagttaagtaaagtgatagatataagtaataattgaaaggaaaagttttaagtttacgtgggggttttttatgttttggtaggg

SEQ ID NO: 651 - DNA, 5474 bp, Artificial Sequence
  chemically treated genomic DNA (Homo sapiens)
agtggaatgaatagaattaggtggttaagtaggttgggagtatgaggaagagagagtttttggttgtaagtaatagaaaatgattttagttgttttaataaaagggaatttattttgtgagaaggttttcgggagtttacggtattagttcgaaggaataggtttggaaatgtgtaggaattaagagttattggaagattaggaagtaggaagtatagtgattttttttgagcggatacggaagttgtttatttaatatttatgttatcgtttttttttgtttgtagagttttagttttgttttagtggttattttattttatatgtttttgatttagatttagggttaataggtttaggttagtgatggggatttttttttttttgttaaatatggtttagggatgttatgtgagtttgttttagttaagaaagtatgaggagaggtttgtttgagatttgagggagggttttttatttttaagaaggagttagtggaagggaaggtgttttttttttgtttgaatataattgagttgaagtgtgatttttggagttgtgatagttattttgtgattatgagggtaggtagtttgaaggtttgtatatagaagataaataaaaaaagaaagaatttgggtttttgatgatattgttgaattattgaaagtattgtttttggagttttgttgttttagatatttggtgatatgggatgatgaattcgaattgttttattgtatatgtttggtttttggaaggtattttgatttaatgttatgtagtcgggatgatttggttagggtataggtggtgtaatgttagatttttagttttttttgttatttttgtgtggtttgattaggatttagagttttgggagaaaatattattggttgagtttaggtttttttggttatattatggtagggagaggttggtttggtttattaggtttttatagtggagatggtttttagaaagtatttttttagtcgggtgtggtggtttacgtttgtaattttagtatttcgggaggtcgaggtgggtagattatgaggttaggagttcgagattaatttggttaatatggtgaagttttggtttttattaaggagataaaaaattagtcgggtatggtggcgtgggtttgtaatggtagttatttgggaggttgaggtaggagaattatttgaatttgggaggtggaggttgtagtgagtcgagatcgtattatggtagtttagtttgggcgatagcgcgagattttattttaaataaataattaaataaaaataataataaagtatttttttattattatagttggggaggggtgattataaaatgaaattgggagaggaagaggaagggagatggatgttgaatatttaaatgattattaatgtttatttgatattttattttatattttttataaggtattttatgtttattatattttttatttgatacgttgtatttagggtttttgtgtagttgtattatttattttgtttgtaaatttttatttgtggcgaagatttgtttaaaaggttttttttatgtagaggaatagttgttttttttttaagaggaaggagttaatgtgggagtggttttagggttagggtttatatttaggagtaattaagaattgatagagttaggtatggtggtatgtatttgtaattttagttatttaggaggatgaagcgagaggattatttgcgtttagaagttttaggttagtttgggtaatttaataagatcgagtttttttgaaataataaaaaaggtgataaaggtagtttcgttttaatgattcgttaatatatttaatagttttatttttattatggagttaatagttgttacgttaatgattttgaaattagttatttttgaaattagtggttggaaaggtgtttttttttttttgtttttttttttttgtgtttttgttttaagaagttttttatagtttgttttttttttagtagaattaataaattgttatatttagtttttattttttataaattattttgtataatttaggattttgtataattgaaagtgatagaagtttatttaaattggttttattggtttatataattgagaagtttatttttttttttttggagatatagttttagtttgttttttagattggagtgtagtggtataattacggtttatagtattttggatttttgggtttaagtaatttttttgttttagatttataagtagtcggaattataggtacgcgttattatgtttggttaatgttaaatttttttggagagatgggattttattatgttgtttatattagtttggaatttttgggtttaagtgatttttaagtgatttttagttttttagagtgttgggattataggcgtgagttattgtgtttagttataattgattaagttttaaggatatttttagttttaggatgtaggtttttaaagttatgagaaattaatttattagtattagtttttaaatgtcgtgtaataaattattttaatttgtggtttaaagtaataatatttaatgatgatttattatagtttttgatggttagttttgttttgaggttttttataagattgtaagttaaatgttagcgagggttgtagtatttatttttaaggtagtttatttatgtggttgtttaattggtattggttgttagtagggtgtttttttttttttttatatgggtttttttgtagggttgtatgtgtgtttttataatatagtggttggttttttttagagtgagtaatttaagagatcgaggtagaaattgtaatgttttttatgatttgggtttggaagtttaatatttttatttttgttatatttttttttttttgagatagtttttgtcgtttaggttggagtgtaatggtataatttttgtttattataatttttattttttgggtttaagcgatttttttgttttagttttacgggtagttgggattataggtatacgttattacgttcggttaatttttgtattttttatagagatggggtttggttaatacgttggttaggtcggttttgaatttttgatttagagtgatttgtttgttttggtattttaaagtgttgggattataggtgtgagttattatatttagttatttttgttatattttgatggatatatagaatagttttaatttaatgtgggaagatattatataagggtatgaattttaggtggtgaggattaatgggggttgtttttgaggttgtttattatagtatttttttattttttttgttttgtttgttttgttttttttatgtgtaggttttatttttaaataggttttttttagagagtgataaaggtgattattaatgtgtttagatttatatgttttgtgtttagtaattttagtgtaatttttttgtttttttaaaagttttggtaaaagttttaagttagtattttaattggtttaaattgtgtatatgtttatttttgaattaattattgtggattagagatgttatgttttgattgattagatttaggttatatttttagttttagttttgagggtagagttggtagtattagagtttatggaagaagtaagagaggagtcgttgttaaaggaaaaattaaagtgttattatcgaattaggatagatgttgggtagtatatgtgtatttcgttttttttttatgttttagttgtatattttagtgttttttggtttagtattttttttattaaattatttgtttttttgttttattttttgtggttggtagaatgttaagatggttttaagatttttatttttggtgtttgtatattttttagttattttgttaaatatgaatgtagatgtttttgtgaaagaattttgtatatgtaatttaagttttaaattgtttgattttaaaataaggagaatggtagggttaggtatggtggtttatatttgtaattttagtattttgggaggttaaggcgggtagattacgaggttaggagatcgagattattttggttaatatagtgaaattttttttttattaaaaatataaaaaattagttgggcgtggtggcgggtgtttgtatttttagttatttaggaggttgaggtaggagaatggcgtgaattcgggaggcgtagtttgtagtgagttaagatcgtgttattgtattttagtttgggtgatagagttagattttgttttaaaaaaaaaaaaaaaaggagaatggttttggtgggtttgatttagttaggtgagtttttaaaaggcgatatatggttcggtgtagtggtttaggtttgtaattttagtattttgggaggtcgaggcgggtggattacgaggttaggagatcgagattattttggttaatatggtgaaatttcgtttttattaaaaagataaaaaattagttgggcgtggtggtgggtttttgtagttttagttattcgggaggttgaggtaggagaatggcgtgaattcgggaggcggagtttgtagtgagcggagattgcgttattgtattttagtttgggcgatagagcgagatttcgttttaaaaaaaaaaaaaaaaaaaaaaaaaaaagaaaattaaaagtgggtattgttgtaagatgttgagtttatggtagtttgttatatgataatagaaaatgaatatattttatagtggattttaagatttttatgatttttgatttttttaattttttgatttttataggatttagagtataagaatgtttttttttttgtttttagttttattatttagaaaagagaggaggagtttagttttttattttatttttatttataaatttttaatttttcggtttttaaggggtgattaaggaagttgttttatttggttttttataaatagtttgtgttttattaggtttaggagggtagtttgattaatttttatttttaagatttttggttagttttattgatttggatttttggataggtagttggattaacggacggacgttatgagggttttgttgtttttggggtttttgttggtgagtttggagttaatattttcggtgagtgttgtgggaattaggattgttttaggattgttttggggggtcgttattatagttatgagttatggtttttgtttatgatttgtgggtttaggtgattaggaggtttatgtggaaaggtgaggttagttcggaaggtttaggtagaggagatagataattagattgggtggatataagggtatagtttgtatttttgggggagatgggttttaagaagataacggggggaggtagaaagggtttgggttttgggaagaaatttttgtatttttgggttgtgagaggaagttgtagattagtaatagatcggtggtaggttatgatttatagttagttttttgttttttttttttttttgtaga

SEQ ID NO: 652 - DNA, 5474 bp, Artificial Sequence
  chemically treated genomic DNA (Homo sapiens)
tttataagggagagaagaaggtagggaattgattataagttatagtttgttatcgatttgttgttagtttgtagtttttttttatagtttagaaatgtagagatttttttttaagatttaaattttttttattttttttcgttgtttttttaaggtttattttttttagaaatgtaggttgtgtttttgtatttatttagtttggttgtttgttttttttgtttgggtttttcgggttggttttatttttttatataggttttttagttatttggatttataggttatgagtagaggttatggtttatggttgtgatagcgattttttagaataattttgggataattttggtttttatagtatttatcgaaagtgttgattttaagtttattagtaggaattttaggagtagtagagtttttatggcgttcgttcgttggtttagttgtttatttaggagtttagattaataggattggttaaaggttttggaaatagagattggttaagttgtttttttgagtttggtggggtataggttgtttgtggaaagttaagtggagtaatttttttggttattttttgagggtcggaaagttgggagtttgtgggtgggggtgaaatgaagagttgggtttttttttttttttttagatagtgggattggaagtagaagaagggatatttttatgttttgggttttgtggagattaggaggttaaggagattaaagattatggggattttggagtttattgtgaagtgtgtttattttttattgttatgtaataaattattataaatttagtattttataataatatttatttttaatttttttttttttttttttttttttttttttttgagacggagtttcgttttgtcgtttaggttggagtgtagtggcgtaattttcgtttattgtaagtttcgtttttcgggtttacgttatttttttgttttagtttttcgagtagttgggattataggagtttattattacgtttagttaattttttgtttttttagtagagacggggttttattatgttagttaggatggtttcgattttttgatttcgtgatttattcgtttcggttttttaaagtgttgggattataggtttgagttattgtatcgggttatgtgtcgttttttaagaatttatttgattaggttaggtttattaaagttattttttttttttttttttttttgagatagagtttggttttgttatttaggttggagtgtagtggtacgattttggtttattgtaagttacgtttttcgggtttacgttatttttttgttttagttttttgggtagttgggaatataggtattcgttattacgtttagttaattttttgtatttttagtagagagggggttttattgtattagttaggatggtttcgattttttgatttcgtgatttgttcgttttggttttttaaagtgttgggattataggtatgagttattatgtttggttttgttattttttttattttaaggttaaataatttgggatttaaattatatgtgtaaaatttttttatagaagtatttatatttatgtttgatagaataattgggaggtgtgtaaatattaggggtagagattttggggttattttagtattttattaattataggaagtgaggtaagaaagtaaatgatttaatgagaaaagtgttaaattaaggggtattaagatgtgtagttggaatatgagaagaagacggggtgtatatgtgttgtttagtatttgttttggttcggtaatgatattttgattttttttttagtaacgattttttttttattttttttatgggttttagtgttgttaattttatttttagagttagggttagagatgtggtttaggtttggttaattagagtatgatatttttaatttatagtgattggtttagagataagtatatatataatttaggttaattaaagtgttagtttgggatttttgttagaatttttgggaaagtaaaaaagttgtattggggttattaagtatagagtatgtgggtttgaatatattgatgattatttttgttattttttagggagggtttgtttgagaatgaagtttatatataggaaaagtaaagtaaatagggtaggaaggatggaaagatgttgtggtagatagttttaaagatagtttttattgatttttattatttaggatttatgtttttgtatggtgtttttttatattgagttagggttgttttgtgtgtttattagaatatgatagaagtggttgggtgtggtggtttatatttgtaattttagtattttgggatgttaaggtaggtagattattttaggttaggagtttaagatcggtttggttaacgtgttggttaaattttatttttatgaaaaatataaaaattagtcgggcgtagtggcgtgtgtttgtaattttagttattcgtgaggttgaggtaggagaatcgtttgaatttaggaagtggaggttgtagtgagtagagattgtgttattgtattttagtttgggcgatagggattgttttaaaaaaaaaaaaatatggtagaagtgagggtgttggatttttaagtttaggttataaaagatattgtagtttttgtttcggttttttaggttgtttattttggaggaagttagttattgtgttgtgaggatatatatgtagttttgtagagaagtttatgtagggagaaaggaaagtattttgttgatagttagtgttaattggatagttatatgaataagttgttttggaagtggatattgtagttttcgttgatatttggtttgtaattttatgaaagattttaaggtaaaattgattattagaaattgtgataaattattattaaatgttgttgttttaagttataagttagggtgatttgttatacgatatttgagaattagtattgatggattgattttttatgattttgagagtttatattttaaaattagaagtatttttaagatttggttagttatggttaggtatagtggtttacgtttgtaattttaatattttgggaggttggggattatttgaggattatttgagtttaggagttttagattgatgtaggtaatatagtgagattttatttttttaaaaaaatttaatattagttaggtatggtggcgcgtgtttgtagtttcggttatttgtgagtttgaggtaggaggattgtttgagtttagaggtttaaaatgttgtgagtcgtgattgtgttattgtattttagtttgggaagtagattgagattgtatttttaaaaaaaaaaaaatagattttttagttatatgagttaataaaattaatttgagtggatttttgttatttttagttatataaagttttaagttatataaagtaatttatgggaaatgaagattgagtgtagtaatttattaattttgttggaagagaggtaggttgtggaagattttttggaatagaaatatagaaagaggagggtaggagaggaggggtatttttttaattattggttttaaaggtaattggttttaaagttattgacgtgatagttgttaattttatgatgaaagtgaaattattagatatattgacgagttattaaagcgaaattatttttgttattttttttgttgttttaaagagattcggttttattaagttgtttaggttagtttggaatttttgggcgtaagtgattttttcgttttatttttttgaatagttgggattataggtgtatgttattatgtttggttttgttagtttttgattgtttttgagtatagattttggttttaaggttatttttatattggttttttttttttggggagaaggtagttgtttttttatatggaaggggttttttgaataggttttcgttataagtaggggtttgtaggtagagtgagtaatataattgtatagaagttttgaatgtagcgtgttaaatggggaatgtggtgagtataaggtgttttgtagggagtgtgagatgaggtgttaggtggatattaatggttatttggatgtttaatatttattttttttttttttttttttttagttttattttgtgattatttttttttagttgtggtggtgaaagggtattttattattatttttatttagttatttatttgagatggagtttcgcgttgtcgtttaaattggattgttatggtgcgatttcggtttattataatttttattttttaggtttaagtgatttttttgttttagttttttaagtagttgttattataggtttacgttattatgttcggttaattttttgtttttttagtagagattagggttttattatgttggttaggttggtttcgaatttttgattttatgatttgtttatttcggtttttcgaagtgttggaattataggcgtgagttattatattcggttgaaagggtattttttagagattatttttattatggaagtttaatggattagattaatttttttttattatagtatagttagagggatttaaatttagttaatagtgtttttttttagggttttgaattttgattaagttatataaggatggtaggaaaagttggaggtttggtattgtattatttgtgttttgattaaattatttcggttatatggtattaagttaggatgttttttaaaaattaagtatatgtagtagggtaattcgaatttattattttatgttattagatgtttggagtagtaggattttaggaatagtgtttttagtggtttaataatgttattaagaatttaagttttttttttttttgtttgttttttgtgtgtagatttttaggttgtttgtttttatggttataagatggttgttatagttttaggaattatattttaatttaattatgtttaagtaaagaagaggtatttttttttttattagtttttttttaggaatgaggaatttttttttaaattttaagtagatttttttttatgtttttttagttagaataggtttatatgatatttttaagttatgtttggtaaggaaaaggggatttttattattggtttaaatttattaattttggatttgggttagaggtatgtgaggtaaagtggttattggaatagaattgggattttgtaaatagggaagagcggtggtatggatattaggtggataattttcgtgttcgtttaagggaaattattgtattttttgttttttagttttttagtggtttttaatttttgtatatttttaagtttattttttcgagttgatgtcgtgaattttcgaagatttttttataaagtaaatttttttttgttgaagtagttagagttattttttgttgtttgtaattaagagtttttttttttttatgtttttagtttatttagttatttagttttgtttattttatt

SEQ ID NO: 653 - DNA, 6436 bp, Artificial Sequence
  chemically treated genomic DNA (Homo sapiens)
aatatttgaagtaggtagattatttgatggtttatatgaaattgttttcgtattatttagttattaaaatgtttattacgttgatgttatatttgtttgaaaatattattaaatattataaatattatgggaggatggttaatgatttatattatttggtattaggtaagttaaaatagagaaaatgaaaatcggaaattaatattaagtggttttaatatgaatgatgttgtaaagttaagattttatttttaagaaatatttttagtaattttggttaggtagatttttaatatgtttattatttttggttaagtagattttttatttttagaaatttatagatgtttgttttaaaattgataaaggggttttggtaggagtggcgtggaataaatgaagtagtgggttattttttttaaaaagtttttaagaggtcgggtacggtggtttacgtttgtaattttagtattttgggaggttaaggcgggtagattatttgaggtcgggttttaggaatagggcgttaaatttggttataaattggtttaaaaattggttataaataaaatttttgtagtattgtgatatgttcgtgatggttatgacgtttacgttggaaggttgtgggtttattggaatgagcgtaaggaatatttggtttatttagggtagaaaatcgtttaaggtatttttaaattataaatagtagtatgagtgatttgtgtttggatatgtttttgttgtagataattagtaagagttatttttttgttttggtttatttttttattttttataagtaatatttttagtaaatgttatgattggtttgttgttaataaatatgtgggtaaatttttgttcgaggtttttagttttgaaggttgtgagatttttgattttttattttataatttatatttttgtgtgtgtgtttttaatttttttagtatcgttaggttagggtttttattatcgagttggtttcggtagtcgggagttcgagattagtttgattaatatggagaaatttagtttttattaaaaaaaatataaaaattagtcgggtatggtggtatatgtttgaattttagttatttgggaggttgaggtaggagaatcgttttaatttaggaggcggaggttgtggtgagttaagattcggtcgttgtattttagtttgggtaataagtgtaaaatttcgttttaaaaaaaaaaaaaaaaaagtttttaagagtatataaatataggaattttgtgaagtttaaggataaaataaaaaataatattattaatagattataaaattagaaattagttataaaaagttagttaaaatatttaagaatttatggttgaagattgaatgaaattgataaaatatttagatttgaattttatatatgtatatattaaaatttgtaaaatgtagttgatgtggttttttgaaggagaagaggtaaaaaataattagtttaaaaaattatattaaagaggtcgggcgcggtggtttacgtttgtaattttagtatttcgggaggttatggcgggcggattatgaggttaggagatcgagattaatttggttaatacggtgaaatttcgtttttattaaaaatatagaaaaattagtcgggcgtggtggtaggcgtttgtagttttagttatttaggaggttgaggtagtagaatggcgtaaatttaggaggcggaggttgtagtgagtcgagatcgcgttattgtattttagtttgggcgatatagcgagatttcgttttaaaaaaaaaaaaaaaaaaaattatgttaaagagtaaatttaaagaaagtagaggaaaagaatgaattaaaaatttgtgtttataaataaaaataaaagtaacggagtaaaaagacgggtattagaaaatagttatttttgatttttggttagataaagggaaaaaagtaaaaaattagttatgttaggaatataaatggggataatattatagataaaatagttttagaagattaaaatttattatatgtatataagggaatagtatattatttaaaaagaattagataaatatgtattaaataagttttaaaaaatataattggtagaaatatttttagaaggaattttttagttaatatgtataaagtatttaagtattttattatttttgtttttttttttttttttgtttttgtttttgtttttttgagatagagttttgttttgttgtttagattggagtgtagtggtgtaattttggtttatagtaaattttgttttttaggtttaagtgatttttttgcgttagttttttaagtaattgggattataggtgtatattattaagttcggttaatttttgtatttttagtagagacggagtttttttatgttggttaggttggtttttaatttttgattttaagtgatttgatcgttttagttttttaaagtgttgggattataggtgtgagttattgtatttagtttttattgtacgtttttttgttattagaggtatattttgttttaataattaagattttaaagtatttttttaagttttatcgttttgtaaaatggttaaaaataatattttttattaatgatatagataaaattttaaaatgtggtggtattattttatttttattttaaggatatatatatatgtaatttgtatgtggatatgattttttgaatggtgaatagaaatttagtggttaggtagttggatgcggtggtttatgtttgtaattttagtattttgggaggttaaggcgggtggattatttgagtttaggagtttgaggttaatttggttaatatggtgaaatttagtttttattaaaaatataaaaaattagttaggcgcggtggtaggcgtttgtaattttaagtattcgggaggttgaggtaggagaatcgtttgaatttaggagacggaggttgttgtgagtcgagttcgcgttattgtattttagtttgggtaataagagtgaaatttcgttttaggaaaaaaaagaaagaaagaaaataagaaagatagagagagagagagaggaaggaaggaagagaggaaggaaggaaggaagagagggagggaggaaggaaggaaggaaggaaggaaggaaggaaggaaggaaggaggggaaatttagtggttagatggtaattaggggaggggaggtagaaggtaatttattttttattttatattttttaattattagaaattttgttatatgtgtttatattttttattgtgttttattgattttaaaatgttttttttttataattttgaaattggagtgttttttataattattggtatgttatatttttttttggtttgtggtaatgggttaaaatgataaattgtaaaattaatgacgttttaggaataatgaaaaatagtttaatagtgaatgaagaattatgtaattttaattgtttatatttatttttgggtatgtttttagaggataattgaacggggatagattttaaaaagttttatttaattgggtattttcgtaatttagtgattaatttttgtgtataataaggtattgttttttgaggatgatgggagaatatagggaagaacgaaatcgtttttgatcgtattttttttacggatgtaagtgttcgggttttagtgggggaatgatatttttcgtgcgaaatttatttttaaaaaaggtttagaaaattgattatcggtttttagttgtagtttattaattatagaatttcgaatatgttcgtatattagtgcgttgggttaagaggagaaggggttgcggttgagtttttttagaaatagttatttggggatttattttttgttggagtttgaaaggcgtacgtattagagttagtggtaaagtaatttaagttgtaggttttttttgtttatttttagtcgcgacgtttttgggggtttttagtagattgttaagcgagtgttttcgttttgtgttttgaatttagttaaatttttttaatattaggtttggcgcggtgatttacgtttgtaattttcgtattttaggaggttgaggtaggaggatcgtttgaggttagtagtgaaattagtcggatatggtggcgcgcgtttttttgtggttttaggtaattcggaggttggggcgaaagggtggtttgagttagggagatcgaggttgtagtgagtcgtgttggcgttattgtattttagtttgggcgatagggtaagattttgttttaaaaataaaataaattgtaatatcgtttaagaacgtgtgaaggatatttggaaagttattaggttattttttttttgggcgttcgcggttttagaacgtcggttttatcggtagacgcgcgttttttttttagatgcgtaggtgatttcggcgggcggcgcgggaaagggaagagtttcgcgaggtcgcgcgggggggaagcgggagaagtcgttttttttattttattcgtagtttgcgtgtgggggaaacgagtgttcggcgtatgaaacgtttaatttcgcgaaataaagagagacgtataaaagtttaagaattttgtttagatttaagggtttttttttatttaggggtaattttgttattatattataaatttttaaattcgtgatttttacgttataaaagtagaagttttttttagatttttagcgaaaattgaattttgtcggtgttttatacggagggagggaggacgggaggttacgttagggttgcggggttgtagggcgtggacgtattttggtcggggcgtttattgtcgacgtttttatattttaggagggtcgagacggtcgcgggaagtagtttgcgagtcgtgcggttttattttaaggatttcgttagtgtgagttattgatagtttcgcgaattaacggtgtttagaggaaaaaattttttatttggatttttaggttcggtagtggtcggcggttagggttttttagtagggtagggcggggcggggcggggcgtatagagttagaggggtttgcgagcggcggttgagggatcgcggggagggggcgtcgagcggttttagcgtagagatttttattgtacgtcggagggcgttttttttcgttcgcgttcgcgcgatcgcgcgttttagtttcgtttcgttttcgttaatcgttttagatatagcgttcgtcgagggtcgtttggattttgattttattcgtgggtattttgcgttttgtttgtcgcgaagatcggtttttcgattcgtagaagttaggagagagggtgaagcggagtagttcgaggcggggtagtttttcggagtagcgtcgcgtagagttcgggataatggggtcgcggcggttgttgttggtggtcgtttgttttagtttgtgcggttcgttgttgtttgttcgtattcgggttcgtaggttaggtgagagatgtacgggaatggggtgcgcgggcggagggacgtcgaggggagattgcgggggttattgttgcgttttttttttatttttgttttagtttttttcgaaagttaaattggtatttgggttgagatttggagttttttttagttacgtttaggtggggcgtgttatttttttcgcgggtttagtcgatgtttttttggattcgattttggagggtgtagttcgtttgttacggggtgttggatatggaggaggatggagcggaagttttttgggggagtttgtagttttgcgttgtatttgttattgtgttttttttaggattatttttaaaaagaaaagtttttacgttgttttattaataaacgtttcgatttttaaaatataaagtggcgaatcgttgtcgttgaagttttgttttgttggaagttttttttttgtatattttataggcgagaaaagtgatgtagagaaaagtttaggtagttttttggtatgtttagtagagaattagtattagtagttttcggttcggttttgtgtttaggaggtgcgtagggtgcgagatatatggtgataatagtagaggtttcgcgtggtggcgggggaggggatatggagaggattttgttgttatttagaatttattttttttaagtgagttgaagagagagatttttttttaggatcgggttttttcgaatattgtgggattttagtattttttaacgagatttttgatttattgtaagaaggttgtttttttagaatattttttttattagtagtttatttttaagtatttggttatttgattaaataaataaatttgattaatttatttggttaaatattttttgtatttttttttttaagagtagtatagatgagttgtttttagtttgtaaaggcgttaattagaaagtgagaaaagtgtttttgaattttttaataataatagtattttataagttttgagttattttttttacgttg

SEQ ID NO: 654 - DNA, 6436 bp, Artificial Sequence
  chemically treated genomic DNA (Homo sapiens)
tagcgtaaaaaaaatggtttaaagtttataaaatattattgttattaggaaatttaaaaatattttttttattttttaattagcgtttttataggttaaaaataatttatttgtgttgtttttggggaaagggatatagaaaatatttgattaaataaattaattaaatttatttatttggttaagtggttagatatttaaaaatagattattagtggggaaaatattttaggggagtaatttttttgtagtggattagaaatttcgttaagaaatattgggattttatagtgttcgagggagttcggttttggggagggatttttttttttaatttatttagaaggaatgggttttaggtaataataaaattttttttatgttttttttttcgttattacgcggagtttttgttattgttattatatatttcgtattttgcgtattttttggatataaggtcgggtcgggggttgttggtattgattttttgttaaatatgttaagggattgtttgggtttttttttatattatttttttcgtttgtaaaatgtgtaagaaaaaaatttttaataaagtaaaattttagcggtagcggttcgttattttatattttaaagatcgaaacgtttattggtggagtaacgtgagagtttttttttttgggggtggttttgggagaaatataatgataagtgtaacgtaggattgtaggtttttttagggggttttcgttttatttttttttatatttaatatttcgtggtaggcgggttgtattttttaagatcgagtttaaaggggtatcggttgggttcgcgaagggggtggtacgttttatttaaacgtgattggaaaaaattttagattttagtttaaatgttagtttggttttcggaggaaattgaggtaggggtgaggagaaggcgtaatagtgattttcgtagttttttttcggcgttttttcgttcgcgtattttattttcgtgtattttttatttggtttgcgggttcgggtgcgggtagataatagcgggtcgtatagattgaagtaggcggttattagtagtagtcgtcgcggttttattgtttcgggttttgcgcggcgttgtttcgggaggttgtttcgtttcgggttgtttcgttttatttttttttttgatttttgcgggtcggggagtcggttttcgcggtaggtagagcgtagggtgtttacgggtaagattagggtttaagcgattttcggcgagcgttgtgtttggggcggttagcgggggcggggcgggattggggcgcgcggtcgcgcgggcgcgagcgaggaagggcgtttttcggcgtgtagtgagagtttttgcgttggagtcgttcggcgtttttttttcgcggttttttagtcgtcgttcgtaagtttttttggttttgtgcgtttcgtttcgtttcgttttgttttattggggggttttggtcgtcggttattgtcgggtttagaagtttaaatgagaagtttttttttttgggtatcgttgattcgcgaagttgttagtgatttatattggcggggtttttggaatggggtcgtacggttcgtaggttgtttttcgcggtcgtttcgatttttttgggatgtggagacgtcgatagtggacgtttcggttaggatgcgtttacgttttgtagtttcgtagttttggcgtggtttttcgtttttttttttttcgtgtgggatatcggtaaagtttagttttcgttaaaagtttaaaagggatttttgtttttgtaacgtggggattacggatttaaaagtttatgatgtagtgatagggttgtttttaaatgagaaagggtttttgagtttggatagaatttttgaatttttatacgtttttttttatttcgcgaagttaggcgttttatacgtcgggtattcgttttttttatacgtagattgcgagtggaataggaagagcggtttttttcgtttttttttcgcgcggtttcgcggagtttttttttttttcgcgtcgttcgtcggggttatttgcgtatttgggaggagggcgcgcgtttgtcggtgaggtcggcgttttagggtcgcgggcgtttaggagagaaatggtttggtaattttttaagtgttttttatacgtttttgaacgatattatagtttgttttgtttttgaggtagggttttgttttgtcgtttaggttggagtgtagtggcgttaatacggtttattgtagtttcgatttttttggtttaggttattttttcgttttagttttcggattatttgggattatagaaaggcgcgcgttattatgttcggttaattttattgttggttttaagcgatttttttgttttagttttttaaagtgcggggattataggcgtgaattatcgcgttaggtttgatattaaaggagtttggttaaatttaaggtatagggcggggatattcgtttggtagtttgttaagggtttttaggggcgtcgcggttgggggtgggtaggaggagtttgtagtttaagttgttttgttattggttttggtgcgtgcgttttttagattttaataggaaatgggtttttaaatagttgtttttaggaaagtttagtcgtagttttttttttttttaatttagcgtattgatgtgcgggtatattcggagttttgtggttgataagttgtagttgagagtcggtggttagttttttaagttttttttaaaagtgaatttcgtacgaagagtattatttttttattagagttcggatatttatattcgtggagaaagtacgattagaggcgatttcgtttttttttgtatttttttattatttttaaaggatagtattttgttgtatatagaagttgattattaaattgcggaagtatttagttaaataaagttttttaaaatttattttcgtttagttattttttggaaatatatttaagagtaaatgtgaatagttaaaattatatagttttttatttattattaaattattttttattatttttaagacgttattgattttataatttattattttaatttattattataagttagaaaaaaatgtgatatattaatgattgtaagaaatattttaattttagggttatgaagaaaaggtattttagaattaatgaaatatagtggaaaatataaatatatatgataaaatttttgatagttgaaggatatgaaatgaaaaataaattattttttgtttttttttttttagttgttatttgattattaagtttttttttttttttttttttttttttttttttttttttttttttttttttttttttttttttttttttttttttttttttttttttttttttttttttttttttttttgttttttttattttttttttttttttttttttttgaggcggagttttatttttgttgtttaggttggagtgtaatggcgcggattcggtttatagtaattttcgttttttgggtttaagcgatttttttgttttagtttttcgagtatttgggattataggcgtttattatcgcgtttggttaattttttgtatttttagtagagattgggttttattatattggttaggttggttttaaatttttgaatttaggtgatttattcgttttagttttttaaagtgttgggattataggtatgagttatcgtatttagttatttgattattaagtttttgtttattatttaaaaaattatatttatatataaattgtatatatgtatatttttaaaataagaatggaataatattattatattttaaaattttatttgtgttattggtggaaaatgttatttttaattattttataaaacgataaagtttaaaaggatgttttggggttttagttgttagaataaaatgtatttttagtgataaaaagacgtataatgaaggttgggtgtagtggtttatatttgtaattttagtattttgagaaattgaggcggttaaattatttgaggttaggagttagagattagtttggttagtatagagaaatttcgtttttattaaaaatataaaaattagtcgggtttggtggtgtgtatttgtaattttagttatttgggaggttgacgtaggagaattatttgaatttgggaggtagagtttgttgtgagttaaaattgtattattgtattttagtttgggtaatagagtaagattttgttttaaaaaaataaaaataaaagtaaaaaaaaaaaaaaaaataaaaataatgaaatgtttaaatgttttgtgtatattgattaaaggattttttttaggaatatttttgttagttgtattttttgaggtttgtttggtatatgtttatttaattttttttaaatagtatattatttttttgtatatatataataaattttagttttttaaaattattttatttgtagtgttgtttttatttatatttttaatatagttaattttttgtttttttttttttatttgattagaggttagaaatgattattttttaatgttcgtttttttgtttcgttatttttatttttatttataaatatagatttttaatttattttttttttttattttttttgagtttattttttagtataattttttttttttttttttttgagacggagtttcgttgtatcgtttaggttggagtgtagtggcgcgatttcggtttattgtaattttcgttttttgggtttacgttattttattgttttagttttttgagtagttgggattataggcgtttgttattacgttcggttaatttttttgtatttttagtagagacggggttttatcgtgttagttaggttggtttcgattttttgattttatgattcgttcgttatggtttttcgaagtgttgggattataggcgtgagttatcgcgttcggtttttttagtataattttttgaattgattattttttatttttttttttttaaaagattatattagttatattttgtaagttttgatatgtgtatatataaaatttaggtttaaatattttgttaattttatttaatttttaattataaatttttggatattttgattggttttttgtgattgatttttaattttatggtttgttagtgatgttgttttttgttttgtttttagattttataaagtttttatgtttatgtgtttttaagagtttttttttttttttttttgagacggagttttgtatttgttgtttaggttggagtgtaacggtcggattttggtttattataattttcgttttttgggttggagcgatttttttgttttagttttttaagtagttgggatttaggtatgtgttattatgttcggttaatttttgtattttttttagtagagattgggtttttttatgttggttaggttgatttcgaattttcgattgtcgagattagttcggtggtggagattttaatttagcggtgttagaggaattaaagatatatatatagaaatatagattgtggagtgggaaattagggattttatagtttttagagttgagagtttcgaatagagatttatttatatatttattgatagtaagttagttataatatttattaaaagtattatttatgggaaataaagggatgggttaaaataaagggatggtttttgttagttatttgtagtaggaatatgtttaggtatagattatttatgttattgtttgtggtttaagaatgttttaagcggttttttgttttgggtgggttaggtgttttttgcgtttattttagtaaatttatagttttttagcgtgagcgttatggttattacgaatatgttatagtgttgtagagattttgtttatggttagtttttgggttagtttatggttagatttggcgttttgtttttaaaattcgattttaggtgatttgttcgttttggttttttaaagtgttgggattataggcgtgagttatcgtattcggttttttaagagttttttgaagaagataatttattattttatttgttttacgttatttttattaaaatttttttgttagttttaaagtaaatatttgtaggtttttgagagtagaaaatttatttaattagagatgataaatatgttgaaaatttgtttaattagagttgttaaaaatattttttggaaatgaaattttgattttgtagtattatttatattggaattatttgatattagttttcggtttttattttttttgttttaatttgtttggtattaaatagtatgagttattagttatttttttataatgtttatggtatttagtagtgtttttaaataaatgtggtattaacgtggtaaatattttaataattagatgatacgaaagtagttttatgtaagttattagatgatttatttgttttaggtatt

SEQ ID NO: 655 - DNA, 9733 bp, Artificial Sequence
  chemically treated genomic DNA (Homo sapiens)
ggatttattgtgagatggatttgagttaatattttatttattatttgatttttataaatttttatattgattggtggattatagttatgttttgggttttttggaattagtgttagtttagagtaagtgtttattaatttttaaaagtttgattatgtatttttttttaagtatagttattttggtaaaaggttataggtttttttgggggaggggtggaagaaagattaatagtataaatttttggtagtgtagttgagtttttttttaaggggtttggttttttttttatttgaggggttttgggtttgtaaattggttttattttgggaattgattgagggtttatgattatttttatgatttaaggtagatttttgtttgtttgatttaaaatttatttagttgtatagattaagtaagaattgagtagattgttagtttattttatttttagttgtattatgattagttagttaattttatgggttttttattggttttgtttttgtggaaaattttggtaattataaaggttatggaaaggagaaaaaggtatttattaagtagaaatggtttagttttttaaaaattaagagaaaaaaagaattttatttaattatataatttgagagtttaaaaattattttttattttttggattttgtttagtaatattgttatattttgttggagatagaattaaattattgataatagggtaattaattatttttggtataattatgtgtttaagaattaaaatttggtaagaatttaaattttttagaaattaaaaatcgtatgattttaggtatataattaaatttaaaaaggtaagttttaagagtaaaggaggtgagggtttatattgttttgttttgttttcgtttacgttggttttatcgatagtttgttgtattttatttagttaaagtattttggaaatatttttagagttttggggataatgttatagaataaaaagaaagaagagtgaatgatgaggaaatagaattaataattgtttttgaggagttatttaattataatttttataaatttttaattagtaattatttagttttgttatatattgtatatatttttaatgaagtagattttaaattcgattatttttttttttttttttattattttttagtttagttttttattattttttaattggatagttgtattagttttttagtagtttttgttgtatttaagtttgtttttattatagtggttttttatagagggtttagaggatttttttaaaatagatagtttagtgtattatttttttatttaaagtttttttaaaggtttttttcggtagttagaaggaaatatagggtgtttttttagggatggcggggttttaacggtatggttttgtttattgtttttttggttgtattttatattcgtttatttttttttttttgttttagatttttatacgagttttttttagattataatattttatttttattgtgtggttgttggtttttttttattatttaggttttaatttaaatgttatttattttaaaaagttttttcgggttattttagttaaatatttttttttttaattaattgttgtggtttttaaattaagtgttaaggtgttttagggtattatgggatatttttaatttgagagaaatatagggattatcgatatttattagatatagagataaaaattaaaaataaataataatatggtgattgtttttaaggatttaataatgtagtgtaagagatagatgtgttaagatatatagttgggtatggtggtttatatttgtaattttagtattttgagaggttgagggtggtggattatttgaggttaggagttcgagattagtttggttaatatggtgaaattttatttttattaaaaatataaaaattagttaggagtggtggtgtatgtttgtagttttagttatttgggaggaaggcgggaggattgtttgaatttggtgggtggaggttgtagtaagttaaggttaggttattgaattttagttttgggatagagtgagattttgttttataaaaaaaaaaaaaaaaaaaaaagaaaagaaaaaaaaaaagaaaaataattataatataatgtgattagggtaatatatattgtagatatatgatttagatataggtgagaaagggttaatttatggtaaaggtgtggagttgtagggggagtaaagattaagtagttaaagatagttttagaaaggaagtaatagtagtaatgaaaatgtattgtattatttttattataggtaaatatttttatttaattttgggttgattttgatggttttgttataaaagtagttttgatagatattaagtggaatttttaggtagtaattgtgttttataaaattttttttgagatggtaagtaaataattattagtagagatatttttaggaaatatgtgatatttaataaatgggaatattttatttatgtgtaggaataagtgtcgtgttttaaattttaagttaagattgtgatgaatgaaaggtaatggatttggtatcgatttcgttatttaaaatttaagatggatgggggtaggaaggagaggaaatagttattggtttttttggtaggtttttaatattattttttttagaggttaacgtgagataatgtatgtggaaagggttttgaaaatgagataaattatttgttattttattttgtaatatttgggttaaaggagatttttggggaagtgttggtgtttgtttttataattatttttagttatgcggtagattataagggaagtattagtaagattttttattttttttaagaatggattggggaggtttaaataggaagtcgggtggaaaggggaagattagaggaggaaaaaaagagatagggaagtaggagttaatttttttttgtttataagatttaagagaatttaatattttttagttataatttaaaaattaagttttatgagtttatttatgtgttttagtttttttgaagggtatttgtttttttttataatttattattgtagaagatatattatatagatttttatttagatgagaaggtagtaataattttattttaaagtttaaagtattagttttataggttaaattgaagagagaaattataaattagatgaatttaagttaacggtttaaattatgaaatattgaattaacgattattagagttaaatgtaaaattaaaagtaaaagttgaattttattaatgtaaagtttgtttttttttatttattttatttttgagatggagtgttgttttgttatttaggtttgtttattgtaattttcgttttttagggttaagttatttttttgttttagttttttaagtagttgggataataggcgttcgttattacgtttagttaatttttgtatttttagtagagatggggttttattatgttggttaggttggttttaaatttttgattttaagtgatttttttattttagttttataaagtgttgggattataggtatgagttattgtgtttagttaagtttgtttttttagttgtttattagaagattgaaaataatagtatatttatgggacggttatatttttattttagttaaatagttaggtttaatataagagttataaatgaattaaatgattagaaattaggttatgtgtaaattaagttataaatttttgaatttagataatttttagaaaagttttaatgaaataaaaaaaatttttgttaatattttaggttttatatttttgtaatataataatattttattttagtttgtataattatatattatgtagttgaagtattaaatattgatttttgtaaaaattttggtttaatgtaatttaattaagatgtgaaaggttttcgtagattaatttttttttagtatatttttagtttttaagttttatgtgaaatttgtattttttgatttttgttgtattttgtaaagagtaggttgtgggatggttaggttttaagtttaagttttattaattatagaaaaatgtgttataatgtatttttttattgtatattaagttatattttatagaatataataatttataaaagtttatatgttgtataataatgtgaatgtatttaatattattgaattgtatatttaatattggttaagatagtaaattttatgttacgtatattttattattattaaaaatattttattgtagatttatttattaatatttatggaataaagggagtttttatttttatgatgtgttatgattttagtttaattgaatagcgttgtttgggaggtttttttagttatttgattttaagggttattgaatggtttaaaatatattaagataaggtaaaaaaaaaaaaaaaagtttgaataaacgttatttttattcggcgaagaaaaattattattatttaaaagttaggttttggttaggttattgacgataaattgaaattaatattatattgatggaaaatttttaaagtgatttatcgtttaatttgaattttttaaaagtttgttttttatgattaatttataattatgtaaagtgtttaaggattaagatttgaaatagttgggaagataaaggaaaggataatttattaagtagaaattatattttggaattgtatttttaaaacggataagaaatgaaatgtgggatagatttaaaatttattgttgtttaatatttgtttttggtttagttttgtaaaggtttgtgtaatttttgttattttttaaaagtaaatttattaggggagaattatagtatttatttagaatagattgttgggggtgggtaagagttaaatgtttttttttagggataacgtaatacgtttagaggtttggtttgagttatgtttattgaagtatcgagtggattatattttttttttgcggaggattagggtaagttttttgtttgtacggtataggagagtaaatttttatagatagattaaggtttttatttgttgttgatatatggaattgaggtgaaattgtgttttatgattttatagattttataacgtttaagagacgggatttaggttattaaaatgaaagtttttatttttgtagttgttggttttttgtttttgttgtttattttttgttagagtggtaagtaatttttttagggggtaggatggggatgtgggtttttgttataaattaagagttaattgaatttaggtttttttgtattttatataaattgtaaattttaaaggtagtttgatttttattattaaaaggtagaattatggaaatgaatatttatagtttatttattttatttaaatttggttatagattaagtgtttttttttgatgtttaaaaatgtgtggtatatttaagattttagatgtttacgattaagttagggagtaattttgaaagtcgtttttgtgtttgtaagaattttttttttggttaagtaaagatggtattttttttagggattaaaatatatattttgtgtttaaattttttggtgagatataaatgggagaaataagaatattgttagaaagagaaagttatttgtttttaatagttggtaatgttaataagttagtattttcgaaatgaatgattttttttgattttaagtggggagttttttttatttttatatatgattttttaattttaaaaataaggttttttaaatattattatttaattttgaatgtattttttattttatttattataatgttagtttgaaattttttgttttttttaaaaataataaatttgggataggtttgtatttgttattttttgttaggttatatattttagttaatattgttaggagtgggagaggtaaagattggatatagtaagggaaataaaaatagaaattaatgttttttaaaggaatattgtttaaatttatatttggaatttttgagcggttgtagagagttttaagagaatttgtggtgattagtagtaagtatatgtgggatttatgaatataataagtgtacgttttttttgggagtagatgggttaatatgttgagaagtagaattgtaaaagaagtaaggttttcgggggtggtttttttaagacgttaatagggtttgatggaggtgaaaacgggggtttttgaaggaaataaagaggtagtgaatttgtttttttttatggggtgggggagaaatgtgaaggaagaatgaagtaagtttgtttaatttgttttatttcgttgtggttttgttttgttttaggtttttagtagtttgaagttatggtttttagtttttgtttttagaggtaaatggaaaagagggatgaggaaggggttttattggtttaattagaaatagaaattatgaatttatgattgtatttttttttttggatatttttgagaggtcggagtttattttttttggattagttttttaaggttttttttcggatagaaaaatattttcgaaatattatgtttaatggaagtttttataaagaattaaaatataataaaaaaatttaataatgagtataatttataaggaaaattaggttttgaggaataaaagttttatttaagtggatttagatttggtatttttacggaaaatggaattaaattaatttttttataaaatataggtattgtttggtatgtttggaggtatgatgttttgttaaattttagaaattttttgaaaacggataaatatttggttttaatagttttttaaaattaggttaataatttgtacggtatgttttttaggtattattttttaattttgtgtttatttttaaaggtatttttttttgggtgatgttagatgtaagaatttttttaaaatgtaaaagtgagtagaagggtttgtgtgttatataatatagtttttaagattatttttaaatataggtatagaagaatgttgttttttaaatttttttttttttttttttaatttatttttttttaaatgatatttgattatttttatattttttagttattaggatatattttttttattttatatcgtgaatttagtttgtgtaattttaggtttacgtggagggtttttattttattcgggagttaattgttagagattaaagtaggaagagaaattggttttgaatgaaatataggttattaaatattaattttaagtatttaatatggaggaattttgaggttatgggataagatataatggcgtagtattggtattttaaatcgataagaatgaggtttatatttggtatagaagtttattttaaaggtaatattagaaatttgggagaatttattttttatatatgtgaaagggttataaaaagttatataataataaatgtttaggtttgagttttaagattttgtttttgaaattgtaggaattaggattattaatattaatatgttaagtaatattaaatattgatagtatatagttgatgtgtttttattttttaaagaatttatttttaattttttaggtttttatatcgattttatttttcgatttttttttttttgttttttttttttttaaaatttgttattatttttaaagtttatttttggattttttttttttataattttttttaggttattttaattatttttattaaattaaacgagagtttttatgtagattataataaattatgtttttaatttgggtttttggaattttggatttatatttagttttttaattagttgttggatattttatatattaatattttattagtaatttatttttagttagattaaaaatagattgtagttttttttcgattttgtttttttgtttttttttaatttagttaatggtattttttttttttaagttatttagagtagaaatttgagttattattgttttttgttttttttttattgtattttaaagttaattagaattaagtttttttaagtcgttattagagttttacgtgttcgtttttgtttttttataattattgttttagtttagtaatttattgagttatgaatgatgatagtagtttttaaattaggtttttttgtttgtaattttttatttttttaatttgttttttatattattatttaagttattttaaaaataagttaaaataacggttatattcgttttttattgttgttatattaaattattataaattgagtggtttaaaataatagattatatttttggagattagaggttttaaaattaaggttgttggtggggttgtgtttattttcgaggttttaggagagaatcggttattttgttttttttagtttttagaatttgtttgtattttttgggttatgatttttttttttatttttaaagttagtagtatagtatttttaaatttttgattttgataatttttttattttttttttatatggattgttatgattatatttgatttatttaggtaatttaggaaaattttattttaagatttttaattggtcgggcgcggtggtttacgtttgtaattttagtattttgggtggtcgaggcgggtagattacgaggttaggagatcgagattattttggttaatatggtgaaattttgtttttattaaaaaaatataaaaaattagttaggtttggtggcgggcgtttgtagttttagttattggggaggttgaggtaggagaatggcgtgaattcgggaggcggaggttgtagtgagttgagatcgtgttattgtattttagtttgggcgatagagtgagattgttttaaaaaaaaaaaaaaaaaaaaaagaagatttttaattaagttagatttgtaaaattttttttgttaggtaaaggaatatatttgtaggttttaggaattagtaggtagaatttttgcggggggttattattttgtttaatataatggttatttttttgtttaaaattgtgtgtgtaattttattatttgtgaatagatatatgattttttaggatagtttagaggttttttaggaatttagttgttatttatttttttaatttttttttttagttgtattttattcgtataagataatgtatttttatgtattttttttacgagtagtattatttatagatagaaatggattttatttaaaattttatattattgatatattaatgtataataaaaatttgttaaattaatttatttggtatttttagattttatgatagtttatattatgtttttgtttatttattattagtagaattttatttattaaattttatttttttaggaattttgttagtttttgtttaagtttattttttttttgatattttgtttaaatatttgaatttattaagtattgtttgaatgtttgtatagtttgtagttaatatgtttataatgttttgatgggttgtttttgttttttttaatagtattataaatattttatatataaggattgattatttagtttttgttttcgtataagatagtgttgttttggggtatatgatatgtattaaatatatgtttgttgattgtttaatttataataattttttaaaataaaaatgattttaaattttataattatagaaattatttataaataattaaatatattttttttttttttgaattatatatttatgttaatatttttttttaattatagg

SEQ ID NO: 656 - DNA, 9733 bp, Artificial Sequence
  chemically treated genomic DNA (Homo sapiens)
tttgtaattgaaagaaagtattaatataaatgtatagtttaagagaaaagaaagtgtgtttaattatttgtaaataatttttgtgattgtagaatttaagattatttttattttaaaaagttattgtagattaggtagttaataagtatatatttaatatatattatatgttttagaataatattattttgtgcggaaataaaaattaaatgattagtttttgtatgtaaagtgtttataatattattagaagaaataaaaatagtttattagaatattataggtatgttgattataaattatataggtatttagataatatttaatagatttagatgtttgagtaaaatgttaaggaaaagatgaatttgagtaaagattagtaaggtttttaaaaagatggaatttaatgagtaagattttgttggtgatgaatggatagaagtatagtgtgggttattatgggatttgggaatgttagataagttgatttagtaaatttttattgtatattgatgtgttagtggtgtaaagttttaaataaaatttatttttatttgtaagtaatgttattcgtggagaagatgtataaaaatgtattgttttatgcgaataaagtgtagttgagaaaggaaattgaaagagtgggtgatagttaaatttttgaagggtttttaaattgttttaagaaattatatgtttatttatagatgatgggattgtatatataattttgaatagaggaatgattattgtgttaggtagaatagtagtttttcgtaaagattttatttgttaatttttggaatttataagtatatttttttatttagtaaaagggattttgtagatttaatttagttaaggatttttttttttttttttttttttttttgagatagttttattttgtcgtttaggttggagtgtagtggtacgattttagtttattgtaattttcgtttttcgggtttacgttatttttttgttttagtttttttagtagttgggattataagcgttcgttattaggtttggttaattttttgtatttttttagtagagatagggttttattatgttagttaggatggtttcgattttttgatttcgtgatttgttcgtttcggttatttaaagtgttgggattataggcgtgagttatcgcgttcggttagttaaggattttaaaatgagatttttttggattgtttgggtgggttaaatataattataatagtttatataaggggaaggtaagagggttgttaaagttagagatttgaagatgttatgttgttggttttgaagatggaagaaagggttataatttaaggaatgtaggtagattttagaagttgaaaaaagtaagatagtcgatttttttttagagtttcgagaatgaatataattttattaatagttttgattttaagatttttgatttttagaaatataatttgttattttaagttatttagtttgtaatgatttgatatagtagtagtaggaaacgaatatagtcgttattttgatttgtttttaagatgatttaggtaatagtgtagagaatagattggaaaggtaagaaattataggtaaggggatttgatttggaggttattgttattatttatagtttagtgagttattgagttagaatagtggttatggaaaggtagaggcgaatacgtgagattttgatggcggtttaaagggatttggttttgattggttttggggtgtagtgagggagaggtaggaagtaataatgatttaggtttttattttagatgatttggagggagaggatgttattaattgagttggagggagataaggagataggatcggggagaagttataatttgtttttagtttgattgaggatgagttgttggtggaatattagtgtgtaaaatgtttagtaattggttagaagattggatgtgggtttaaaattttaggagtttaaattagaggtatgatttattgtagtttgtatggaggttttcgtttaatttaatgggagtggttgagatggtttagggggagttatgagaagaaagaatttaaaggtggattttaggggtaatgatagattttaagggaagaggaaataaaggaggaaaaatcggaagatgaaatcggtatgaggatttaagaagttggaaatgaattttttaaaagatagaaatatattaattatatgttattaatatttggtgttatttggtatgttgatgttaataattttaatttttgtaattttaaaaataaaattttaaagtttaaatttgaatatttattattatataattttttgtaatttttttatatgtatagaaaatagatttttttagatttttaatgttatttttaagatagatttttatgttaaatataaattttatttttatcgatttaaaatgttagtattgcgttattatgttttgttttatggttttaaaatttttttatattgaatatttgaagttagtgtttagtaatttatgttttatttagagttagtttttttttttgttttaatttttagtagttagttttcgggtgaaatggaaattttttacgtaaatttgagattgtataagttgaatttacggtgtaaaatagaggaggtgtgttttagtaattgaggggtatggaggtgattaggtattatttaagaaaaggtagattaaagaaaaggaaagaaaaatttgggaggtagtatttttttatgtttgtatttagaggtgattttagaagttgtgttgtgtgatatataaatttttttgtttatttttgtattttggaaaagtttttgtatttgatattatttaaagagaagtgtttttaaagataggtataaagttagagaatggtgtttgaagagtatgtcgtataagttattagtttgattttaaaaagttgttaaaattaagtgtttgttcgtttttagaaagtttttgggatttagtaagatattatgtttttagatatgttaaatagtgtttgtgttttgtggaaaagttgatttgattttatttttcgtgagaatgttagatttgggtttatttaaataaggtttttattttttagagtttggttttttttatgaattgtatttattgttaaatttttttattgtattttaattttttatagaggtttttattgggtataatatttcggaaatgtttttttattcgggaaaaggttttgaagaattaatttaaagagaatgaatttcggttttttaggggtgtttaagggagagaatatagttatggatttatagtttttgtttttagttgagttagtaaagttttttttttattttttttttttatttatttttagagatagaaattaaaaattatggttttaggttgttaaaagtttaaaataaaataaaattataacgaaataaggtaggttggataagtttgttttattttttttttatattttttttttattttatggaagaaagtaaatttattgtttttttgttttttttagaggttttcgtttttatttttattaaattttattagcgttttgaaggaattattttcgaaaattttgttttttttgtaattttgttttttaatatattggtttatttatttttagaaagagcgtgtatttattatatttataaattttatatgtgtttattgttaattattatagatttttttagagttttttgtaatcgtttagggattttaaatgtgaatttaagtaatgtttttttagaaagtattgatttttgtttttgttttttttgttatgtttagtttttgttttttttatttttaataatgttgattggagtgtgtgatttaataaagagtaataggtatagatttattttaaatttgttatttttggaaaaagtaggaggttttaggttaatattgtgatgggtaaagtggaaagtatatttaaagttgaataatagtatttgggagattttatttttaaaattaaaaaattatatatgagggtagggagaattttttatttaaagttaaaaaaggttatttatttcggaaatattgatttattagtattgttagttattgaaagtagatgattttttttttttggtagtatttttgttttttttatttatgttttattaagaggtttaaatataggatatatattttaatttttagaaaaagtgttatttttgtttaattagaagagaaatttttataaatataaaaacgatttttaaaattgttttttgatttaatcgtagatatttaaaattttgaatatgttatatatttttaaatattaggagggaatatttagtttatgattaggtttgaatagagtgaatgaattatagatgtttatttttatgattttattttttaataataaagattaaattgtttttggggtttatagtttgtgtgagatgtaaagaaatttaggtttagttgatttttaatttgtaatagaaatttatatttttattttattttttgagaaaattgtttattattttgataaaaagtgggtaatagaagtaggaggttagtagttgtaaagatgagggtttttattttgatgatttgagtttcgttttttaaacgttatgaaatttgtaaaattatggagtataattttattttagttttatgtgttagtagtaaatggaagttttggtttgtttgtagaagtttgtttttttgtgtcgtgtaggtaggaaatttgttttggtttttcgtagggaaaggatgtaatttattcgatgttttagtaagtatgatttaggttaagtttttgaacgtgttacgttatttttggagaaaggtatttaatttttatttatttttaataatttattttgaataggtgttgtaatttttttttagtagatttgtttttaaagaatggtagaaattatataggtttttatagaattaagttaaaaatagatgttgaatagtagtaagttttgaatttgttttatattttattttttattcgttttaaaaatgtagttttagagtgtaatttttatttaataaattatttttttttttatttttttagttattttaaattttaatttttaaatattttatataattataaattaattatggaaaataaatttttaagaaatttaaattgagcggtgaattattttgaaaattttttattaatgtaatattgattttagtttgtcgttagtggtttggttagaatttggtttttgagtggtggtggttttttttcgtcgggtgaggatggcgtttgtttaggtttttttttttttttttgttttattttgatgtgttttgagttatttaataatttttagggttagataattggaggaattttttaaataacgttgtttagttaaattaaaattatagtatattatgaaaatgaggattttttttattttatgagtgttggtgaataagtttataataagatatttttaatagtggtaaaatatacgtaatataaaatttattattttaattagtattaagtgtatagtttagtaatgttaaatatatttatattgttgtataatatataagtttttatgaattgttatattttgtagagtatgatttaatatatagtaaaaaaatgtattataatatatttttttgtagttaataaaatttaaatttgaagtttgattattttatagtttgttttttataaaatgtagtaagaattagaaaatataaattttatatgagatttaaaggttagggatatgttaggaagaaattgatttgcggaaattttttatattttgattaaattatattagattaagatttttataaaggttagtgtttaatattttaattatataatatatggttatataaattgagatagaatgttattatattgtagaaatataaaatttaaaatattgataaaggttttttttgttttattagaatttttttgggagttatttaaatttaggaatttatgatttgatttgtatatggtttagtttttggttatttaatttatttgtaatttttatgttgaatttggttgtttaattgaagtggaggtgtggtcgttttataaatatattattatttttagttttttggtgaataattgaaaaagtagatttggttgggtatagtggtttatgtttgtaattttagtattttgtaaggttgaggtggggggattatttgaggttaggagtttgagattagtttgattaatatggtgaaattttatttttattaaaaatgtaaaaattagttgagcgtggtggcgggcgtttgttattttagttatttgggaggttgaggtaggagaatagtttgattttgagaggcggaggttgtagtgagtaagtttgggtgatagagtaatattttattttaaaaataaaataaataagaaaaagtagattttatattgataagatttagtttttatttttggttttatatttaattttagtaatcgttagtttagtgttttataatttaaatcgttgatttaaatttatttgatttgtaatttttttttttagtttggtttataagattaatattttaagttttgaagtaagattgttattgtttttttatttgggtagaaatttgtgtggtgtattttttatagtgataagttatgaaggaaggtaaatattttttaaaagaattgagatatataaatgaatttatagagtttagtttttaggttatagttggggagtgttgggtttttttagattttgtaaatagagaaaaattagtttttgtttttttgtttttttttttttttttttagtttttttttttttattcggttttttgtttgagtttttttaatttatttttgaaagaaatggaaaattttgttgatgttttttttgtagtttgtcgtatagttagaggtgattgtggaagtaggtattaatatttttttagaggttttttttagtttagatgttgtaggatgaaataatagatagtttattttatttttagagttttttttatatgtattattttacgttaatttttgaggaaaatagtgttagaagtttgttagaggaattagtgattatttttttttttttttgtttttatttattttaagttttaaatgacggagtcggtgttagatttattattttttatttattatagttttgatttaggatttagaatacgatatttatttttatatataggtaaaatgtttttatttgttaaatgttatatgttttttgaaaatatttttgttgataattatttatttgttattttagaaaagattttataaaatataattgttatttggaagttttatttaatatttgttagggttgtttttgtagtaggattattagaattaatttaaagttaaataggaatatttatttataataggaataatgtaatatatttttattgttgttgttgttttttttttaaagttatttttaattatttagtttttgttttttttgtaattttatatttttattataggttaatttttttttatttatgtttggattatgtgtttgtagtatatattgttttgattatattgtattataattgtttttttttttttttttttttttttttttttttttttttttttttgtgagatagagttttattttgttttaaggttggagtttagtggtttgattttggtttattgtaatttttatttattaggtttaagtaattttttcgttttttttttaagtagttgggattataggtatgtattattatttttggttaatttttgtatttttagtagagatgaggttttattatgttggttaggttggtttcgaatttttgattttaagtggtttattatttttagttttttaaagtgttgggattataggtgtaagttattatgtttagttatatgttttgatatatttgttttttatattatattgttaggtttttgaggataattattatgttgttgtttgtttttaatttttgtttttgtgtttgataaatatcgatgatttttgtgttttttttaaattaaaaatattttatggtattttgggatattttgatatttagtttgggaattatagtaattgattgagggagagagtgtttgattagggtagttcgggaagattttttggagtaggtagtatttgagttgagatttgaatggtaagaaaaagttaatagttatatagtgagggtagagtattgtggtttgaaagagattcgtgtgaaggtttagaataggaagggggaagtaaacgggtgtgaggtgtagttagagaggtagtaggtagggttatgtcgttggagtttcgttatttttgagaaggtattttgtgtttttttttaattgtcgggggaagtttttggggaagttttaagtagaggagtggtgtattgagttatttattttgaagggattttttgggttttttgtagagggttattgtggtgagggtaagtttagatgtagtagaagttgttagggggttgatgtagttgtttagttgggagatgatggggggttggattaaagagtggtggggaagaaggaggaagtggtcgggtttggggtttgttttattaggagtgtgtatagtatatggtagagttggatagttgttgattaagaatttgtggaaattatgattaaatggttttttaaaagtagttattaattttgtttttttattatttatttttttttttttttattttgtgatattgtttttaggattttgagagtgtttttaaagtgttttggttggatgagatatagtaagttgtcgatgaggttaacgtggacgaggatagagtaaaataatgtaagtttttattttttttgtttttgaaatttgtttttttggatttggttatgtgtttgaagttatgcgatttttaatttttgaaagatttggatttttattaagttttagtttttggatatataattatattaaaagtagttggttgttttattgttagtgatttgattttatttttaataaaatgtaataatgttgttgaataaaatttagaaggtaaaaaatagtttttaagtttttaaattgtataattgaataaaatttttttttttttttgatttttagaaaattagattatttttatttaataaatgttttttttttttttttatggtttttatagttattagggttttttatagaaatagaattaataggagatttatggagttggttagttgattatggtgtaattagaagtgaaatagattggtagtttatttaatttttatttaatttgtataattggatgagttttgggttaagtaaatagaagtttattttgaattataaaaatagttatggatttttaattaatttttagaatggggttagtttataaatttagaattttttaaatgaagggaaggttaggttttttgaggaaaaatttagttatattattaaaaatttatattgttagttttttttttattttttttttaaagggatttatggttttttattagggtgattgtatttaggagaaagtatataattagatttttgggaattagtggatatttgttttgaattgatattaattttaagaggtttaaaatataattgtggtttattagttaatgtaggggtttgtggaggttaggtgatgaatagaatattagtttagatttattttatagtgggttt

SEQ ID NO: 657 - DNA, 6392 bp, Artificial Sequence
  chemically treated genomic DNA (Homo sapiens)
aaaatttggagtatttgttaattaggttataaaatgttaataaataaatataaaaataataatgaaatattttgtatatatgtttttaagttgattattttatttgtttttttttttacgtgaggaatttttttttatttggttattttttttgttagatttgtttttttataaagttgttttttttgttgagttttatatattttttttatatttaaaattttgagagtttattaatacgtttaaattgatagagaatgtatattttaaatttgtaagttattttttgagttaaagatatttatttgatgaattgattatgatatatttaaatttttttggggggaggatagaatgaaatttgtaaataaataatattgttaagattgttttatatttaatttaaatgttgatagaaaatcgtttaaattataaaatttgtcgggtatggtggtttatatttgtaatttcggtattttggggggtagaggtaggcggattatttgaggtcgggagtttgagattagtttgattaatatagataaattcgtatgtattaaaaatataaaattagttgggtatggtggtatatgtttgtaattttagttatttaggaggttgaggtaggagaattgttttgaatttgggaggtggagttgtagtgagtcgagattgtgttattgtattttagtttggggtaataagagcgaaattttgttttaaaaaataaataaataaatataaaatttggatataagtaggaatgatgatatgtttaataggaaagggatttttttgttttattttgtatatttagagtttagtaaagaatttagtatttggtggatatttaagtatttgttgaatgaatgaatttttgtttattaaatttagtatatatgttaggtataaagagttatagaaatgaggaattaagagatgtttaagtaaatgatattatatataaaattttaaattatataaatattatattaataagaatataggttaagggtttttattttaaatgattttttgttattaaaataatatttataatttatatttattatttatttattttgttattattgtatgtagataataaaataatatttattgtttattaaaatgaaagttgaaaggtagtttgataagttttacgtttataaaaatagatgtttgttgaaaatattaattttagtttaagatttgaattggaaggtttttttttaaagttatattttttagaatattggtgttatgtgataatttatttagtaaagttttttgtaagttgttttagatagttgatagaagtattttgaatgattaggataatagattttattatattgatttttaattgtttaattttggtttaaatgaattgttggattagtatattgttatttttataaaatgtataattatgattgttaatttttttatgattaattatatttagttagatgttttttaggttttgttgagttattttttttttttttttttagaattttgtgtttttattaatttttaattttttttggtttttttttatattttgttttttatttgaattttgggtaatggttttattgttttttttattattttatatgtataaaataagtttttttgaattatttttaattttatttgttattatgtattttaatttattttttttttgggaaataaatattttgaggaatttgttttaaaaagttatttagtttttgtatgtaaggaaaattattaataattttatcgtatgatgaagtatattttgaattatcgtagaatttagttttttaaaaaaatgttagttagtttttaaatttttgtatttggtttttgttttttagttatttttttttttggtgagattttttggtggtgtagagatagttaattattggttagattgttagaatttgcggtcgagtggtgtttttttagttatgatggatttgtatttttttattaattttagtattatgaaatatttattgtttggtttttagaaagagtttttagtgatagattttattttttgaatattagtgaaatatttggttgtatttatagttttataaagtatttattgatttaaaaggtattaagtgtttattatgtgttgataattgtggaaagggttgagagaggaaaaaaatagataaaaaatttaatttaataggaaagattaataggtaaatatataagtgagattaagtgaagtttttaatgaaaatgagtcggtaaaattggtagtaagtattataaaagtatagtggaagggttgaaatattttcgtagttatttttagattttttattaattatattttattattggttatgtaaagggaatttaaatttttttacgtgtttttttgtttgtttattttaaggattaattattaggatatttttgtttaagaataatgagttttttaaattgtaaagtattttttatattttgtgtgtagtttttgtgtagttttgtatttttttgtattttgtgtatatgtagaatatttttgagtgtttatggatggattaattaattatttatttgatggatttattatttagttttatttttttttattgggagtaggagaaagtttggtgatggaaggaaagttttcggggttagaagattagatttgtattgtgtggttaggtaagttagtttatttagattagttggttatagggtttttatttataaaagaatgtttgtgaggtttttttattttttgatattttaaaatttaatgagaaagggattggttaagttagagagattattgttatagtttagtaattttttgaattttttagagtttttaagatagattatggaggagggaattgttaattgttaagtttgattttattgataggagtaaaaaaaattgtgttaaggttagggaataattttaatagttaatttgtttttgtgaataaattttaatagtgaaattttagatatgtattttttaatggtgttaagtagtagttattatagattaattgttgtttggtattattaaaaagtatatttcgtatcgttaaaaagtagatttggttataattagattagttagggaaaaatatttcgtaatgaaatattatttattacgttttttttttttttttttttgaaaatagtaatgattttagtatttttaaattttgaagaatgttatttcgtattgattaaaaagtttgtgtaaatatttaatatttttttttttttgtttattttaatggatatataaaataaatatttatttaatttattaatatttaaggtatattgtgtattataatttaatggtaaatattttttttattaaatggttgattttgatattgtttaaagttttatatgattttagaaaagttagtgattttaagtggaattgtaataattttttgggttttgtaataaatttgaagtgtaattatttttttttagttatttttaattttagagagtaaagaattatattttaggtggagttgaagattttttagggaaaatgatttaggttagagtttgtataaaaagaggattgtatggtttagttttgtaaatataaattttgtgggttttagagttggtagagagtttaaagaggaaattattaagggtaattttttgtttcgaggaaggaaagtttataagggttaaatttggatgtgttattttagtttaggtaaaggaggaaaattaaaattttgtatagttttattttgttaaaataagtggtttagtatatagtatgtattaaaatgtaagattgatttttttgggaaaacgtgggaaagaaggagagaggaaataaataatttttatattaagaattttttagtcgtgttttgtaggtaatatagagtaataataataaaaatgataggagatattttgataggatggtttaaaatgttatttaatagatgaagagttgtttttatgtttggtaagtttatagtaaagtttagaaggagaagttagaaaataatttagaaaaattaaagtttaaaattagtggtatataattttggttatattttttatttttatttttggtttttttgtatttcggtggaatttagttttatagatgttttttttaatgtgggaattattttttttggaattatagagttgtagatgttacgttggaatttttttagaggtaaattgttagatgtgaggttgtttttttttagttattatttttggtcgtatcgggcgatgtttgagttaattgatttttagatttgtgagtcgagtcggttatatcgtggttgatatcggtatttttatcgttttttttttgtgcgattcgttaagggtttcgcgaggtgggtaggttaagtatttttgattttcgtggggtagaagaagttatcgtggttgggagagggttttgtttatagttatacgtttatttcgttgtaggtttcgagtttttgttttaggtgggtaaagtattcgggaaatgtttttcgttgttcgaggggagtttagagttcgtgttttttattaaatgttgtaaatgtcgttttttttattttattattaaatggaagggaagaatttttttaaggcgtttttttttttttgttatagatttgtaatttatttaagttgtacgtcggagtcgcgggtttgggtgaattcgggggttttgggggattcgggtaattagattcgtttgcgttttttagggtagtttcgcgttcggtggcgcggttgaattattggggtgagttattttttgtagggtttcggagttttttatcgggaggaggcggggtaggggtgtggattcgtcgggggtcgtttatcgcgacggtaagtgattcgggtcgggggcggggagtcgggaggagcggcgggggcgggcgtcgggggcgggtagaggcgcgggagagcgcgtcgtcggttttttatagcgcgcggggtatcggttttttaagattgcgagtttttcgtattttttcgtattttttttggtcggtttagggcgtttttagtttaatttttttagttttacgggcgttacggaattcgttcgatttcgtcgttaattggtagatatggagatttttgtttggtttcgggtttcgcgtttcgagatcgtcgtcgttcggacgtttttgttcggttgggttttcgtttaggtggtcggcgttttaggtgagtggtattagtttttggaagttcggggcgcgttatacgtaggagggaggcgatagttttggttggtagcgggttcgttttggtttttcggggcgtttatgttgtttttcgcgtttacgggattcggttgcgtttatttagttcggtttgaatgaatcgagttcgtcgggcgtcggcgggagttgtagggagggagttggcgttttagatttcgttgtttttttcgttggagagttttgttcggggtgttcgagtaattggattgttgttgtataagcggatttttagttttcgttttaattttggggaaagggttttttagtgagttgcgatttttaatatgataggatttgtgtttgcgtttgtacgtgttggcgtgtagaggtttggatattattttttattatatgtgtatttttttttaataaagagcgtttttggtttttttttggttatttttgttttaggtttgggtagaggtaatttaaaagggttggattgttgtttagattggagtaggtataacgttgtgtatgtttcgtatttttacgaggtgttcgggacggcgtagagattgggatttgttgcgtattggtaaagtagatttttataagaaataattttgatttaatatagtcgacggtgtgataggttatacgttttcgtgggtttttgtggaagttttagtgtagcgatattttagataaaagtggaaaaagtgaagtttggttttttttatttgtatgtagttttaatttttgttatacgtgtgggatttatttttttttataatttattgaaaattttttttggcgggttgaatttgattttttttgagttgagttttggattggtatattgatggttttgggtttttttcggttaagttataataaggttttgtttatgaataattttaaacgaaaatgttaagatttttgtcggtgttttgggattataaggtgaattttgttatgaagaaattttaggtttagaaaaaatttgaagatttttttttttttgataatttattaatgaagtttttgtggttgaaaaataaaaagtgaggtttatggtgatgttaggtgggaaggtgttttatatattaatatattcgagtgttttgaagtgtatgtaataatagttgtttttttgttgtttaaagg

SEQ ID NO: 658 - DNA, 6392 bp, Artificial Sequence
  chemically treated genomic DNA (Homo sapiens)
tttttaaataatagagaaatagttattattatatgtattttagagtattcgaatgtattgatgtataaaatatttttttatttgatattattataaattttattttttattttttaattataaaagttttattagtgaattattaagagaaaaagaatttttaaattttttttagatttagaatttttttatgataagatttattttgtaattttaggatatcggtaaggattttgatattttcgtttgaaattatttatgggtaaagttttgttataatttgatcgggaagagtttagagttattagtgtgttagtttaggatttagtttaggaagagttaggtttagttcgttaggaagggtttttagtaagttatggaaaaagataaattttatacgtgtgataagagttaggattgtatataaatgaaaaaagttaaattttattttttttatttttatttgaaatgtcgttatattgaaatttttatagagatttacggggacgtgtggtttgttatatcgtcggttgtattggattaggattattttttatgaaggtttgttttgttagtacgtagtaggttttagtttttacgtcgtttcgaatatttcgtagaaatacggggtatgtataacgttgtatttgttttaatttaagtagtaatttagtttttttggattgtttttatttaaatttagaataaagatggttaggaaaagattagggacgttttttattaagggaagatgtatatataatgaaagataatatttaaatttttgtacgttaatacgtgtagacgtaggtataagttttattatattgaaggtcgtaatttattgggaagttttttttttagagttaaagcgggagttaaaagttcgtttatgtaataatagtttaattattcggatatttcgagtaaaattttttagcggaaggggtagcggggtttggggcgttaattttttttttgtaattttcgtcggcgttcgacggattcggtttatttaagtcgggttgggtgagcgtagtcgagtttcgtaggcgcgggggataatatgggcgtttcggggaattagggcgagttcgttgttagttaggattgtcgttttttttttgcgtgtggcgcgtttcgggtttttaggggttggtgttatttatttgaagcgtcggttatttgggcgaagatttagtcgagtaggagcgttcgagcgacggcggtttcggggcgcgggattcggggttaggtaggggtttttatgtttattagttggcggcgagatcgagcgggtttcgtggcgttcgtggggttggggaggttgggttgaaggcgttttgggtcggttagagggagtgcgagggggtgcggggagttcgtagttttggggagtcggtgtttcgcgcgttataaagggtcggcggcgcgttttttcgcgtttttgttcgttttcggcgttcgttttcgtcgtttttttcgatttttcgttttcggttcgggttatttgtcgtcgcggtgggcggttttcggcgagtttatatttttgtttcgttttttttcggtaggaaatttcgggattttgtaagggatgatttattttagtgatttaatcgcgttatcgagcgcggagttgttttggaggacgtaggcgggtttagttgttcgggttttttaaggttttcggatttatttaggttcgcgatttcgacgtgtagtttaggtgggttgtaggtttatggtaggaaagggagggcgttttggaagaattttttttttttatttggtgataaagtgggagaggcggtatttataatatttaatagaaagtacgggttttgggtttttttcgggtagcggagggtatttttcggatgttttgtttatttggggtagaagttcgggatttgtagcgaagtaaacgtgtggttgtgagtagggtttttttttagttacggtggttttttttattttacgaaggttaagaatatttggtttgtttatttcgcggggtttttagcgggtcgtataggagaaaggcggtgggaatgtcggtgttagttacggtgtgatcggttcggtttataggtttgagggttagttggtttaggtatcgttcggtacgattagagatagtgattgaggaagagtagttttatatttggtagtttgtttttgggagaattttagcgtgatatttgtagttttgtggttttagaaaggatggtttttatattgaagaagatatttgtgggattgagttttatcgaaatgtagaggaattaaaaatgaaaatgaaaaatgtaattagagttgtgtgttattagttttaagttttggtttttttaaattattttttggtttttttttttgggttttgttgtaaatttgttaagtatgagaataattttttatttattgagtggtattttaagttattttgttaaagtattttttgttatttttattattattattttatattgtttgtaagatacgattggagaatttttagtgtaagaattgtttgtttttttttttttttttttttacgtttttttagggaagttagttttgtattttaatgtatattatatattgaattatttgttttaatagaataaaattgtgtaaaattttaattttttttttttgtttgaattgaaatagtatatttaggtttagtttttgtagatttttttttttcgaagtagaaagttgtttttgatgattttttttttgagttttttgttagttttgaaatttataaaatttatgtttgtaaaattaagttatgtaattttttttttatgtaggttttagtttgagttattttttttaagagatttttagttttatttgggatgtgattttttgttttttgggattgaaggtagttgaagagaaatagttatattttaggtttgttataagatttaagaaattgttgtaattttatttggagttattgatttttttgaaattatatagggttttaaataatgttaagattagttatttgataagaaaaatgtttattattggattgtgatatataatgtgttttaaatattgataaattagatgaatatttattttgtatatttattaaaatagataggaaagagaagatgttgggtgtttgtataggttttttagttagtacggaatgatattttttaagatttaaaaatgttaaagttattattatttttaagaagagggaggaagaaaacgtggtaaataatattttattgcgaagtgtttttttttgattgatttaattgtggttagatttattttttgacggtgcgaagtgtattttttaatggtgttaaatagtagttgatttataataattgttgtttggtattattaaaaagtatatatttaaaattttattgttgaaatttgtttataagaataaattgattgttaaaattattttttaattttaatataattttttttatttttgttagtaaagttaagtttagtagttaatagtttttttttttatgatttattttggaggttttgagaagtttaaaaagttattaaattataataataatttttttggtttgattagttttttttttattggattttaggatgttagaggatgggagaattttatagatatttttttatggatgagaattttgtggttagttgatttgagtaaattggtttgtttaattatatagtgtagatttggttttttgatttcgggggttttttttttattattaggtttttttttatttttaatgaaggaaagtaagattgggtggtaaatttattaaatgaatgattaattaatttatttataagtatttaaaaatgttttgtatgtatataaagtgtagaaaagtgtaaaattgtataaaaattgtatataaagtatagaaaatattttgtagtttggggaatttattgtttttaggtagaaatattttgatggttagtttttgaaatagatagataaggagatacgtagaagagtttgaattttttttgtataattagtgatgaaatgtggttgatgagaagtttgaaaataattgcggagatgttttagtttttttattgtatttttatagtatttgttgttaattttatcgatttatttttattgagaattttatttaattttatttgtgtgtttatttgttaattttttttgttggattgggttttttgtttgtttttttttttttttaattttttttataattattagtatataataggtatttaatattttttgagttaatgaatattttataaaattatgagtgtaattaaatattttattggtgtttaagagatgaaatttgttattgaaaattttttttaggggttaggtagtgagtgttttatgatgttgagattggtaagaaaatataaatttattatgattggaaaggtattattcgatcgtaagttttagtagtttaattagtgattagttatttttgtattattagaaaattttattaggaggagagatagttgagaagtagaaattagatatagaagtttggaaattagttagtatttttttaaaagattggattttacgatgatttagaatatattttattatgcgatgaggttgttgatagttttttttgtatatagaggttgaataattttttaaaataaattttttaaaatgtttattttttaggaaagagataggttaagatatatgatagtaagtaaaattgagaataatttagagaaatttattttatgtatatgaaatggtaaaaagagtaatgaaattattatttaaaatttaggtaaaaggtaaagtatgagaaaaggttagagggaattaggagttagtaggaatatagagttttggaggaaaaggaaaaaagtgatttagtagaatttaagaaatatttggttgggtatagttagttatggaaaaattggtagttatgattatgtattttgtgaaaatagtaatatattagtttaatagtttatttagattaaaattaaatagttgaaagttagtatgataaaatttattattttggttatttaaaatatttttattaattgtttagaatagtttataagaagttttgttaaatgagttattatatagtattagtattttgaaaaatgtaattttagagaaaaattttttaatttaagttttagattgggattggtatttttagtagatatttatttttataaacgtaaagtttattaaattattttttaatttttattttgatgaatagtaaatattattttattatttatatataatggtgataaaatagataaataataaatatgaattgtgggtattattttagtaataaaaagttatttaaaatgaaaatttttaatttatgtttttattaatataatatttatgtgatttaaaattttgtatatggtattatttatttaagtattttttaattttttatttttgtaattttttatatttgatatatgtattaaatttgatgaatagaaatttatttatttaataaatgtttgaatgtttattagatattgggttttttgttagattttggatgtatagagtaaaataaagaagttttttttttgttaaatatattattatttttatttatgtttagattttatgtttgtttgtttgttttttgagatagagtttcgtttttgttgttttaggttggagtgtaatggtataatttcggtttattgtaattttattttttaggtttaaagtaatttttttgttttagttttttgagtaattgggattataggtatgtgttattatgtttagttaattttgtatttttagtatatacgggtttatttatgttggttaggttggttttaaattttcgattttaggtgattcgtttgtttttgttttttaaagtgtcgggattataggtgtgaattattatgttcggtagattttatggtttgaacgattttttgttagtatttgaattggatataaaataattttaatagtgttgtttatttataaattttattttgttttttttttaaaaagatttaggtgtgttatgattagtttattaaataggtatttttaatttagaaaatgatttataggtttaaaatatatattttttattagtttgaacgtattgatgaatttttaaagttttgaatatggaaaaaatatatgaagtttaataagaaagatagttttataaaaaggtaagtttagtagaaaagataattaagtaggaggagattttttacgtaaggaaaaaaataagtaaaataattagtttaaaagtatgtgtgtaagatattttattgttatttttatgtttgtttgttgatattttatagtttagttaatagatgttttaaatttt

SEQ ID NO: 659 - DNA, 8962 bp, Artificial Sequence
  chemically treated genomic DNA (Homo sapiens)
ttatttttgtttttttgttgattttagatgatgggaaatgttttttgaatttttataggtaaggtagaaatgttttatgattgagtaaattttgttattttaattttataatttattgtaatatgttagaatgattatatgtaatgtttgttttttttttataatgttttttgtaatgtttttttttttattttgaagtaaaatatatagataataaatattttaattaaaatataaagtaggaataaaatgaaaagtaatttataataaaaataagatgtaaaaatttaggcgttgtgttagtagatgtaatgaggttattagaagcgtgtattttttatagaattattaggaaagtaacgtttacgtaggtggattgatgggggaatgttgtattagtgatttaaagagtattagaattgtggttaatattagtttaattttttaatatggtgaataatttcggtaaagagtttgaaaatttgtgataattgttttttgatttatatggtaattgtattttaaagatgtaaaaaaatgtttaatatttatatgtaaagtgtttgagttttaggtttagagatttttaatttgtatgaatatcgagtagatattttaaagttatgtgggatgttggataatttttttgtgttttgtattttttgttatttataatttagtaatagtttttaaaaagggatagtatgtttttaagggtatttttttatttttgtaatgaataagagttttattgatattgagtgggtaggaggtaggggtgttggatattttttaaagatattttcgttttggaggatatggaaatttttatatgaattttattgtcgtagatatttagtatttttgttttatatttatttaatatcggaagaatttttggttataaaaattaaaaaatatttttaggggttatattgtattttttgaaaattatcgttagattattaagtgttaatgttaagaattttgtaattattttttgttatttagaagaggttgtagtaatttagagggtataataggtatttagtatataaagtatgaataataatttagtgtgggtgtaaaatgtaatgtaaattatttagagttggtaagtgggatatcgaatatttttttggtatttattttttttttttttttaaagtagaattttaagggtggatggtaatttgtggtttttggaaatattatgtgttggattgtgttgtcgagaattaagtagtatattgttgttatttttgtgtttttgttttttagttatttaggaatatatggagtttttataaacgttgtatttgattcgagtttttaaggtaagatttttataaagatatttttgaaggaaatagaatattagggaaaaatggaagattataaagtttaatttttttttatataattatatattaaattttaagtatgtattaaatttttaggtatgaaggaaattgtgttggtagtaggatataggtatgataatggagttataaaagagtttataaaaggatttttattttttttaggatagaaatgttttaataagatataatttattttaggatgtgtaatatttttattattaattgttaggtggtgatgatgtggttttgtttgtaaagtagaagttaggattgttgaaaaatgtttacgaattgttatggagttaattttttatgttatttgttggaaaaataaaaataatttgatgttattttttttttaaaaagtgggtagttgagtgttttataaaaagtttgaatggtagaatattcgaaatttagaaagaaaagattatgttgcgttttagggtgtagatatgatgagtaattttttttttttttttatttttttaaggaaatgataattatttaaatttttttggttttatttttagagatttgttttttttttggtttttttatttagtttttatatgattttgttgtgaatattaagttttttgttatattggatttaattataatgtatttgttgtaggtttttataaatatttatgaattaaagatatggaattattttagattagttttggattagtttgttggattcgttttggattaattttgttttttgagtttgggattgtggtataattttaaatttttaatttattatttttttttgttttattttttttttttttgtaatataagttatagaagttaggagtaaatgtttttgtagtagtttttgtgttttgatttatttgttatttgaaatattagtgaattaaagagattggagtatttgatttataagaagattagattgtggagaaataaaaatatttttttattttttgattgaaggaaggttttttttattttgttggaaagtaggtggtatttttaattggaagaaatttttgtagtattttttggagtttttagtggttgttgttgatgaggttttttggatttttgttttgaggtttttagagagttttttggatggtattagaggttgtagaaggttaagaattaagttagaaggttatatgttatcgtggatttttttgttattagttattgttttttaaatgatttaaagattaatatttaaatgcgtaattaaaagaattttttttaaatgtcgtgtttttttattttatggtttgtttagtaaggtttgtatatattatattgtttattattagtgtaataatatataattatggttgttttatttatattttaattatttatttagttagtaaatatgtatcgtatattttatattgtaagagaaaattagagaaatggaaaaattttttattattttaatattttatagggaagaataaatgtgttttatatgttttttaaattttatgtttaataaataggttattgaaagttatatagtatttatttggaattgatgttaaaaaaaatagagagttaaaaattatagtagttattttgtttttgtaaaatgtaattaaataaatatgttatgtatattgtatatatataagtaaatatgtaaataaaaaagtagtttatttaaaggttataataatgttgtaataattttggtagtaattttgggatttagggatatagtgtttttaaaacgtttttttgatatattgttagtagtatttttgattgtttatttaaatgttaattagtaggttaggtgttttaggattttggttttaattttgttttttgagttagaatttatattttgtaaaagtttttttgggaattttgatggtttgttaattttgggagatattgataatattgtagataaagaagtgtaagtaattgtttagttagggagataatagatatttgtatggaataataaaaggtaattaatatgattatataatttgaatagtgttgtaatagtttataaaatggaaaagttaatttgagtttagaatttgggagataggtagaattttggattgtaaagaatggtttagtaaagaggaagaaaatgggtattttaagttggtgtaataatattagtataggagaaaagatagaatattggggggagtggggagggaggaagaggttgttgatgagtttgatattattaatagagattttatgtgaggtgttagattataatttattgaatgtattgaatgtataaagtataagatagaaatttggagttatgtagatatagggaatttaggataagttattatgatgttttagataatataattcgtagattttttattaatagtaaagtaagatttaaggtgttgtgaaatagttagattttttaagaaaaataagaatataaggggttttggagataggaaaatatgattataataataaatttgtgatttttttttttttttttttttttttttttttttttttttttttttttttttttttttgatggagttttgttttcgttgtttaggttggagtaaaatggtatgatattagtttattgtaaattttattttttaggtttaagtaatttttttgttttaatttttcgagtaggtgggattataggtgtttattataacgttcggttaattttttatatttttagtagagaagggttttattatgttggttaggttggttttgaatttttgattttaggtgatttattcgttttggttttttaaagtattgggattataggcgtgagttattgcgtttagtttttgtgtgttaagtgttggaattatagtttatagtagtattttatttttttaatatattttattaggaaaaattattattgttatttttattttatagatgttaaaattgaatagagaggtatagtaatttgtttaagataatatagttagtaagtgaaattgaaatttggataattgattttttttagttaagttttttaagttcgttgttatgttgtagtttagttggcgataggtttttattaaggtagaattgtgttttgatagaggttaggaaggcgatttagagtagtaggttttgtttatgtgtttgttttttgtttttttattatttgaaaatagtgttttagtgtttagtaatagggtataatatttttttttttagattaaaaggggagttatttgtttaaggtggttgggtgttattgtattgtatagaaggttttttaagtgtgagtttggatttaggtaggttttaggttagtggtaacggacgattgttttcgtggtgttggtaggtggaaatggagggatatagttttgttcggtttatgaatttttgggtattgtttcgtttgttagagtttttgatttttgttttttttttatttgtagtaaaatagttattagtttggttgttttttttaatatttttggttattgggagttgtgattttattaaatttttgttaggaaaagttttagaaaaagcggagggagtgagagttagaggttgttgttgtcgtttgtaagaattgtaggggaggaggacgttgttatttatagtttttagagtttattgtagttgggatagttcggagtgtggttagtagttcggtaagcgttgtttaggttttggggtggtggtagttagcgggagtaggaaaggaagtatgtttttaggttgtttacgtttttgggttttggtggttttgggtattagttgggtaggttgggggagttaagggatagaagcggtatagttaaggtagttttacgtggttgtttagggtattagttggagttatcgatttgagtttataaatttaaggtaatttaggtgtggagttcgggtgggtttttttagagaggaaaatttattttttttagagaatattttttttgtaatgttatggttttttttttttttaattttaggtaagtaaatataattaataggagagtatattgaattaaataaattgggtaaatgttaattttgtatttaataatgtagtttattattttgagggtttagaaagtattttatttgattggttagatgttattttttttttaagtttatttttaatatagttttgttagtatgtttgtgttggtttatatattggttaatttaaaggtattaggtatttgtttttttattagttttttttgtaaatttttgttttagatttttagttgtatagtatttttatgagatttttagttatatattatttattttattgtttatatagttttattttttaaaattaaaaatgaatattttgtgttttttgttatataattttattgttgttttataaatgatttttaaaatattattagtttttgtatgtttttgtatttttattttttttttgttttatatttgatttatttattttattgaatgtgattttttatttttttttttttttgtttattatgttttgggatatggtttattttggttatttaaaggtatatgtaattgagaggaggtttaatttagataaaatattatttttgagttgtaaattattttttttaattgaaatgttaaaaataagattttttagaaattaattaaattatatagtttatttaatatttttagttagttattttttaaatggtaaatttgttagtgtgatttattttttttttttatattatattttattatgaaagatgtgttttttttttataattataaaattaaagtaatttgttaaaaaataatgtaatattttgagattttttagtgtataatattaatttttttaaaatttttattgtaattgggttattttggagggtattatatattattttggttttataataagaagagattttttttttttaaaaataattattttaaatatcgtattttaaagtgataatttaggttatatttatattttttgggaattgtcgtaagttaaaattttaaggaaaataatagtttttttaatattaattttgtttgtttatgagtagaatgtagatttggttgttggtttttttgtagtatgttgggtttatgtttgggagtttttttttttgtttgtagttagcgttgaaaataataagtaaaatatcggaggtagaattagatagggtaaaggtttgatttatatggtgagtatatagggaattatgattggttattttgtttttttattttgtgggtaagtttttaaagttttggagattcgtttttttggtaggaattgttgagttaaaattatagaaatataatttagataaattgttatattgtttaattttaaattatattatttttttttagtatttttttatgaaaaatttaatttatatatttggttgtttaaattaagaatttgttttaatttgttttgtttttagagttatgatatttattaggtgaatattaatatagttaattttattttttggtaaagtgtattttagtataaagtagatatttatttatttattttatataatattagtaggataatgttttttaaaggtaaaatgtatttattatttttgttttaagtttaaggtgaatatttttaaaaatttttttagaaaatttgtttagttatttatatgtatataaagagatattgaagaaaagatatatatatattttttttttagggttttagttttatatgattttgtgattatgaataaattatttttaaataatttttataaatgaaaaattcgtcgtatatattgtttgaatttatatgatttgtaattttttaattagatagattattttttaatagaaattgtttagattaaaatagatatattttagtatgaatatatagtatatatagtaaaaatatgttaggaaatatttttttgttgaaattattttacgtaagagattgatattttttagtaaagattttatattattatttatatttttgtattaaagatttggggtaggggaggataataattttttaattgtattaaaaataaataaataaaaatggatttttatattagggatattagtatatagaattttggaatttttaagttagaagaatgttaagagtttatttaatttatatttaatttttacgttttaattttttatttttttttttttttttagtattaatgattttattaagtagttgtttaatttttatttgaatgtttttagtgatggagaatttattattttttttatttagttattttaaaagtatttacgtgttttttttaattttgtttttatatattaatatagtttttgtattttatatattataatttgtgagtattattgtaattatagatttgtttttgttttttgagaaaatttgaagggtaaagattaatttttattatatttataaaataatattattagttaatatggattgagtatttttagtgtgttagttttatgttttttgtatatattaatttatttaaaattatataataattttgtgaaggagattttagtattaattttattttatagttgtagaaattgaggtataaatggatgaagtaaattttttaaagtaaaataataagaggtagatataggttttaagtttagagatattgaatttatagtttgtattttagttatcgcgttgtatagaagttatggtatatgtgggtgttgttatgttttgattatggttgggttattgtttttatattaggaagtaaaataaagttattttgattaattgatttagatatttgtaaggtattttttttaaattttttttttttttatttttatttttgagtttaagataaggataagattgatttgtttttagaggtatagaataataataataatagtaaaaataggaaagtaatttattatttataattttttttgttgtttgttttttttttaattttatttaaaattatgaatgtagtggttttatattttttaattttggttttgttatttattaattgtattttttggataagttattgattttttttaaaatagtttttttatttgtttgtttttaatatgaattttagggtttttattttattagttattttttattttttaattagaaataaattttattaaattaatatttttttataatgttttttagtagattaaaattatatttgattgattagttgaaaaatagtttatatatttatttataaaggatttggttatattttaattatataaaatttaaatttatagtttgggtttttattgtgatattgggttttttttagaaaattgattttgaggaatgatattagggtagattaatttgtgaataaatagttattataataggatatttttgaagagattaataattattttattaattttatttattgattatatttataaaattgtggatttttgaaatataataaagatattggtattttattagaagtttgaagatatgagagatttattttttttgtaatgtgagaaatagatattgaatatgttttttaaattagtttttgtattttatttttagt

SEQ ID NO: 660 - DNA, 8962 bp, Artificial Sequence
  chemically treated genomic DNA (Homo sapiens)
attggaaataaaatataaaaattaatttgaaaggtatatttaatatttattttttatattataaaaaaagtagattttttatatttttagatttttagtagaatattagtatttttattgtattttagaagtttatagttttataaatatgattaataagtaaagttaatgaaataattattggtttttttaaaaatattttgttgtgataattatttgtttataagttaatttattttaatattattttttagaattaattttttaaaaagaatttaatattatagtagaaatttaaattgtaggtttagattttatatgattaaaatatgattaaattttttatgaataaatatatgagttgttttttaattgattaattaaatatagttttaatttattggggaatattgtgaaaaagtattgatttggtggaatttatttttagttgagaggtgagagatggttaatggggtaaaagttttgggatttatattggaaataaataaatgaaaaaattgttttggaaagagttagtaatttgtttaagagatatagttgataagtggtagaattaagattaaaaaatgtgaaattattgtatttatgattttaaataaaattagagagaggatagataatagggagagttgtgagtggtgggttatttttttgtttttgttgttgttgttattgttttgtatttttaaaggtaaattagttttatttttgttttaaatttaaagatgagggtaaaaggaaagagaatttggagaaaatattttgtaaatgtttaaattagttgattagagtggttttgttttgttttttaatgtggggatagtggtttagttataattaagatataatagtatttatatatgttatgatttttatatagcgcggtggttagggtgtaggttgtgaatttagtatttttggatttgaagtttatatttattttttattgttttattttgaaaagtttattttatttatttgtgttttagtttttataattatgaaatgagattaatattgaaattttttttatagaattgttgtataattttaaataagttgatatgtgtaaaaggtatagagttggtatattagaaatatttaatttatgttagttagtaatattattttgtaaatgtaataagagttagtttttattttttaggtttttttagaaagtaaaaataaatttgtagttatagtaatgtttataaattgtaatatgtggaatatagaaattgtgttaatatgtgggggtagaattaaaggaggtacgtaagtatttttagaatagttagatagagaaggtagtggattttttattattggaagtatttaagtagaaattagataattatttggtaaggttattggtgttgagggaaaggggaaaagtagaaggttaaagcgtggaagttgaatatgaattaaatgaatttttagtatttttttaatttaagaattttaggattttatatattaatgtttttaatgtggaagtttatttttatttatttatttttagtataattgaaaagttattgtttttttttgttttagatttttaatatagaaatgtagatgatggtgtaaaatttttattaaaaaatattagttttttacgtggagtaattttaatagagagatgttttttaatatgtttttattatgtatgttgtgtatttatattgaggtatgtttattttgatttgaataatttttattggaaaataatttatttgattaaaaagttatagattatatgaatttaaataatgtgtacgacgagttttttatttataaggattgtttaaagatgatttgtttataattataaaattatataaagttagaattttagaaggaaaatgtatgtatattttttttttaatatttttttgtatatatgtgagtgattaaataagttttttaaggaaatttttgaaagtgtttattttagatttggagtaagaataatagatatattttatttttaaaaggtattgttttgttaatattatatgaaataagtagatagatgtttgttttgtgttaaaatatattttgttaaaagatggagttggttatgttgatatttatttagtgagtattatagttttaggggtaggataagttagaataagtttttagtttaagtagttagatatatggattagattttttataagaaaatgttagagagaaatgatatgatttagggttaaataatatgatagtttgtttgggttgtgtttttatggttttgatttaataatttttattagaggaacgaatttttagaattttggaaatttatttataggatgaggggatagaatgattagttatggttttttgtgtatttattatgtgaattagatttttgttttatttggttttgttttcggtattttgtttgttatttttaacgttaattatagataagagaaaaaatttttaagtatgaatttagtatgttataagaaagttaataattaagtttgtattttatttatgagtaggtaagattagtgttagaaggattgttattttttttggggttttagtttacggtagtttttaaagggtgtgggtgtgatttagattattattttgaagtacgatatttaaaatgattatttttgagaaggagggatttttttttattataagattaagatggtatgtaatattttttaaaataatttagttataatgagagttttaaaaaggttaatattatatattaaaagattttaaaatattatattattttttggtagattattttggttttgtaattgtaaaagaggaatatattttttataatgaagtgtgatgtaaggaaaaaaagtgagttatattagtaggtttattatttaaaaaataattaattggaaatattgaatagattgtatgatttagttaatttttgagaagttttatttttaatattttaattagaaaaaatagtttgtaatttaaggatagtattttatttgaattaaatttttttttagttatatatgtttttaagtagttaaggtaaattatattttaggatatgatgaatagagagaaaaaaaaatgaagagttatatttaataggataaataagttaaatatgaagtagaaaaaaggtgaaagtataaaaatatataagaattgatgatattttgaaagttatttataaggtagtaataaaattatatgataaaaagtataaggtgtttatttttagttttagaagatgaagttatgtagataatggaataaataatatgtaattaggagttttataaaaatattatataattaaaaatttggaataggagtttgtaggaagggttaatgagggagtaagtgtttggtgtttttgaattaattaatatataagttaatataaatatattaataaaattgtattgaaaataaatttgaaaagaaggtagtatttaattaattaaatagggtgttttttaaatttttagaatgataaattatattgttggatgtaaaattagtatttgtttagtttatttaatttagtatatttttttattagttatatttatttatttgaagttaaaaaaaaaaaaagttatgatattgtaaagggaatgttttttaaaagaaatagatttttttttttagagaagtttattcggattttatatttgagttattttgagtttgtgggtttaggtcggtagttttaattgatgttttgagtagttacgtagaattgttttagttgtgtcgtttttgttttttggtttttttagtttatttagttggtgtttaagattattaggatttagaggcgtgggtagtttgggaatatgtttttttttttgttttcgttggttgttattattttaggatttgggtagcgtttgtcgagttgttaattatatttcgggttgttttagttgtaatgagttttagaggttgtgggtggtagcgttttttttttttgtagtttttgtaaacggtagtagtagtttttggtttttatttttttcgttttttttggggttttttttggtaggggtttggtgagattatagtttttagtgattagaggtattagggagagtaattaaattagtgattgttttattgtaggtgaagaaggggtagagattagaggttttagtaggcgggataatgtttagggatttatgagtcggataaagttgtatttttttatttttatttgttaatattacggaagtagtcgttcgttattattgatttgaggtttgtttgggtttaagtttatatttggagaattttttgtgtagtgtagtggtatttaattattttaagtagatggttttttttttaatttgaggaaaagagtattgtgttttgttattgggtattgaaatattatttttaagtggtgaagaagtagggaataaatatatggataaggtttattgttttgaatcgtttttttggtttttattaaggtatagttttgttttgataagggtttgtcgttagttaagttgtagtatagtagcgggtttgaagagtttggttgaaaaaaattagttgtttagattttagttttatttattagttgtgttgttttgggtaagttattgtatttttttgtttagttttgatatttgtgaaataaggatgataataataattttttttgatagggtatgttgggaggataaaatgttattgtaaattatagttttagtatttaatatatagaggttaggcgtagtggtttacgtttgtaattttagtattttgggaggttaaggcgggtgaattatttgaggttaggagtttaagattagtttggttaatatggtgaaatttttttttattaaaaatataaaaaattagtcgggcgttgtggtggatatttgtaattttatttattcgagagattgaggtaagagaattgtttgaatttggaaggtggagtttgtagtgagttgatattatgttattttattttagtttgggtaacgagagtaaaattttattaaaaaaaaaaaagaaagaaagaaaaagaaagaaagagaaaaagagagaaagaaggaattataaatttattattatgattatatttttttgtttttaggattttttgtatttttgttttttttgaaggatttgattgttttatagtattttaaattttattttgttattgatagagaatttgcgaattatattgtttgaggtattataatgatttgttttgggttttttgtatttgtatggttttaggtttttgttttatgttttatgtatttagtatatttaataaattgtaatttggtattttatatgaggtttttgttaatgatattaggtttattaatagtttttttttttttttttattttttttaatattttgtttttttttttgtgttgatattattgtattaatttagaatgtttattttttttttttttgttgggttattttttatagtttagagttttgtttattttttagattttgggtttaaattggtttttttattttatgaattattataatattatttaaattatataattatgttaattattttttgttattttatgtaggtatttattgtttttttaattgaatagttgtttatatttttttatttataatattattagtgttttttaaagttggtagattattagaatttttaggggaatttttataaaatgtagattttgatttaggaaatagggttgagattaaagttttagaatatttagtttattgattgatatttaaataagtagttagagatgttattggtagtgtattagagaaacgttttgaaagtattgtgtttttaaattttaaggttattattagaattgttgtaatattattgtaatttttgagtaggttgtttttttatttgtatgtttgtttatgtatatatagtgtatatgatatatttatttaattatattttatagagataagatgattattataatttttggttttttattttttttaatattagttttagataaatattatataatttttaatgatttatttattaaatatgggatttaaagaatatgtaaaatatatttgtttttttttgtaaaatattaaggtgatgaagaatttttttatttttttgatttttttttgtagtgtagggtgtgcgatatatatttgttgattgaatgaatggttgaggtgtaaataggataattataattgtgtgttattatattgatggtaaataatgtgatgtatatagattttattgaataaattataaaatagaggaatacggtatttggggaaaatttttttaattacgtatttgaatattggtttttgggttatttgagggatagtgattggtggtaggaaggtttacggtgatatgtggttttttagtttgatttttggttttttgtagtttttggtgttatttagaggattttttggaagttttagagtagaggtttaagaggttttattaatagtaattattggagattttagaagatgttataggaattttttttaattagagatgttatttgttttttaataaagtggagaaaatttttttttaattaaaaaataaagaggtatttttatttttttatagtttggtttttttgtgagttagatgttttagtttttttggtttattggtattttaagtaataggtgagttaaagtatagagattattgtagaaatatttgtttttggtttttgtggtttgtgttataggaagagaagaggtgggataggaaggggtggtaggttgagaatttgagattgtattataattttaaatttaggaaatagggttggtttagagcgggtttaataggttggtttagagttaatttaaggtaattttatgtttttgatttatgggtgtttatggaaatttgtagtaaatgtattatagttaagtttagtgtagtaggaaatttgatgtttataataggattatatggaggttgaatgaggagattaggaaaaggataggtttttggaaatgagattaaagaaatttaaataattattatttttttaaaaaaataaaagaaagaaaaaaattgtttattatatttatattttgaggcgtagtataattttttttttttagatttcgaatattttgttatttaggttttttgtaggatatttaattatttattttttgggagagggatagtattagattatttttgtttttttagtaggtagtatagggaattgattttataatagttcgtaaatattttttagtagttttgatttttgttttgtaggtaaggttatattattattatttagtagttaataatggaaatgttatatattttgaaataagttatgttttgttaggatatttttgttttggaggaaatgaaaatttttttgtgaatttttttgtaattttattgttatatttgtgttttattgttaatataattttttttatgtttgaaaatttaatatatatttaaaatttaatatatgattatgtaaagaaaagttaagttttatagttttttatttttttttagtgttttattttttttaaaaatatttttatagggattttattttaaggattcgggttaaatgtagcgtttgtaaaaattttatatgtttttaggtggttaaagaatagaaatataaggatggtaataatatattgtttagttttcgataatatagtttaatatatagtatttttagaaattataaattattatttatttttggaattttgttttagaaaggaaagaaaaataaatgttaaagaaatattcgatattttatttattagttttgggtaatttgtattgtattttgtatttatattaagttattgtttatgttttatgtattgaatatttgttatattttttaagttgttgtaattttttttaggtgataagaggtagttataaaatttttggtattaatatttgataatttaacgatagtttttaaagggtgtaatatgatttttaggggtgttttttgatttttataattaagagttttttcgatattgagtgggtatggggtaagggtgttggatgtttacgataatagagtttatataaggatttttatgttttttaggacggaaatgtttttaaaagatatttagtatttttgttttttgtttatttaatgttagtagaatttttgtttattataaaaataaaaaaatatttttgggggtatattgtttttttttgaaaattattgttagattataaatagtaaggggtataggatataaaagaattgtttaatattttatataattttggaatatttgttcgatatttatataggttaaaaatttttgagtttggaatttaagtattttatatgtaaatattaagtatttttttgtatttttaaaatgtaattgttatatgaattaaaggataattattataggtttttagattttttatcggagttgtttattatgttgaaaaattaggttggtgttggttatagttttaatgttttttgagttattaatataatatttttttattagtttatttgcgtgggcgttgtttttttagtgattttgtggaaggtgtacgtttttgatgattttattgtatttattggtatagcgtttaagtttttgtattttgtttttattataaattattttttattttatttttattttatattttaattagaatatttgttatttgtgtattttattttagagtagaaaagaagatattgtaaaagatattgtaaaaaggaggtaggtattgtatgtaattattttgatatattatagtgaattataaagttaaggtagtaaaatttatttaattataaaatatttttattttatttgtgaggatttaaggggtattttttattatttaaaattagtaagaagataagaatga

SEQ ID NO: 661 - DNA, 9473 bp, Artificial Sequence
  chemically treated genomic DNA (Homo sapiens)
gttgtgttttttttgttagagaattaggaggtatacgattgtaataatagttttattattatataggcgtgagttatcgcgttcggttgtagtaaaaatttaagtattgaaattttttagaattatttttattggtagtagaattgaacggggttttattattttttagcgttatttagtcgtagtattagtgattattatcgtaaaggaaaaggaaataaggttagcgcggcggtttaggtttgttattttagtattttgggaggtcgaggcggtagattacgaggttaggagatcgagattattttggttaatacggtgaaatttcgtttttattaaaaatataaaattagtcgggcgtggtggtgtatgtttgtaattttagttattcgggaggttgagacgggagaatcgtttgattttaggaggtagaggttgtcgtgagtcgagatgtcgttattgtattttagtttgggtaataagagtgaaattttattttaaaaaaagaaaaaaagaaaaaggaattaaggtatgttaattgaaaaataattttttatatttagaaaaattaggtgaatttataaattattgaaattaagaagtttataagattaatttataaaaagttattaatatttttagtaataataatattattttaatagtaatttaaatattaaaataaatgtaataaaagttttggataaaattatgaaatatgatagaaggttataaaagaaggtttaaatgggagatttttatggatgggataatttagtattattaaagtgttaatttttttttaagttaatttgtgtattttattaaaattttaatagaattttttgtggaattaggaagttgattgtaataaatatagaagataaaggtttgagtatagtcgtggtgattcggggagtagaggtaggaggaggagggtttatttattaggtatttggatagattataaatttgttattagtcgtgataagggggagagaggttaaattggtcgagtagaatttagatttttaggtagggatgtgtgtagggatttggtttgttttggggttggttaatttttggtacggaatggtttttttaggaacgggtgttattgggatagttgtttttttatgtggatgatggtataaaagtatagtttttttaaatttaagattaaaatattattatgaggaaatagaatatttttattgtttagggtaaggatagattttttataaaagataagttatattttaagagatggataaaaagataagatggataatttgagtatattttatggtgaatttttttttacgttaagattttagataagggtgaaaagtaggattaaggtttagagaagaaaaattttgtttaaaattataattgtttaattttgtatatatttttttttttaaattgaaagttagtattttatagtattggtgtgatattcggtaggttcgagggtttagttgtttttagttgtggttttaagaaggtaaagtattcgggtggggtggagggagtagtttcgtgttttattggttgatagtggtgtttaggtttagtttttttttttgtatagatagtagagtttcgtttagtataggttttttttcgttagtgtatatattgttagttattggaattggtttgtaagatagtttgttgtggcggttttgtaggtatagggtatataggtattcgtgtacgtagtttttttgtttttttatgttttgtatttttcgttataaggaaatttttgtttttaggattgtattaaataggatttggaattaattggtgtttaagtttaaattttgttagtggttgtttgtttttttggtatatatgcgttttgtcgagatgtatttggtattaggtgggatgtgtttattggtttttaaaacgagaatatatagtagtttttttggatgtttgtttaatattattttcgggatttgttcgtagattttaattttttatgggtgtggaagagtttggaaattacgtgtgtgtaggtgtgtggtatgtgtataggggtgtgtttatgtggtgtgattttggggtatgagtgtggtatgtgtacggtgtgtgtgagtgtggtatgtgtatggcgtgagtttgggttgtgcgagcgtggtttttatgtacgagtgtgagtatggagattttttggtagggaaggagttagggtttttttttgtcgtttaggtttgagtgtagtggtataattttagtttattgtaatttttgtttttcgggttttttgtttttgggattataggtatgaattattaagtttagttaatttttttattttttgtttagttttggttttgttatgttgtttaggttggtttggaatttttttttttaagcgatttttagtttttagttttttaaagtgttgggattataggtatgagttattatttaagagattttgatgttatagatatttgatttatatattttttggatagtttacgtgtgtttattattatagttagggatggttgtagatgaataaggtgttgacgtggtttttgtagtttttaaataagtaatttgttttgagatgataattaaagtttttttgtgttttttatatttaagagtgattgtgaggcggaggggtttagttttttttgtaggcgggaatgagtggatgggtggattaatagaggttgttataggagagagggaggtttggtttgggaatagagttgtgatcgtgtttttttttagggtaggggttgaaggatttttttattttagtgatagggttatagtatgtttaaggaggttttagaggaggtttcgggagttttgggagagtttggttagtttttttgaagggaggaagtggggttttgtgagagggatggtgtagtagtttttatatttgttatttcgtgtggtcgggtttagttttaggtaaggttttaggtatgtttttgggatagacgtgggagggagattagtaggtaggttttttttagggaggtatggagcgggttttcggggttaggtggagttttttatatttgtgtttttaaggatttatattaggataatggttataggcgggtatttgtagtcgttttggttagtagtgagacgggtagagagtttagttagatagttcggtttttgttttttttcgtttgttcgtatagagagggttgtatgtaggtgagggtttattatttgaagagttttattagtttcgaggttatgagttattgaattttttagggggttttggcgtttgaggttttttaggttattttgttgtttagagagggttgaggatttttgatttggagttttaaaggggaagggtattttaagattagttagttatttatttttaggtgggaaaggggtagggtttagatatggtttttttttttttacgttttgaaattattttgggttgtgttggtcgagagtcgcggggattagatttgagttggacgtgagttttattttagacggagtagttattttgtaagcgatttttttgggatcgatattatggaggggtatagatgggttttagttgtgttgggtggaagagaaaatatgttttgtcggttttttagtaagtgttttgttttttggattgagatgtaggttagtagtaagtagggaggttttgggggtgttgggggttgttttgaaaggtatttttgagttaagatttggttgttgggaaggaattatttttttttttttagtcgtaaaaagaattggatattagtttttaaagaagttattagtaatgtaattgtttatatggaggatattttttgtttgaggggttagataggtttgttgggtaatttaggaggtttggatgatcgtttattttagtgtttttgggatggaaagttttatattttgagaatttttagtttttgggtaatttggggtggttagttattatagtttgtggtttgggtttatgatagtaggtagaaatgacgtggattgtcgttagtcgggtatagtggtttacgtttgtaattttagtattttgggaggttgaggtatgtggattatttgaggttaggagttcgaaattagtttggttaatacggtgaaattttatttttgttaaaaaaaaaaaatatatatatataaattagttaggtatggtgacgtgtatttgtggttttagttatttaggaggttgaggtataagaattatttgaattcgggaggtggaggttgtagtgagattgtattagtgtattttttagtttggtaatagagtaagattttgttttaaataaataaaataaaataaataaaaagacgtaagatgtggatcgttggagaatgggggtgttgtttgtagttaaaacggagtgggggtgtttagtttagggttagaatgattttattttcggtattttttagtgaggttttgtggtttatttaagaaattagttttttttgtaggtaacggtttagttggtttggtttggaggttttttttaaatatttatatttatatttaagatatagttttgagatttgattcgtatgattgttatgggataagtttttatttgtagtttaaatttgttttttaatttatattaggggtttggaattttagatcgtatttgaagtgttggtgttatatatattttaatatttgtacgttggtaataaaatcgttcgttttgtagtatagttggggttatttgattttttttttgttttttttatttgagtttagtggttgggtagtaggggatgtatggttattggtcggttaggtgtagtttttagttggggtgtttagaggacgtttgtgttttttttttttttatttttttgttatttttggaggtagagaattttgttcgttagttttatggggaatgttaataggtaggggtagtattgtagagattttattatggttttttaggtttttaggtttttttgttttttgtttgggttttagggttgtttggttgtaggtgcgttcggggaggttttttttataaatttggtggaagggtagtgggtaaatttaggagttagttcgggttttttaaatttcgtttttgtttcggatatttttatttattaggagggttttttggcggtttttgtttaatttttttttttttagaaattagtatttaggtataggaggggaggttttttttggtggtttaggttttggcgggattattttttaaagaattttaggagtgggtggtgtttttttggtttttatgggtttttgtttgtgaggtcggataagcgtagggagtttggggttttttagagtgtaggaagtgcgtatagggtgtttttaggttggggagtataggtaggggacggtgcgtgggggatggcgtttggggtatgggggatggggtgtgggaaacggtatgtggggcgtaagggatggggtgtggaggattttttttttttttttggcgtaaggatggttagtggggcgtggggatggcgtgtggggatggcgagtgggggatgggttgtgagggatagtgtttgggatgtggggttgtagttttagtttatagtatggttttatgatttcggttatttttttgttttaggcggggtcgttaaggttttaggaggagaaatacgggatatgtcgtggaagtcggggttttatagaggtgagtagggattgttattggttttgttttggggtttagtgggggttaatattatttttttttttttttatggtaaagagttagttcgcggggtggttattgtagtgttttttaaggagggtgttttttgttcgagaggaagtgatcgttttagtttggttttttttgggattggggtgtaggcgattttattttttttgttttattttgttttttttagataatcgtgtgttttttattaggttttttttagtttttgagagtttttttgatgtaaatttgtttttattttagggcggttatcggttttgtttatattagtttttaagggtgtgggtgtttcgggagtgtgggtgtttcgggggcgtgggtgttttaggagtgtgggtgtttcgggggcgtgggtgtttcgggagtgtgggtgtttcgggggcgtgggtgtttcgggagtgtgggtgtttcggaggcgagggtgtttcgggagtgtgggtgtttcgggggagtgggtgtttcgggagtgtgggtgtttcggaggcgagggtgtttcgggagtgtgggtgtttcgggggcgtgggtgtttcgggagtgtgggtgtttcgggggagtgggtgtttcgggagtgtgggtgtttcggaggcgagggtgtttcgggagtgtgggtgtttcgggggagtgggtgtttcgggagtgtgggtgtttcggaggcgagggtgtttcgggagtgtgggtgtttcgggggcgtgggtgtttcgggagcgtgggtgtttcgggggcgtgggtgtttcgggagtgtgggtgtttcgggggcgtgggtgtttcgggagtgtgggtgtttcgggggcgtgggtgtttcgggagtgtgggtgtttcgggagtgtgggtgtttcggaggcgagggtgtttcgggagtgtgcgtgtttcgggggcgtgggtgtttcgggggcgtgggtgtttcgggggcgtgggtgtttcggaggcgagggtattttagaagtgtgagtgttttaggggcgtgggtgtttcgggggtgtgggtgtttcgggggcgtgggtgtttcgggagtgtgggtgtttcggaggtgagggtgtttcgggagtgtgggtgtttcggaggcgagggtgtttcgggagtgtgggtgtttcgggggcgtgggtgtttcgggagtgtgggtgtttcggaggtgagggtgtttcgggagtgtgggtgtttcggaggcgagggtgtttcgggagtgtgggtgttttaggggcgtgggtgtttcgggagtgtgggtgtttcggaggcgagggtgtttcgggagtgtgggtgtttcggaggcgagggtgtttcgggagtgtgggtgtttcgggggcgtgggtgtttcgggggttgtgggtgtttcgggagtgtgggtgtttcggaggcgagggtgtttcgggagtgtgggtgtttcggaggcgagggtgtttcgggagtgtgggtgtttcgggggtgtgggtgtttcgggggtgtgggtgtttcgggagtgtgggtgtttcgggggagtgggtgtttcgggagtgtgggtgtttcggaggcgagggtgttttaggagcgtgggtgtttcggaggcgagggtgtttcgggagcgtgggtgtttcgggggcgtgggtgtttcgggagtgtgggtgtttcgggggagtgggtgtttcgggagtgtgggtgtttcggaggcgagggtgtttcgggagtgtgggtgtttcgggggcgtgggtgtttcgggagtgtgggtgttttagaggcgagggtattttagaagtgtgagtgtttcgggggtgtgggtgtttcgggggtcgtgggtgtttcgggagtgtgggtgttttagaggcgagggtgtttcgggagtgtgggtgttttaggggtgtgggtgtttcgggggcgtgggtgtttcgggagtgtgggtgtttcgggggagtgggtgtttcgggagtgtgggtgtttcggaggcgagggtgtttcgggagtgtgggtgtttcggaggcgagggtgtttcgggagcgtgggtgtttcgggggcgtgggtgtttcgggagcgtgggtgttttaggggtgtgggtgtttcgggggcgtgggtgtttcgggagtgtgggtgtttcgggggagtggatgtttcgggagtgtgggtgtttcggaggcgagggtgtttcgggagtgtgggtgtttcggaggcgagggtgtttcgggagtgtgggtgtttcgggggcgtgggtgtttcgggagtgtgggtgtttcgggggcgtgggtattttagaagtgtgagtgttttaggggcgtgggtgttcggggggcgtgggtgtttcgggggtgtgggtgtttcgggggtcgtgggtgtttcgggagcgtgggtgtcggggattgtagggatatgggtttttttttttatttttgtcgtttagggtattttttgtgaggattcggagttcgtgagtttttatttttttgagttcgattttttggtgttttcgtttgtatttttagtttttttttaaattagattagttttttaggggcgtcgacgtgtgaaattgattttaaagaaaataggtagtggtttttttttcggttttacgtggtttagtagcgtttatttttcgttttttttttcgcgtttagtaattaatttaggtcgtttttgtagaattcgggtttttgtttatcggtttatagcgtttatttgaggtttcgtttttttagtaaaggtcgttttttcggaacgcgttttttgcggtttttttagagtttttttcgcgcgtttttttagtttcgttcgttttttttcggggtttttttttttcgtttgtttttaggttcgttttttttcgcgggttgaggtaggttcgggtagtacggtcgtttcggggcgggggttattttttattatcgcgtggtgtttatagtttacggcgttttcgggtgacggttttttcggttgtagggcgttttgaagagcggtttgttcggagttgagcgtacggggttgtttcgttttgggcgtttttggtttttattagtttcgtttttttatgggtaaaacggcggttttgtttgtttataagtaatcgtcggggttacggaggggttaggagttgcggcggggggttgtgtttttaggatcggttttaggaggattcgcgcgaggtttggagtttttaggggtcgcgggggatagaggggttttaagcggaggcggggaaggcggtagaagtttaggatcgttaagagttggcgaggaagttcggggttcgttgtcgggggagtcgggtaggggtcgcgtttcggattaggacggaggtttggggaaggcggatttggtcgtcggagacgcggtgcgggtggagacgagggatttggattttcgcgggcggttgtacggatttttacgcgcggtttacgtgggttttaggggggtgttcggtattcggggtcgcgtcgtttttttttcgtcggtatcgattcgtagttttacgtttacgcggcggcgttcgtagtttttttcggttcggttttcgcgcgtgttttcgagcgcgttttcgggattagttttcggaagtagagaggttaggtcgggaaggatgggcgacgggggtggttgattcgggagtacggtagggaggatatttagttaggttcgcgagtagcgtcgttttttttttttaggacgggcgggaatttgcgatgttttcgtcgcgtgggtcgtggggcggttttcgaggtattgggcggggtacgcggtgggcgttttacggaattcgtattttttagt

SEQ ID NO: 662 - DNA, 9473 bp, Artificial Sequence
  chemically treated genomic DNA (Homo sapiens)
attgggaaatgcgagtttcgtgaagcgtttatcgcgtgtttcgtttagtgtttcggagatcgttttacggtttacgcggcgggggtatcgtaggttttcgttcgttttggaggaggggagcggcgttgttcgcgggtttggttgggtgttttttttgtcgtgttttcgggttagttattttcgtcgtttatttttttcggtttggtttttttgttttcgggggttgatttcgagggcgcgttcgggggtacgcgcggaagtcgggtcgaagggggttgcgggcgtcgtcgcgtaaacgtgaggttgcgggtcgatgtcggcgaggagaaggcggcgcggtttcgggtgtcgggtatttttttggggtttacgtgaatcgcgcgtggaaattcgtgtagtcgttcgcggaaatttaaatttttcgtttttattcgtatcgcgttttcggcggttagattcgttttttttaggttttcgttttggttcgaggcgcggtttttgttcggttttttcgatagcgagtttcgggttttttcgttagtttttggcggttttgggtttttgtcgtttttttcgttttcgtttggggtttttttgtttttcgcgatttttgagagttttagatttcgcgcggatttttttggggtcggttttgagagtatagtttttcgtcgtagtttttggttttttcgtaatttcgacggttatttgtggataaataggatcgtcgttttgtttatgggaagacggggttggtgagggttagagacgtttagggcgaggtaatttcgtgcgtttagtttcgagtaggtcgttttttaggacgttttatagtcgaggggatcgttattcgggagcgtcgtgagttgtgggtattacgcggtggtggagagtgattttcgtttcggggcggtcgtgttgttcgaatttgttttagttcgcgaggggagacgggtttgggggtaggcgggagagggaggtttcgggaggaggcgagcggggttgagaggacgcgcgggaggggttttggagaggtcgtaggaggcgcgtttcggagggacgatttttgttgggaggacgaggttttaggtggacgttgtgggtcggtgggtaggagttcgagttttgtaggagcggtttaaattggttattgagcgcggaagaagggacggaaggtgagcgttattgggttacgtggggtcgagagaaaggttattgtttgttttttttaaaattagttttatacgtcgacgtttttagagaattggtttggtttggaaggaggttgaggatgtaggcggggatattaaagaatcgggtttaaggaggtgggaatttacggatttcgagtttttataggaggtgttttgggcggtaggagtgggaggggaggtttatgtttttgtagttttcgatatttacgttttcgggatatttacgattttcgggatatttatattttcgggatatttacgtttttcggatatttacgtttttgggatatttatatttttgggatatttacgttttcgggatatttatattttcgggatatttacgttttcgggatatttatattttcgggatattttcgttttcggaatatttatattttcgggatattttcgttttcggaatatttatattttcgggatatttattttttcgggatatttatattttcgggatatttacgttttcgggatatttatatttttgggatatttacgttttcgggatatttacgttttcgggatatttacgttttcgggatattttcgttttcggaatatttatattttcgggatattttcgttttcggaatatttatattttcgggatatttattttttcgggatatttatattttcgggatatttacgttttcgggatatttatatttttgggatatttatattttcgggatattttcgtttttggaatatttatattttcgggatatttacgattttcgggatatttatattttcgggatatttatatttttgggatattttcgtttttggaatatttatattttcgggatatttacgttttcgggatatttatattttcgggatattttcgttttcgggatatttatattttcgggatatttattttttcgggatatttatattttcgggatatttacgttttcgggatatttacgttttcgggatattttcgttttcgggatatttacgtttttgggatattttcgttttcggaatatttatattttcgggatatttattttttcgggatatttatattttcgggatatttatattttcgggatatttatattttcgggatatttatattttcgggatattttcgttttcggaatatttatattttcgggatattttcgttttcggaatatttatattttcgggatatttataattttcgggatatttacgttttcgggatatttatattttcgggatattttcgttttcggaatatttatattttcgggatattttcgttttcggaatatttatattttcgggatatttacgtttttgggatatttatattttcgggatattttcgttttcggaatatttatattttcgggatatttttattttcggaatatttatattttcgggatatttacgttttcgggatatttatattttcgggatattttcgttttcggaatatttatattttcgggatatttttattttcggaatatttatattttcgggatatttacgttttcgggatatttatattttcgggatatttacgtttttgggatatttatatttttgggatattttcgttttcggaatatttacgttttcgggatatttacgttttcgggatatttacgttttcgggatacgtatattttcgggatattttcgttttcggaatatttatattttcgggatatttatattttcgggatatttacgttttcgggatatttatattttcgggatatttacgttttcgggatatttatattttcgggatatttacgttttcgggatatttacgttttcgggatatttacgttttcgggatatttatattttcgggatattttcgttttcgggatatttatattttcgggatatttattttttcgggatatttatattttcgggatattttcgttttcgggatatttatattttcgggatatttattttttcgggatatttatattttcgggatatttacgttttcgggatatttatattttcgggatattttcgttttcgggatatttatattttcgggatatttattttttcgggatatttatattttcgggatattttcgttttcgggatatttatattttcgggatatttacgttttcgggatatttatattttcgggatatttacgttttcgggatatttatatttttgggatatttacgttttcgggatatttatattttcgggatatttatatttttggaggttggtgtgagtagagtcggtgatcgttttggggtgaaagtagatttgtattagaaaagtttttaagaattgaggaaaatttgatgaagaatatacgattatttggaaggaatagaatggagtaaagaagataaaatcgtttgtattttagttttagggaaggttaagttggagcggttattttttttcgagtagggaatattttttttggggggtattgtagtagttatttcgcgggttggttttttgttatgggaggggaaggaggtgatgttggtttttattgggttttaggataaaattagtggtagtttttgtttatttttgtgaggtttcggtttttacggtatgtttcgtgtttttttttttgaggttttagcgatttcgtttggggtaggaaggtggtcggggttataaggttatgttgtgagttagggttgtagttttatattttaggtattgttttttatagtttattttttattcgttatttttatacgttatttttacgttttattagttatttttacgttaaaaagaaaaaggagattttttatattttattttttacgttttatatgtcgttttttatattttattttttatgttttaggcgttattttttacgtatcgttttttatttgtgttttttagtttgggagtattttgtgcgtattttttgtattttgagaggttttagattttttgcgtttgttcgattttataggtaggggtttatgggggttaggaaagtattatttatttttaaagttttttgaaaaataatttcgttaaagtttgggttattaagaagggtttttttttttgtgtttggatgttggtttttagaaggaaagaaattgaataggagtcgttagaaaatttttttggtggatgggggtgttcggagtaagggcggggtttgggaagttcgggttggtttttggatttgtttattgtttttttattaagtttatggagaaaattttttcggacgtatttgtagttaggtagttttgaagtttaagtagaaggtagaggagtttgagggtttgggagattatgatgaaatttttgtagtgttgtttttgtttgttgatattttttatgggattgacgggtaaagttttttgtttttaagggtgatagagggatgggggaggggaggatataggcgttttttgaatattttagttgagagttgtatttggtcggttagtggttatgtattttttgttgtttagttattgagtttaagtgggggggataggagaaaggttaggtgattttagttgtgttgtagagcggacggttttgttgttagcgtgtaggtgttaaggtgtgtgtggtattaatattttaaatacgatttagaattttaaatttttaatgtaagttgggaaatagatttaaattgtagatgaaaatttgttttatagtaattatgcgagttaaattttaagattgtattttgggtgtggatgtaaatatttgaagagagtttttagattaggttagttaggtcgttgtttgtaagggaggttggttttttaggtgagttatagagttttattgagaagtgtcgggaataggattattttggttttgagttgggtatttttatttcgttttgattgtaggtagtatttttattttttagcggtttatattttacgtttttttgtttgttttgttttgtttgtttgagatagagttttgttttgttgttaggttggagagtgtattggtgtaattttattgtaatttttatttttcgggtttaagtgatttttgtgttttagttttttgagtagttgggattataggtgtacgttattatgtttggttaatttatatatatatattttttttttttagtagagatggggttttatcgtgttgattaggttggtttcgaatttttgattttaagtgatttatatgttttagttttttaaagtgttgggattataggcgtgagttattgtgttcggttggcggtagtttacgttatttttatttgttgttatgggtttaagttataagttgtggtgattaattattttaggttgtttagggattgagggtttttagaatgtggaattttttattttaaaaatattggggtagacggttatttaagttttttgggttgtttagtaggtttgtttgattttttaagtagggagtattttttatgtgaatagttgtattgttgatgatttttttggaagttgatgtttagttttttttacggttggagggagggaggtgatttttttttaatagttaagttttagtttaggggtgttttttaaagtagtttttagtatttttaaagtttttttgtttgttgttgatttgtattttagtttagagagtagagtatttgttgaggggtcgatagggtatgtttttttttttatttagtatagttgaagtttatttgtgtttttttatgatatcgattttagggagatcgtttataaagtagttgtttcgtttggaataaagtttacgtttagtttaaatttggttttcgcggttttcggttagtatagtttaaggtaattttaggacgtggaggggagggggttatatttaaattttattttttttttatttgagagtagatggttggttggttttagggtattttttttttttggggttttaggttagaggtttttaattttttttgggtagtagaatgatttggggaattttaagcgttaaaattttttgagagatttagtggtttatggtttcggggttggtgaagttttttaggtgatggatttttatttgtatgtagttttttttgtgcgggtaggcgggagggggtaggaatcgggttatttggttgggttttttgttcgttttattgttggttagggcggttgtaggtgttcgtttatggttattgttttggtgtgggtttttgaggatataggtgtgaggggttttatttggtttcggggattcgttttatatttttttgagggggatttgtttgttggttttttttttacgtttgttttaggggtatgtttggaattttgtttggggttggattcggttatacggagtagtaggtgtgggggttgttgtattattttttttataaaattttattttttttttttagggaggttaattaggtttttttaggattttcgggattttttttggggtttttttggatatgttgtggttttgttattaggatgggagggttttttagtttttattttggggaagggtacggttatagttttgtttttaggttaggttttttttttttttgtggtagtttttgttgatttatttatttatttattttcgtttgtaagaagggttgggttttttcgttttatagttatttttgagtgtggaggatataggaaaattttggttgttattttaaggtaagttgtttgtttgggggttatagaaattacgttagtattttgtttatttgtagttatttttgattgtggtggtgggtatacgtgagttgtttagggagtgtgtgagttagatgtttgtgatattagaattttttgggtggtggtttatgtttgtaattttagtattttgggaggttgaggattgaggatcgtttgaggaaaggagttttagattaatttgggtaatatagtaagattaaagttagataaaaaataaaaaaattagttgggtttggtggtttatgtttgtggttttagagatagagaattcgggaggtagaggttgtaatgagttgagattgtgttattgtatttaagtttgggcgatagagggagattttgattttttttttattaaagaatttttatgtttatattcgtatatgagaattacgttcgtataatttaaatttacgttatatatatattatatttatatatatcgtatatatgttatatttatattttaaagttatattatataaatatatttttatatatatgttatatatttatatatacgtgatttttaggtttttttatatttataaggaattggaatttacgggtaggtttcgggaatagtattgaataaatatttagggaaattgttatgtgttttcgttttgggaattagtgagtatattttatttggtgttaaatgtatttcggtaggacgtatgtatgttagggaaataggtagttattaataggatttgagtttgggtattaattggttttaaattttatttggtgtaattttagaagtaagggtttttttgtgacggagggtgtagggtatgggaggatagaggagttgcgtgtacggatgtttgtgtgttttgtgtttgtaaagtcgttatagtaagttgttttgtaggttagttttaatggttgatagtgtgtgtattggcgaggaaaagtttgtgttaagcggaattttgttgtttgtgtagagaagggagttgggtttgggtattattgttagttagtagagtacggggttgttttttttattttattcgggtgttttgtttttttggggttatagttggaggtagttgagttttcgggtttgtcgggtgttatattagtgttgtaggatgttaatttttagtttaagagagagaatgtatgtaaggttgaatagttatgattttgagtagaattttttttttttgggttttggttttgttttttatttttgtttggggttttagcgtggagagaaatttattatgggatgtgtttagattgtttattttatttttttgtttattttttaaagtgtagtttgttttttgtaagaaatttatttttgttttaggtaataagaatattttgtttttttataataatgttttaattttaagtttgggggggttatatttttatgttattatttatatggaaaggtagttgttttaataatattcgtttttgaagaggttatttcgtgttaaagattgattagttttaggataagttaggtttttgtatatatttttgtttgggaatttgaattttgttcgattagtttagttttttttttttttgttacgattgatgataggtttatgatttatttagatgtttggtaggtgagtttttttttttttgtttttgtttttcgaattattacggttatatttagatttttattttttatgtttattataattaattttttaattttataaagaattttgttggaattttgatgaaatatatagattaatttgggggagagttaatattttggtgatattgaattgttttatttataaaaattttttatttaggtttttttttatgattttttattatgttttataattttgtttaaaatttttgttatatttattttagtatttaggttgttgttaaaatagtattgttattgttaggaatgttaataattttttgtgggttgattttgtggattttttagttttaatagtttatgaatttatttggtttttttagatatgaaaagttattttttaattagtatgttttggtttttttttttttttttttttttttgagatggagttttatttttgttgtttaggttggagtgtaatggcgatatttcggtttacggtaatttttgttttttgggattaggcgattttttcgttttagtttttcgagtagttgggattataggtatgtattattacgttcggttaattttgtatttttaatagagacggggttttatcgtgttagttaggatggtttcgattttttgatttcgtgatttgtcgtttcggttttttaaagtgttgggatgataggtttgagtcgtcgcgttggttttgttttttttttttttgcggtggtagttattagtattgcggttaaatggcgttggagagtagtggggtttcgtttagttttgttgttaatggggatggttttaaaggattttagtatttaaatttttgttgtagtcgggcgcggtggtttacgtttgtatagtaataggattattattgtaatcgtgtgttttttgattttttagtaagaagaatatagt

SEQ ID NO: 663 - DNA, 6712 bp, Artificial Sequence
  chemically treated genomic DNA (Homo sapiens)
gttggttatatttttgggatatttgatagatgtaaatgtaaagtgtttcgattttttgttatatgagtgttatatttttgaaggatttgatagtttatataattttttttaaatttttttatttttataataattatttaaagttttttaaaaaaattttaatttttattttagatgtaggggtatatgtgtaggtttgttatttaggtaaaatgtatgtaataggggtttggtttatagataattttattatttaggtagtaagtataggatttaatgggtattttttttgattttttttttttttttatttttatttttaattacgttttagtgtttgttgtttttttattagtatttatgtgtttttattgtttagtttttatttataagtgagaatatatagtatttaattttttgtttttgtgttcgtttgtttaggataatggtttttagttttatttacgttgttgtaaaggatatgattttatgtttttttatggttgtattatattttatggtgtatgtatattacgttttttttatttagtttattgttggtgggtattaggttgattttatgtttttgttattgtgaataatgttgtaatgaatatatttatgtatgcgtttttatggtagaataatttatatttttttgggtatatatttagtagtgggattgttgggttaaatggtaattttgttttaagttttttgaggaattattatattgttttttataatggttgaattaatttatatttttattagtagtttgaaatgttttttttttttgtaattttgttagtatgttattttttgatttttaatagtagttattttgattggtgtgtgatggtattttattgtggttgtgattcgtttacgtaattattttataaggtaaaaaatgttgtgattatttaatagataagtaagtagaggtttattaaggttttatattaggtataaagaagagttgggtttaaatttaagttttttttttttgtagttttgtttgtagtagaattatgggtttttcgggttattttttatgtttaaaatatttaggaaatgggtaggttggtattgtaggtattgaggttaaaggcgtttgttttaaaatgaatatttgttatattttggttattaagaggtgatttttttttttttttatatttgtacgttgttcgtttgagtagggatgtgagaagaggggatgtttagtgtggagtgagtagggttagaatttttggatattttaaagttgtgtttatagagtgggagttttttttttttttttttgaaagttatttgaattttgttattgtaattaagtttatttttttttgtgtttgtttagttagtgggtggaagatgttattatttttttttaattttatggaaaatttatgagtattagtttttgaaatggttattgatttttgtgtttttaagatttatatatatataaaaaaaaagataaagggaagttatcgggggttgtttaagaatggttatattttagatttgggggagagggggagttttggtttggcgttgattagtttaatttatttgttaggttgtttatttgttagggaaattgttaaggttttattggttgtgttaggtttttgattaatttttgggttagttgtatttttaatgttgttttgagtttgtaggcgttgtttggatagggtaggtaggaagtgtagggtgaggtagagtggtttataaggagatagtttatgggttttgttgttttttagatattaggaaaggtgtatttggtttttattttatttgaggttttcggggttggtgttgatttgttttatggagaagtttttatgacgtttttttttattttttttcgtagattttagaaagtagtagtgtggggtatgatatttgatatttgcgattaaggggagagggtttagttgtggaatgtataagttagatatttttttatttgagcgggatgttaggtaggtagttgggggtatgagataatatgggtatttggagtagatttttttaaacgaagtaattgatgggtgtgatgggagttgggtatggtaatgattttattacggttatttttttcggtgattattttattgattttaggttgtaaaatttttaagttttttatttaagtaagtgtttacgtattttttttttgataaatgttagaagagttttttaggtaggtagtgaataggattttaggtatagagttgaatttagttttgggttgaatttttatatggttattagatagatatatgttagttattggtgtaggttttaggtgttatatgtaatttagaagggatttaaataaaatgattttgaatttttttaaagttttttttaggatgtttagggatttggggaattttgtagggaatgtatttttatagatattttattttttgtagtttgggggagggataggaagatatatttagttttttttggttttttgtatgagggagttgttttttttttggtattgtttttgtatgtgttattttagttttattatatttatttagaaataaagtttagttttgtattattttttatttgtttatatattgatttaggtattatattttattgaagtttttgaaatagttggggtggaaattaaagaaagatggatggggatttattgtagtaaatgagtagttttaaagttaatgttattttggagtttttttttgtagtttgggggagggataggaagatatatttagttttttttggttttttgtatgagggagttgtttttttttttattagtttggttttcgttgatatacgggtttgaggtttggggttttatatattttgttttttaggtagttaatttagttatttatatatatatatatatatatatatatatatatatatattaggaatttttatgttagtttttaagataatggattttttatttttttgtatatataaaaatgaaaaattagtattttatttggagattagggtttaatatggatttttttagtataatagatatgttaaaagatgtataattaaagtttagagtaagatgagagaaggattgtgggtgtgtttatatttttttgagttatttcgtttttttttgttcgttgtttaggtagtcgtggtgattataaaaagttataagtttttagtatgtaggtttatttcgtttgttgtagggatagttttaatttatggtttgggaggtattttgtgttttagatattgttagaggagggttaagtagggagggttagagtatttttttgtgttggagggaaaggtttgttggtgttagaatttgtatggtaggatattttattagtgagtgttttttgtttatagtgttttaaaggtgaggatttttttgtggtagggtatattttaatattatttgttagggatgttgtagaaggattttggtattgggattgtgggtggaggagagaatttttgaagtgttttgttggattaatatgtttaaatgttggagattacggagggtagagagagtggtatggacgttttcgatgtgtttatttggttttgtggttggaattgtggtttgaggagaaggaaggaaaaaggatggaaaggtagattggagttgttttttgagggttggtagttttgttagaagtttaggtaatgggagttattttttaagttaaaaattagaatttatgatagggaaatggaagtgttattgggggtggttattatgattcgttacgtgatattaggttatttaggatttgtggtttttgaagtgatgggaattattgaggtttatgtttggagtagtggttcgatttagtttatgttttaggatgatttgtttaattatagagtagaggaggtttagaggatgaaggttggaggttgtaggtgaaaaggttgacgttaaagtttagataaagaagggagagaatttaggggtgagggggtgtttgtaaagagttgttttagaggtaggaattgggacgtgtatttattgggtattacgtttttttgtgttttataataaattggtatattttaaggttattggaagttttgttgggttatttttttaaggttagtgttgtatatataattttataagattagttttttatatataattttataagattagttttttatatataattttagattttttgttttgtttttttagtggggttggagtaagttagtaggtgttatttttttttgttttgtttttgtttaataaaatgcgttttaatgttttatatttgttatttagtatggattgttttaatattttaaaaaggtttgtggaggagtttataattattaaggaggaatttttagaatataaaataatattagcggttgataataattttaaaaaataagtttgtgtaataatgggggtgagaagagattataaggttatgtaaataaggtgaggttttgagtttaaaggaattttttggtatttttttgtgtgtgtatatatgtatttatatatttgtgtgtatatgtgtatagatatatataaatatatgtatataatgtgtatatatgtattatatatatgtatatttatatatttttatgtataaaatatatatatgtatatataaatatcgatgtataaatatatacgtatatatttatatatatatatatgtgtgtgtatatatatatatatttgtatatatatatatttcgtggggtgcggagagttatttaaaggttgtagggttataaggttttttgtttgattgatatttattaatgtttgttgaattatagtaaatttttgttgtgtttattttgttttttattattgattattgtttttaggagttaatgtttgaatttggttataaaggaattaatagttgttgatttttggtcgttattcgaagggaagggagttttttataaaatagtttatagtggatagtttggtcggtagagtcgtaggttagtcgtgaagagggagttttattgttattatgagttttttcggtaagtattaattgtagagttaggaaaattttgaagtttttatgaaggtaatcggtgagtgttggattgaaaggtaaagttgtgggttatattagtgagggtttagttttattagtagtggttatttagggtttaaatgttgagatggggggagagatttaggttatatatataaattagggggtattttattgatttttggagttatttgtagtaagtttttattgtataaggttattttataggtaagtggaaagagtattgaattagggtgtggtttggattgatggttatgttattggtatttcgttgtgtgattttatttttgtatttatttattttttaaataaatagtgatttaaggttaattatatattgagtattgtgttggatagatattagggagatagatgataaaggtaataaggtatttttttattagggaagagaagagaagaaataaaggtaataaggtatttttttaggtgtatggagcgttgattgtgttaggcgattgtgttgattatgggatatgtaatattttatttattttttgttaaaaaattaagttgggtattattatttttttattttatagttaatgtaattgaagtttagaaaggtttagtaattataagtaaggttatgtaagtaggaagtgtttaagttaggattggaagtaggtattggtttttagagattttgttttaatttttgtgttttttagggttatgtataggaggatgtggtttatagagagtatggggggatggtttagtggaggtaaagagaaggtttaggttgagttttggaagataggtgtttagggaattgggggtagggagtatgttttaggtagagggagttttataagtaaagggtgtggtatggtaagggagggtgttaagaatgagaagggtgttgaagatagtaggggtagggagagaaggatttttagtgttgttagagaaggattttttgtaggtaagttatattatttttgtgttttttattttttttttatgtaataggattttttgtgtttattgtttatttataaaatttttgtgaattttattttgtataatagtatagataagttttgaaattggtaaagttttattttagggtaagggattgttggtatgtttttttttagagttttgattgtagaggtggatataggtttgtttggtatagtgtcgttttgtgtatgttggtttggtatgattattagtagttttttttttatttgtaggagggatttagtttggaagattaattttttggttattaggggtatggggaatgaaatgtttatattttaagagtaaagttattaaaggaggagggaatgaggaaggagagtgagtaagaattagggtgtttataagaggaacggttttttaggttagaagagtgttttttttataaattgattggtaagatagtagtaggttaggttaggttattgtttttttttttttgaggttatagtcgatgttgttgataagtttttagtgagtttttgtggttttttgggagatatagtgtttttttttgtttttttatgttatgtcgttttttttatttatttattacggttatgaaatttttatttttgtttatatttaaattttagacggtttttattagg

SEQ ID NO: 664 - DNA, 6712 bp, Artificial Sequence
  chemically treated genomic DNA (Homo sapiens)
tttggtggaaatcgtttgaggtttagatatgggtagaggtgggagttttatgatcgtggtaggtaggtgagagaaacgatatgatatggagggatagagaagggtattgtgttttttaaggggttatagaaatttattgggggtttgttagtagtatcggttgtggttttagaaaggaagggatagtgatttggtttggtttgttgttattttgttagttaatttataaaaaggatatttttttggtttgaagaatcgttttttttgtaagtattttggtttttgtttattttttttttttattttttttttttttgatgattttgtttttggagtgtgagtattttattttttatatttttggtgattagagagttgattttttaagttaggttttttttgtaagtgaaaggggagttgttgataattatgttaggttaatatatataaagcggtattgtgttaggtaagtttgtgtttatttttgtagttaaggttttggaggaagatatattagtaattttttgttttgggatagagttttattagttttagaatttgtttatgttgttatataaaatgaggtttataaaaattttgtgggtggatagtgagtatagagggttttgttgtatgagggagagatgagagatatagaggtggtatggtttgtttgtagaagatttttttttggtagtattgaaggtttttttttttttgtttttgttgtttttagtattttttttatttttggtatttttttttgttatgttatattttttgtttatagggttttttttgtttggagtatgttttttgtttttagttttttagatatttgttttttaaagtttagtttgagttttttttttatttttattgagttatttttttatgttttttgtgagttatatttttttgtatatgattttaggaggtataggggttaaagtagggtttttgagaattagtgtttgtttttaattttaatttaaatattttttatttgtatgattttgtttgtgattattaaatttttttgggttttagttgtattaattgtaaagtgggaaaataatggtatttagtttagttttttggtaaggaatagatggggtattgtatattttatggttagtatagtcgtttggtatagttagcgttttatatatttgagggaatgttttattatttttattttttttttttttttttttgataagaaaatgttttattgtttttattatttgtttttttggtatttatttagtatagtgtttagtgtgtggttggttttgaattattgtttgtttgaagaatgaataaatgtaggaataggattatataacgaagtgttaatgatatggttattaatttagattatattttagtttagtgttttttttatttgtttatggggtggttttgtgtagtgaggatttgttgtaaataattttagaagttagtaaaatgttttttagtttgtgtatatagtttgaatttttttttttattttaatatttggattttaaatagttattgttggtagagttagatttttattgatgtgatttatagttttgttttttagtttagtatttatcgattgtttttatgaaggttttaaagtttttttggttttgtagttggtatttgtcggagaaatttatggtggtaatagagttttttttttacgattgatttgcggttttgtcgattagattgtttattgtaggttgttttatagggggttttttttttttcgaatagcggttagaggttagtagttgttgatttttttatggttaggtttaaatattaatttttgagagtaatggttaatgataaagaataggatgggtatagtaaaggtttgttgtaatttagtaaatattaatgaatattagttaagtaggaagttttatggttttgtagtttttaagtgatttttcgtattttacgaaatgtgtgtatatgtaggtatgtgtatatgtgtatatatatgtgtatgtatatagatgtgtgcgtatgtgtttgtatatcggtgtttatatatatatatatgtattttgtatataaagatgtatgaatgtgtatatatgtaatgtatatatatatattatatgtatgtgtttatatatgtttgtatatatatatatataagtgtgtgggtgtatgtgtatatatatagaaaaatattagagaatttttttgaatttaaaattttattttatttatataattttatgatttttttttatttttattattatataaatttattttttagagttgttattagtcgttagtgttattttgtattttgggaatttttttttgatgattataggtttttttataggtttttttgaggtgttaaagtagtttatgttaaatggtaggtgtaaaatattgagacgtattttattaggtagagataaggtaggagaaagtggtatttgttgatttgttttagttttattgagaagataggataagggatttggggttatgtgtaggaaattggttttgtagggttatgtgtaggaaattggttttgtagggttatgtgtatagtattggttttggggagatggtttagtagggtttttagtggttttgggatgtgttagtttgttgtgaagtatagagaggcgtggtgtttaatgggtgtacgttttagtttttgtttttgaggtagttttttataagtatttttttatttttagatttttttttttttttgtttggattttggcgttaatttttttatttgtagtttttagtttttattttttgggttttttttattttgtggttagatagattattttgaagtataggttgagtcgggttattgttttaggtatgagttttagtggtttttattattttagaggttataggttttggatggtttagtgttacgtgacgggttatgatggttatttttaataatatttttatttttttattatgagttttaatttttggtttggaaaatgatttttattgtttaaatttttagtagggttgttagtttttaaaaggtaattttagtttatttttttattttttttttttttttttttttaagttatagttttagttatagggttaagtggatatatcgggggcgtttatgttattttttttgtttttcgtggtttttagtatttggatatgttgatttagtaaagtattttagaagtttttttttttatttatagttttagtgttagggtttttttatagtatttttgataggtggtgttaaggtgtattttgttatagggaggtttttatttttggagtattgtgggtagagaatatttattaatggagtgttttgttatgtagattttggtattagtagatttttttttttagtatagaggggtgttttggttttttttgtttggtttttttttgatagtgtttaggatataaggtgttttttaggttatgaattggggttgtttttgtagtaagcgaagtgggtttgtatgttgagaatttatggttttttataattattacgattatttgaatagcgggtaggaaggggcgaggtggtttaaagaagtatgggtatatttatagttttttttttattttgttttgagttttgattatatattttttaatatgtttattgtattaaaggggtttatattagattttggtttttagatgggatgttgattttttatttttgtatatgtaaggaagtaaaaaatttattgttttaagaattggtatgagaatttttagtgtgtgtgtgtgtgtgtgtgtgtgtgtgtgtgtgtgtaaatgattggattagttgtttgggagatagagtgtgtgagattttagattttagattcgtgtgttagcgagagttaagttggtgaagagaagggtagtttttttatgtaggagattaggagaggttgggtgtgtttttttgttttttttttagattgtagaaaggagttttaggatggtattggttttgaagttgtttatttgttgtagtgaatttttatttatttttttttaatttttattttaattattttaaaagttttagtaaaatatagtgtttgaattaatatgtgagtaagtggaaaatgatgtaaggttgagttttatttttggatggatgtgatgaggttgagatggtatatgtagaagtagtattaagagaagggtagtttttttatgtaggagattaggagaggttgggtgtgtttttttgttttttttttagattgtaggaagtggagtgtttgtggggatgtattttttatagggttttttaggtttttagatattttaggaagggttttggaggaatttaaggttattttatttagattttttttgggttatatgtgatatttaaagtttgtattaatagttggtatatgtttgtttaatgattatgtgaaggtttagtttagggttaaatttagttttatatttgagattttatttattatttatttaaagagtttttttagtatttgttaaggaaggaatacgtaaatatttgtttagatggggagtttaggagttttgtagtttaaaattaatgaaataattatcgaggaaaatgatcgtgatagagttattattatgtttaatttttattatatttattagttgtttcgtttgggagaatttgttttaagtgtttatgttattttatgtttttagttgtttgtttgatatttcgtttagataaagggatgtttggtttatatattttataattaggttttttttttttgatcgtaaatgttaagtattatgttttatattgttgttttttgggatttacggaggggagtgggaaggagcgttatgaaagtttttttatagagtaagttagtattaatttcggaggttttaggtgaagtagggattaggtgtattttttttggtgtttgaggaatagtaggatttatgagttgtttttttgtggattattttgttttattttgtattttttgtttattttgtttaggtaacgtttgtagatttagaatagtattgggaatgtagttgatttagaggttggttaagggtttggtataattagtgaagttttgatagtttttttggtagatgggtagtttgataagtaaattgagttgattaacgttaggttaggatttttttttttttttaggtttgagatatggttatttttaggtaattttcgatgatttttttttgtttttttttttgtgtgtgtgtgaattttgagggtatagagattagtagttattttaaaaattaatatttatgagttttttataaagttaggagagggtaatgatattttttatttattagttgagtaaatataagaagagataagtttaattgtaatgataaagtttaagtggtttttaagaaagaaaaaaagagatttttattttgtgggtatagttttggagtgtttaaagattttggttttgtttattttatattagatattttttttttttatatttttatttagacgggtagcgtgtaggtgtgggaaaggaggggagttattttttggtggttaggatatgataggtgtttattttagaataagcgtttttgattttagtgtttgtaatgttagtttgtttattttttgggtgttttgaatataggaggtggttcgaggagtttataattttgttataggtagggttgtagagggaaaggatttgggtttgggtttagtttttttttatatttgatgtggagttttggtgagtttttatttgtttatttgttaaatggttataatattttttgttttgtgaaataattgcgtaaacgaattataattataatgagatattattatatattagttagaatggttattattaaaagttaaaaaataatatgttggtaaggttgtagagaaaaggaatattttagattattggtgagagtgtgaattaatttagttattgtggaaagtagtgtggtgattttttaaagaatttaaaatagaattattatttgatttagtagttttattattgggtatatgtttaaaagaatataaattgttttattataaggacgtatgtatgagtatgtttattgtagtattatttataatagtaaagatatggaattaatttaatgtttattaatagtagattgaataaagaaagcgtggtatatatatattatggaatatgatgtagttataaaaaagtatgagattatgttttttgtagtaacgtggatggagttagaggttattattttaagtaaacgaatataggaatagaaaattaaatattgtgtgtttttatttataagtgggagttaaataatgagaatatatggatattagtaggggaataatagatattggggcgtagttgagggtgagggtgagaggagggagaggattagaaaaaatatttattgggttttatgtttattatttgggtgatgaaattatttgtaaattaaatttttgttatatgtattttatttaaataataaatttgtatatgtatttttgtatttaaaataaaagttaaaatttttttaaaaaattttaagtggttattgtaaaaataaaaaaatttaaaaagaattgtgtaaattgttaagttttttagaaatgtgatatttatatgataggggatcggagtattttgtatttgtatttgttagatgttttagaggtatgattagt

SEQ ID NO: 665 - DNA, 6222 bp, Artificial Sequence
  chemically treated genomic DNA (Homo sapiens)
agtgggggttataggagaatgaggggtgatcgttaaagatagagtttttttttgaggtagtaagaatattttaaaattgattgtggtaatgtatatatatttttgtgaatatattaaaaattattgaattttatatttttaaagggtgaattgtatggtatgtgattatattttaataaagttgttttttaaaaagagtaaaagaaaagattttatatagtatttttgagattgttatttttatagtggtttgtttgtagggttgatttttgggagtttaagatttggggaggttttttattatattgataagagtgggttattgtatttaaattgtataaataaaatgtttattttgaatatttgttttttttttggaaatttggaattttggtacgttttaggtagaggatgtatagtgattattttataataaaatgttaagtattgagtttttaatgagttttttggtatataatattttatacgttattataaaatttattgttggagaaattagtgtgttttgtgtgattttattggtagaggataattggaagtttgtgtttggtttttttttgattttattttcggttttttttttgtttgttgattttgttttatatttttttattgtaataaattatagtaatgtatataattatatgttgagttttgtgagttttgttagagaattaataaatttgttaggtgggagggattttggggatttttaatttagaggtattatagtatagtatttgaaagttgtttcgtttttattagattggtaaaaatattaaaatattgttggtgaggataaaagggaagaggtatttttttttattgttaataatgtaattatattattatattttttggtaatattagattaatatggtaataattattaaaaattaaaatatattttaattttcgaaatttaatattgagaatttatattttagaaataaaagtatatttttattgagatatattaggttttattagtaaataatgaaggaaataaagtaaatatttattagtaggaatataattgttatagggtgttcgttgtgaatttttataattttatgttatttttgtatttattttgaatataagttggattttttgattttagaagtagtatttagttatttttgatagtttttagttttttatttttttttagttttttaatatggttaatttagatatttattttatataattgtttgttagttattatttttttataggtggttagtgaaatataatttatttgatttgatttattgatttatatagtttgtatgggttgtgtagatatgttatagtgattattttttagttatagtgattttatggaatatgtatttatttattttaaatttattaattagatttatttgtaggaaatttatttaggtaatattttggattttaataaaggttttggtttataggttttttttattttttgttttttgttttttatttagtggttgaatatgtatatttcgttggttttttatttttagttggttataggaggtgtgttgtttttttttttttcgatttgtaagtaatattgtttttgttattttatgtgttttggtgagttgtattttgtgtgttttgtttagttatatttgaatttaattttttttttggttaggatttttttagagaatggttattttgataggaataaatttaatataggtaagataagagttataagggtatttgttagtataaataagttttttgtgagagggatatttattaagggttatggatattaaggtattaggttatatgttaggataaagaagtattttgtgaaaggtatattgtaaatatttatgattagatttttcgaagttttggtagggaaggggtagtgtttatagttattttttaaagatagattataagattatattagaggaaaatataagtgtttttgagtgataaaggtaaaatataggaatttaatatgattttattttggtaaaataatgtatgtgtgaaaatatatatgttttatatgattatttgagtaaggaggtgtatatatgtataattgaaatagggttagatagttaatttagaaaataaaaaagattaatttagttatgtgtagttgaagtttaaagaaaaaaagaataaaatatgtaaatatgtaaaattagagatatgtatattatagtataagatttatgtggaagtagaataggttttttggagaggttatattttattatatattgaaaaacgagtataagttttatgcgtatgttgggaggatgagatgtattttaaagaaatgttatgaattaagtaattaagtaatatatataataaagtacgaagtagatagaattaggggttagattatggttggttttgatgtggtatatatatattatggaatattatgtagttataaaaaatgatgagtttatgttttttgtagggatatggatgaagttggaagttattatttttagtaaattatcgtaaggataaaaaattaaagatcgtatgtttttatttataggtgggaattgaataatgagaatatttagatataggaaggggaatattatatatcggggtttgttatggggtggggggagggggtagggatagtattaggaggtatatttaatgttaaatgacgagttaatgggtgtagtatattaatatggtatatgtgtatatatgtaataaatttgtacgttgtgtatatgtgttttaaaatttaaagtgtaataaaaaaagaaagaaagtgtattaggttgatagtttttaagtgatatagttttaattttttgaaaaaagattaaaaaattataatgtatttaattttgaaagtaaagttaaattatgaatgtaaaggattttttattatgatttttgtttttaatttatgagtgtgtatatgtgttttttttttttttttgatatttaaaaaattatttattttttagagatgggatttttttgttgtttaggttggagtgtattggtatgattataatttattgtaatttttaatttttgggattaagagattttttcgttttagttttttaagtagttgggattataggtatgtgttattatatttggttaatttattttattataattgttatagttaggttttttttatgttgtttaggttggttttaaattgttggtttcgaatttttggtttgaagtgatttttttgttttagtttttttaatagttgggattataggtaagaattattgtattaggtaatttttttttttttttgtttttttttgttttttgtttttttgtttttttgtttttttgttttttgagacggagtttcgttttgtcgtttaggttggagtgtagtggtacgatttcggtttattgtaagtttcgtttttcgggtttacgttatttttttgttttagtttttcgagtagttgggattataggcgtttattattacgttcggttaattttttttgtatttttagtagagacggggttttatcgtgttagttaggatggtttcgattttttgatttcgtgattcgttcgtttcggttttttaaagtgttgggattataggcgcgagttatcgcgttcggttttttttttttttttaatgaaataatagagttagtagaaaatagtttgttttttaaagtgtttatttaataaaataaaaagtgggtaattcgaaataaaaaattaaataatatttaatatgtttaaaagatttttaaaaattaaaatataaaataatattaaaatttaaaaattgggattttgttttttaaagttttgtttaaatttgttagatttatttttttttgattttaagtaatattttgggtaagttttagagttttttttttgatttttagttaataagatgttatttggttatatttagttataataatagatttattttagtaataaatattttaagattagtaattaaaattttttattttatattaagttttttttttaagtttggtttgtttttggttggtagtttgaagtagggaaaggagagatatggtgattttttttttgtatttttttagttattttttatattttgattttatatatataattgagttgtggtttttgattttattgggtttggggatgagaggtattgagagtaaaatgaaggagtggttttaattaatggtatagttaaaattggattttgttttttttgtatatggtagatgtttaaagtttatttttttttttatgtaagtttttatattatttagttttatttgtattttttgaatttttgtttagtggtttattattatttaggattaagataaaaattaatgagtatttattgtgtgttatgtattttataaagtgttaggatatttatttaaatttttggtaatgttaaatataatgtaaaaagatatattagaaaacgaattttattaattttaattttttaattgtattttattataaagttttattttataagataattgttgttgtgaaaaagggaaaggttatggttttattttttagatgttatttgatatatgttataaattatattatttttaatatagtttgtattttgaatttagaaaaataatttttagacggtatgtattttaatttttgaaataagtatgtttataaattgtaatttaagatagaataggtatgttttttatgttttaatttagttgaattttagaagattttaggaatgtatagaacgagaattaagaattaattaataagaattaattaattgtttgatatagttaggtgattttttgaattttaagtttttatattatagtatgaagttggttttaagataagaaatataataaattttcgtttaaggatagatttgaatttttagttgtttagaggttgatttaattgaaattatggcgtttgatagtatttggaaggtagatcggagtgaaaattatgataagtttatggaaaaaatgggtaaagattttatttttttgtggtttattttttgtttttttataaatatttttttttttaatttttaaatttttaggagattatagatagtttatagatagtttttgatgtggtagagaggatttagaagatgtttagaggagggaaattatattttttttttttatattaggaagaatttattattttattaatggaagaaaagattttttgagtgttgttttttgaaatatattaaaaagatttagaaatgtttttttttttttttaattgaaaaatgattttttttgttgtttatagtaagaaaatggtagcgtgtaatgataatttttagatttgaaaatgttaaattttaggagatggaaaaataaagattatataagaaagtaatggaaaaggtttttttaaaatttatagcgttgaataagttagatttaattttgattttttttaatttaaaaaagttttggaataattttgagaagttgtgtagttttttttagggcgtttaatttaattgatttataatttgatattaatattttggtagtttatatattatataagataggtaaataaatttgtgttatttttttaaaagaaaaatttgtattaattatagtttatagtttaggaattttaagtttaaatttataaaagttgtagatttttatagtgattttggtttaatatttgttaatttttttatttttgtgttagaaagaaatgttataagaagtaaatagaattataaagtttaaaatgttaaagttattaagaaaaataaaggggtatttaagaaaaaagaatattgtatatgtggaattaaagatgtgtttttttataaatatatgaatatatattttaattttttatttgatatttttagaatttgatttatttaatattgaaatgaatagtttgttaattttattaaggttgtttagttttaagattttataattttgtattttatttaattttttttaagttatggaaaaataattttaattagtttttttgatttgattgaatttgaatttttgtagaagtaatttgaatgtttttgtgtaaaggtaatgttatcgagttttttttttatttttaaaataaataaataaaatataatttggaaaaataaatattttttatgggatttgattttattttttttattgttttattttttatagg

SEQ ID NO: 666 - DNA, 6222 bp, Artificial Sequence
  chemically treated genomic DNA (Homo sapiens)
tttgtaaaaggtaagataatggagaaaataaagttaaattttataggaagtgtttatttttttaagttatgttttgtttgtttattttgagggtgggaagaaaattcggtagtattgtttttgtataagaatatttagattgtttttatagaagtttaggtttaattagattaagagaattgattaaagttgtttttttataatttgagaaaaattaagtagagtatagaattatagaattttagagttgagtaattttaataagattaataaattgtttattttagtgttaagtaaattaaattttagaaatattaaatgaaggattaaaatgtatatttatatatttataaggaagtatatttttaattttatatatatagtattttttttttttaaatgtttttttgttttttttagtggttttaatattttgaattttatagttttatttgttttttgtggtatttttttttgatataaaaatgagaaaattagtaaatattaagttaaaattattataagaatttataatttttataaatttaaatttagagtttttaaattgtaagttataattgatgtagattttttttttaggggaatgatataaatttgtttgtttattttgtatagtatatgggttgttagagtattggtattaaattataaattagttaaattaaacgttttggagaaaattatatagttttttaagattattttaaaatttttttaagttagaagaaattagaattaaatttaatttatttagcgttataaattttaagagaattttttttattatttttttatatggtttttgtttttttattttttagaatttaatatttttagatttggaagttattattatacgttgttatttttttattgtaaataataaaaaaagttattttttagttaaagagggaaggaaatatttttggatttttttggtgtgttttagagaatagtatttaaagaatttttttttttattagtgagatagtggattttttttaatgtaagaagggagaatatggttttttttttttgaatattttttggattttttttattatattaggagttatttgtaagttatttgtaattttttagagatttaggagttagaaagaaaaatgtttgtaagaaagtaaagaatgagttataaagaaataaagtttttatttattttttttatgaatttgttatagtttttatttcggtttattttttaagtgttgttaaacgttatgattttagttgagttagtttttaggtagttagagatttaggtttgtttttgggcgagaatttattatattttttattttagaattaattttatattgtgatgtggaagtttaaagtttaggaaattatttaattatgttaagtaattaattaatttttattaattaatttttaattttcgttttgtatatttttgagattttttgaaatttaattgaattaaaatatgagaagtatatttattttgttttaaattatagtttgtgggtatatttattttaagaattagaatgtatgtcgtttgaagattgtttttttaagtttaaagtgtagattatgttggaggtaatataatttatagtatatattaaataatatttgggaaatgagattatgattttttttttttttataatagtaattattttgtaaagtaagattttatgatgaaatatagttgaaaagttaaagttaataagattcgttttttaatatgtttttttgtattgtgtttagtattgttaggagtttggataaatattttggtattttgtagggtgtatgatatataataagtgtttattgatttttgttttgattttgaatggtgataggttattgagtaaaaatttaagaggtataaatgaggttggatggtgtaaaaatttgtataaaagaaagaatgagttttaaatatttgttatgtgtagagagaataaaatttagttttagttgtgttattaattaaaattatttttttattttatttttaatgttttttatttttaaatttagtagagttagaagttatagtttaattatgtatgtagggttagggtatagagggtagttagaaaggtataaagaaaaggttattatattttttttttttttattttaggttgttagttaggaataggttaagtttggggaggaaatttggtgtgaagtaaagagttttaattattagttttaagatgtttattattaaaatgagtttattattgtgattgaatgtgattagataatattttattaattaagggttaggaaagaagttttagggtttgtttaagatattatttagggttaagggaagataaatttaatagatttgaatagaattttggggaatagaattttagtttttaaattttgatattattttatattttgatttttaaaaattttttaaatatgttagatattgtttgattttttatttcgagttgtttattttttattttattaagtaagtattttaaaaagtaaattattttttattagttttattattttattaaaaaagaaaaagaggtcgggcgcggtggttcgcgtttgtaattttagtattttgggaggtcgaggcgggcggattacgaggttaggagatcgagattattttggttaatacggtgaaatttcgtttttattaaaaatgtaaaaaaaattagtcgggcgtggtggtgggcgtttgtagttttagttgttcgggaggttgaggtaggagaatggcgtgaattcgggaggcggagtttgtagtgagtcgagatcgtgttattgtattttagtttgggcgatagagcgagatttcgttttaaaaaataaaaaaataaaaaaataaaaaaataaaaaataaaaaaaaataaaaaagaaaaagagttgtttggtgtagtggtttttgtttgtaattttagttattagagaggttgaggtaggagaattattttaggttaggagttcgaaattagtagtttgaggttagtttaagtaatatagggagagtttggttgtaataattataataaaataaattagttaggtgtaatggtatatgtttgtagttttagttatttgggaggttaaggcgggaagattttttgattttaggagttggagattgtaatgagttgtgattatgttagtatattttagtttgggtaatagagagattttatttttaaaaaataaataattttttaaatgttaaaaaaggaaagaaaatatatatatatatttatgagttggggataaaggttataatgggaagttttttatatttataatttagttttatttttaaaattaggtatattgtgattttttaatttttttttaaagaattaaaattgtattatttgggagttattaatttaatatattttttttttttttttattatattttaagttttagggtatatgtgtataacgtgtaggtttgttatatatgtatatatgtgttatgttggtgtgttgtatttattaattcgttatttaatattaggtatattttttaatgttatttttattttttttttttattttataataggtttcggtgtgtgatgtttttttttttgtgtttaagtgtttttattgtttaatttttatttataagtgagaatatgcggtttttggttttttgtttttgcgatagtttgttgagaatgatggtttttagttttatttatgtttttataaaggatatggatttattattttttatggttgtatagtattttatggtgtatatgtgttatattaagattagttatgatttgatttttggttttgtttatttcgtattttattgtgtatattatttgattatttggtttatagtatttttttgaaatgtattttatttttttaatatacgtatgaaatttgtgttcgttttttaatatataataaaatgtaatttttttaagaagtttattttgtttttatatggattttatgttataatatgtatatttttggttttgtatatttatatgttttgttttttttttttttgggttttaattgtatataattgagttaattttttttgttttttaagttggttgtttagttttgttttaattatatatatatatatttttttgtttaagtgattatataaaatatatatgtttttatatatatattgttttattaaagtgagattatattaaatttttgtattttgtttttgttatttaaaaatatttgtgtttttttttaatgtggttttgtggtttgtttttggagagtggttataaatattattttttttttgttagggtttcgggagatttggttatgagtgtttataatgtgttttttataggatatttttttgttttggtatatgatttaatgttttagtgtttatgatttttgataggtgttttttttataggaaatttgtttatattggtagatgtttttgtagtttttgttttatttgtgttgagtttatttttattaagatagttattttttaggagagttttgattagaaaagaagttggatttaggtgtaattgggtaaaatatataggatataatttattaaaatatatgaaataatagaagtagtattatttataaatcgagagagaagagggtagtatattttttatggttaattggaagtggggagttaacgagatatgtatatttaattattgggtggggagtaagagatagagagtgaggggaatttgtaggttaaagtttttattggggtttagggtattatttaggtgggttttttgtaggtaggtttaattggtgggtttagagtaagtgggtatatgttttatgaagttattgtgattgaaaggtggttattgtggtatatttgtatagtttatgtaggttgtgtgagttagtaggttaagttaagtgggttgtattttattgattatttataaagaggtggtaattagtaagtagttatataaagtagatatttggattgattatattgaggaattaggaagaggtagaaaattggaaattgttaggggtaattgagtattgtttttggaattagaaagtttaatttatgtttaaagtggatgtagaggtaatataaaattataggaatttatagcgaatattttgtagtaattatgtttttattgatggatatttattttattttttttattatttattggtagaatttaatatattttaataaaaatgtatttttatttttggagtatagatttttagtattgggtttcggaggttgaagtgtgttttaatttttaatagttgttgttatgttgatttaatattgttagagggtataatagtatgattatattattagtagtgaaagaaggtatttttttttttttatttttattaatagtattttaatatttttgttagtttgatagaaacgaagtagtttttaagtattgtattataatgtttttgggttggaggtttttaagattttttttatttgatagatttgttgattttttagtaggatttatagggtttagtatatagttgtatgtattgttgtgatttattatagtgaaaggatataaagtaggattagtaaatagagaaggagtcggaggtgaagttaggaggaaattaggtataaatttttaattgttttttgttagtggagttatatagggtatattgatttttttagtaatagattttgtgatgacgtgtaaaatgttgtgtattaggaagtttattagagatttagtgtttaatattttattgtggggtggttattatgtattttttgtttgggacgtattaaaattttagatttttagaaggaaaataggtgtttaggataaatattttgtttgtgtagtttaggtgtagtgatttatttttattagtgtggtagaaagtttttttaaattttgaatttttaaaggttagttttgtaagtagattattgtaaggatggtagttttaggaatgttatgtaaagtttttttttttgttttttttaaaaaatagttttattgaaatataattatatgttatgtaatttattttttaaaagtgtaaaatttagtgatttttagtatatttatagaaatatatgtatattattatagttaattttggaatatttttattattttagaaagaaattttatttttaacgattattttttatttttttatagtttttatt

SEQ ID NO: 667 - DNA, 9963 bp, Artificial Sequence
  chemically treated genomic DNA (Homo sapiens)
gtgaggtatagtaatttaaatttaaatttaatatgaacgttttagaaagagattttaaattttttttatttgaaattttaatatatatatttttatagttgggtgtaggggtttacgtttgtaattttagtaatttgggaggttgaggtgggtagattacgaggttaggagtttaagacgagtttgattaatatggtgaaattttatttttattaaaaatataaaaattagttaggtgtggtggtgtgagtttgtaattttagttagttgggaggttgaggtaggagaattatttgaatttgggaggtggaggttgtcgtgaatcgagatcgtgttattgtattttagtttgggtaatagagcgagattttgttttaaaataaaataaaataaaataaaataaaatataataaaaaataaattaataataataataatagatatatatattttgttattatatattgtttttttttgtttaatatttagggaaagggttataaggaaaaattatgtttaattaattttagtgtgtgtgtgtgtgtgtgtgtgtgtgtgtgtgtgtgtgtgatagagagagagagagagagagagaaagagagagcgaaagagagatagggaaattttagtgtggatttattgttgataaattaaataatgtttgtagagagaggtattgagaatgatttatttagttgtgttaaataggttgaatatagaggttgtaatttatgtgttaatatttttttgtatttttgggagtagagtgggatttatagttatagtttaaaaaggtatcgaatatttggatgggaaaaaagggataatttagatgggaaaattattgaatatgtatttagttataagaaaataaaataaaattagaagtattttgttgaaataatagtgagggagagtttaaaaagtggtttttgttttgataatggtaatagagaatttattatatggtatatattattaagttagatggtaatgatatgttttttatttaaggtgttgtttgttatttgtgagttttgtaaatttagtttaaatttaaaatggatttgaggtagtattttattagaatatagatataatagtatttgaaatagattaaagatagaattaaagagggtaggaagaagaaaatttatattgtagaaaatttagttttggttgagttggtttatttaggattttatttaatttttttttttttattttataatatgtatttgtatttgaattatttacgtttagttttaagattttttaaattttgaatttttttgagaggatagaatgttatgtatatttgtatatgatatatatttttgatattaaaatgtattggatatatgttaaatttatgatgtttattataaaatgtgtattataaatattattgagtttagatttgaaaaagagaggatatttattttgttaaagtgtttggtttttgatatagtttttttttttttttgacgattatgtagtagtgttgaatgttgtaaaaaaggttattttattttgttttttagtgtaggtagcgtttatattttgtttatttgaatggtaattgttagttttttagagtcgttgtaagatattagtgttttggatttggaaagtttttttttagtttttttgtaaaggagtgagggatatgttttgtgtgaatgagggttgtagtgtagtgtgttgttttttagtattagagggaggtattaaatatggtgttatagagatttaaattagtttttattgttggagatgttgaaatttattgcgagttttgaaagtgtttatattttttgagttaggaattttttttagataattgttaaggaaaaggaaaatattttgtgtatgtatttttttattgaatcgttattattattatttaaaatattgcgatttttttagttaatgataatgattataataaagtttattgggttttaaggaaaaatatttaagagaataaggtagggaaagattgaaaaattgtatttatgtaaagtttataaggatggaaaagttatgtgtatataaatggaatgaaaaaaaaatatgaaaatgagaagattatattggtgggattatgggtaatttttttgttttaaaattttttttaaataattgttgtgatatacgtggttaatatatttttttttaaaaaatgagaaagaaaaaatatagtatatttgtaagttattttaaatgttgttttttaaatagagaatagttttggcgtttttagatattgtgtataattagtgggttggttaagtttattttaaaattatgaaattttattttttttttagttattttatttttatatttttttttatatatatatttgttttatgttttttttttaaaatattttggttttttttttttaagggttttattatttaggtttttgttaatttgtatgtatttagtagaagtttttggtttagtattttttatataatatatgttttataaaaataggaattaaagatgtgagttgttggtgtatttttatggtttggtatagggtatgggtttattagttattgttttatttttttttggttaatagttttatattaatgatatgtatttatggagaatttattttgtgttaggtgttttgttgggtattgatagagttgtatatggaataagaaagttcgtggttttaatgggaaggggtagggtaattatagaacgtggaaataatttattgcgttgtagttgaggattagtttgaattaggtaggtattaagtgttttttggaatgtttttttataaggttattaagttgggatatttttttttttttttttttttttaggaatttattagaataaattagattatttttattttttttttagggttgatttaaaagaattgaagttagtttttggtagagttatttagggtaggagatgagagttaagaggttgtgtttagattatattttttattgggtgatgattattggttacgtttggtggataggtattagagtgattttaggggttaggaaggggggtttaatagcgggttttgtttgtcgtattcgttttttttaagtcgtttggttttaagtttatttagtttatattattttgttattttttagttttttttttttaagttgaaatgcggagtagtttttttaatttagtagttattgtgttatattttttaaggatttttagggaatttttgtttagattatcgtttatttttttagattttagtcggtattttggttgtttaaaagtgtatttgaattatttatattaataataatataacgatatatttttcggtgtgttttaagtgttttggttgtggtatggttttaaaaaattgtagttgattgtatatgagtgattagataatattttgaatttattttaagatagtttgtttttttttttttttttgtttttttttttttttttttttttttttttttttttttattttttttttatttttttttttttttatttttttttttttttttttttttttttttttttttttttttttttttatatatatataatttgtatatgttaggtattattttaggtgttttataaatattaatttattttatttttatattaattttgtgaagtaggaattattattattaatattatatagagaaggaagttgaggtagagaaagtttaagtaatttgtttaaggttgagtattttgttaacgttattttattattggtatgtgaaataggtgagttatattttttagaatattaatttttattaattgaagttttttaaataggtttaattgtttttttttttgatatataagtggaagtgttatagttggacggagtattatggtatgaaggtagaaaggacgcgattgggtgtttttttgaagtttagggagtagtttttggggagaaagtgtttttaggaagcggataagagttttgttgagttgaagagtagggtagtagtcggggcgagcgaggttggagttatgtagggtagagttttaaatgttaagttggggtttgttttcggtaggattagttagttgtttcgagcgggggttggaattagattttttttacgtggattcgcggatagggcggggattaggacgggggcggggttaggggaggggcggggttcggggagtgaggtaagattggagggtttgggattttcgggtattcgggttaggggaggggcggggtttagggagggagggagagattggatgatttggggtttgtaaggcggggcgaggggaggggcggggcgaggggaggggcggggtttagggagggagggtgagattgtggaggatttggggttcgcggggtcggggtaaggggaggggcggggtttagggagggaggagagattggaggatttgaggtttacgggggcggggttaggggcggggcggggttttggaaggcgggcgagattgtggaggatttggagttggtagaggttatggtaagggggaggggtacggtttggggtttcggggcgggttatttggaaattttaatttggttcggagaataaagtttttattttaagaaaaggaaagggaaagcggggtggttaaattttttagtattaagagagtttttttttttggggtttatgttttcgcgtgatttttgtaagggtggattatattgtggagtttttgtatttggtgtgggttagggtaggcggtaggggtagggttcggggttcggggcgggggtgtttacggtgagattaaaagttaggtaggagttttcggggtttttgttgtgttattcggataggtcgtgggggcgggtaggggggcggggtcgggtttgtttttagcggtcgagtttagttttgtttttcgtacgttattttaggttcgtagtcgtgtcgggtgttttttagtatgttttttatttcggtggtcgaggatttcgatttttttatttataatttgttttacggcgttttttcgattagaggcgacgtgagtagtggggttttggcgttcgggcgcggggagggagtggagtggagtggagtggagtggagtggagtggagtggaatggagtggaatgaggggcgggatggaggtttgtgttattttttttttaagattcgtttcgtgagagtgtttatgggttcgagtttcgtttcgtaattttttagttgtgtacgttgtttaattttttagttttattgttcgtaggtttgttgagaattaaatgtaaaatgaaatgaatcgtgttatttttttagataagtagagtaagttaggattttgttatcggaagttgtagtatataggtatgttgtttatttcgaggtggttgcggtgtgtttttttcgtttaagaggttaggttagggttggtggtttatttcgttggatagtttttaattttagaattcgggaaatgataattcggtatgcgtagtaggttagaggggtacgcgcgttttttggtttagagttgtgagatttaagatggtaagtgtttttgtttatagttgaaatttttttagtttttggtgtgggttttttggtatttttttattgattagaagaaagagggtagggaaataaattttgattaagttagtgtagtttgattggtagaaagaagtatttgaaaattgggggtttattagtaaatagataataagaggttttttaggttggaaaagtagatttttttggatttgttgatgatatttttggtttagatttttgtttttaattttaaaggtaaatttttgatttatttttgtaagttatagaattttagaattaggaaatgtttgttaaacgaggggtttggtagttggtttttttttggaaagtggggtttttttttttttttatggtttgttattggatgtaagtggttggttttttgtgggtttgtttgcggtaagtgttttggtttagaagagttaatttgtggttttatatttggtcgggttgattagatgttgtaaggatatagaaagtggatatttaattttttggaggatataatttgaggtatattaaattttaatttgtgatggttaataatttttttgtagatagagttttttttttgttttttttaaatattttgttttcggtagatgtgtttttttttattttttttgggagtataaatttattagatagaaatatttgtgagaggtaggtatattttagtagggagttttgatttgtttttttaggggaatcgaattaatattcgttagagtgtggttaggtgtttttagatattatgtttcgttgttttaatattagaatgtgtagggtagttattatagatgtttggaagagagagttttatttcgttgttttttgatatagtgttgggggtggagagttggttttttggttttttagttgaataagttttttttgaagttttttttgtaggtattggatattttaatcgtgatggttgttttgttaggtaagattagttgttaaggtaaaatttttttttttttatgttagtagttagttttttttaatttgagtggaataataatgaattttgttattattttatttatttttttttatttagcgaatgtttatgaattttaattttggtttagattttgtttgggtttcgagttggtattaaagatataggagacgttttttttttatttttggttgatggattagtaaggtgtataggggtgttttttgtgaaggtaggggtggtggtttttgagaacggggttgtagtagtgtggagttggttttgtcgggtgttttgttaaagttttcgtggtttggttgtgttgttgttttttggtttttgttttttttagttatattggttgtttttgagtttttgagatgtgttaagagtagttttttgtttttaggttttagtatatgttgttttttttgtttggaatattcgtttttttgttttttatatgtttggtttttttttattttttgggatttagtttaaatgttattttttaagtattttttttgaatgagtttttcgttgcggtttagttttggttattttttattatattttgtgtttttttttgtttttggagagaaggaattacgttattgtttttagggttttagtagtttttgtgtaatgttggtattgagaagatgttttttaaatttttgtggtatgaatagcgtttattttgtgtttgtttttgtggtgagagatttatagatattaattaaatttttataataaatttattgtgaagttattgtttttattttatagatgaggaaattgaggtttagagaggtaaagtattatgttttagattttatagttagtaagaggtagatatggggttgatttttatatttgttagttttttaatttgtaaggtttagttttacggggtttagcgggttttttttttgtgtgcggaaacgagagattgtaagaaataaagatataagataaagagataaagagagaatagttgggttcggggtattgttattattgagatatagagatcggtagtggtttcgaatggttgggtatattgatatttattgtatataagataaggggggtagggtagggagggtgagttatttaagtgattgataaggttaagtaagttatgtgattatgggacgggggtttttttttttaaggtagtcgaagtagagagggaaggtagtataagttagtatttttttttatgtatttataagaaagattaaagattttaagattttcgttattttttttatcgttatttattataaattttaaagaggaattaggagtataggaggaatatgaaagtggataaggagcgtgattattgaagtatagtattatagggaggggtttaggtttttagatgattgcgggtaggtttggataatatttagttttttataggaagttggtggagtagagtgttttttgatttttttaaggaaagggagatttttttttgcggtttgttaagtaatgggtgtttttttaggtattggcgttatcgtttgattaaggagcgtttaagcggtttttatgcgggtgtgatagggtttattttttgttttttaggttattttttagaatgtttttttagtatttgattttatatttatcggttatttttaggttatattgtattataataaagagtaatattaaaaattaatgattaataatgtttatattaataatcgataattgtttatgattatttgtatatttaatttgtattataattgtatagtagtatagttatagtttatgtttttagttttttgtttcggtatttgggtaatttttcgtttatattaattttatgtttttttttttatgttaggttgggagttgggtaatgtttttttttggataattttatattagatatgattaattattttaaaataaaggtaatgtatatttatttttttgaagttagataaatgcggtttttttttttagtttgttttttttaagttgtagatgggaaattgaggtttagagatttgtttaaggtgataagatggtgaatgagggagtagatttggagtttaggaattttggatttgatttgtgagttttttttagttttgtgttgaagaaaataatttttaaggttgaaagtagagggatttatttttttagattttttttgggtttttaggttatagtttgaagtataagtttgaagtttttaggttttgtttgtatttgaggtagtaggtagttgtatttgtgattttattttggaagttgtttattggtggtgatttttttttgtttttagttggggtgtggggattagggttagagatgtggtttaagggtttgttttgtatattttttgaatggaaagttatttggatttaggtggtttagttttttgtttaaagtagatttgttatttttaggaggggaagattgaggtttagggagttggtagtggggttgagaatgagtaattaagttttttaggtagttttttttagggtaggttttgttgggattttagatgaggagtatggttttggtttatttcgattttaagagttgatatgcgtggagaaatggttatttttttttagtttattttagtgagtagttaatggagataaggttagttaataattttattattaagttcgttggtattgaaatggttaagttggtggtttaggagagttggaagtttggtttaggatagagttttgggaagttgagtttgtaaatatgttttcgggtttttgttgacgagtaaagtttagggttgtggggataaagattaggatttaataaatatttaagatatttttgttgatgttgggattttgtggtatagaaaggaatttgttttgtatgttttgagtagtttggttttttgtagtttttttataattcgagtttttttttatttgagttataatagagtttattaatttaagttatttggtttttagtattgtgtgttgggtatttatgttttatcgtataattgaattattttagttaaggtttagaaatttggaaaataatttaatattttggtaaggtggtaagttttttattattggaggtatttatgtaatgtttagggaattttgtaggggtttttgtttaggttaagtggttaggattaggttgattgttttttttttagtttaagggatatttgattttttttttatttagggaatatagattatttttttttttagttttggaagtagagatggtataagggagttggggtaggatgttgagaatatggttttttagttcgttttgtatatagggttatttaaagggggatttgtggattttttaatagataggttttttgagtaaatgagttaagtttagttaggggttttttttggtgttgacggtgtcgttttttttttagt

SEQ ID NO: 668 - DNA, 9963 bp, Artificial Sequence
  chemically treated genomic DNA (Homo sapiens)
gttaggaggaagacgatatcgttagtattagaaaaagtttttggttgggtttggtttatttatttagaaagtttatttattgaagagtttataggtttttttttaggtggttttgtatgtagagcggattgaagaattatgtttttagtattttgttttagtttttttgtgttatttttgtttttagaattaaaaggaaaaataatttgtgttttttgaatgggaaagaaattaaatattttttggattgggggaagagtagttagtttggttttagttatttaatttgggtaaagatttttgtaaagttttttaggtattatataaatgtttttagtgatgaggagtttattattttattaggatgttggattattttttaggtttttaggttttgattagggtagtttagttgtgcggtggagtatgagtgtttaatatatagtgttgagggttaggtggtttggattaatgagttttgttgtagtttaaatggaggagagttcgggttgtaagggagttgtaggaagttagattgtttagaatatgtaaggtaagtttttttttgtattataaaattttagtattaataaagatgttttaaatatttgttaagttttggtttttgtttttataattttgagttttgttcgttaataagaattcgagggtatgtttgtagatttaattttttagggttttgttttgagttaggtttttagtttttttgaattattagtttggttattttagtgttagcgagtttagtggtgggattattggttggttttatttttattggttgtttattggggtgggttgagaaaagatgattatttttttacgtatgttagtttttggaatcggggtagattagagttatattttttatttgaggttttagtagagtttattttagaagaggttgtttggagagtttagttatttatttttagttttattgttaattttttgggttttagttttttttttttgaaaatggtaaatttgttttaggtaaagagttgaattatttgaatttaagtggttttttatttagggaatgtgtagggtagatttttggattatatttttgattttggtttttatattttagttgaaggtaagaaggagttattattagtaagtaatttttaaaatggggttataagtgtagttgtttgttgttttaaatgtaaataaagtttagaagttttaaatttgtgttttaaattatgatttgaggatttagaaaaagtttgagagagtgagtttttttatttttaattttgggagttattttttttagtataaaattagagggggtttataggttagatttaggatttttgggttttaagtttgtttttttatttattattttattattttggataagtttttgggttttagttttttatttgtaatttgagggaaataaattaaggagggagatcgtatttgtttaattttaagagaatgaatgtgtattgtttttgttttaaaatagttggttatatttgatataaagttgtttaaaggaaagtattatttaatttttagtttgatatagagggggaagtatgggattggtgtgggcgaaggattatttaggtgtcgaggtaagagattgaaggtataaattgtagttatattgttatatagttgtaatataaattagatatatagatgattatggataattatcgattattagtataaatattattaattattagtttttaatattattttttattgtagtataatataatttaggaataatcggtgggtatagggttaggtattgaagggatattttgagaagtgatttagaaggtaagaggtgagttttgttatattcgtataagggtcgtttgagcgttttttggttaagcggtaacgttagtgtttgggaaggtatttattatttagtagatcgtaaaagggagtttttttttttttggaggagttagggaatattttgttttattagttttttgtaggaggttggatattatttaggtttgttcgtagttatttggaggtttaaatttttttttgtggtgttgtgttttaatggttacgttttttgtttatttttatgttttttttgtatttttggtttttttttgaagtttgtagtagatagcggtagaagaaatagcgaaagttttaaagtttttgattttttttataagtgtatagaagaaaatgttgatttatgttgttttttttttttgtttcggttattttagagggaagagttttcgttttatgattatatgatttgtttgattttattaattatttggatgatttattttttttattttgttttttttgttttgtgtgtaataaatattagtgtgtttagttattcggggttattatcggtttttgtgttttagtggtagtagtgtttcgggtttagttgttttttttttatttttttgttttgtgtttttattttttataatttttcgttttcgtatatagggagaaaattcgttaagtttcgtagggttggattttatagattgggaggttgatagatgtggggattaattttatatttgttttttattggttgtgagatttggagtatgatgttttgtttttttggattttagtttttttatttgtagaatggggataataattttatagtaggtttattgtgagaatttaattaatatttgtaaattttttattataagaatagatatagggtagacgttatttatgttataaagatttagagagtatttttttagtattagtattatataaaggttgttgaggttttgggaatagtgacgtggttttttttttttagaagtaaaaggaaatatagggtgtggtgagagataattaaggttgggtcgtagcggggagtttatttagagagggtgtttaggaggtgatatttaagttgagttttaaagagtgagaaggggttaagtatatagagagtagaaggacgagtattttaggtagaaggaataatatgtgttaaggtttgaaggtaggaagttgtttttagtatattttagagatttaaaggtagttaatgtggttggagaaagtagaggttaggaggtagtagtatagttagattacggggattttaataaggtattcggtaaaattagttttatattattataatttcgtttttagaggttattatttttatttttatagagagtatttttgtatattttattagtttattaattagaaatggaaggaaggcgttttttgtgtttttgatgttaattcggagtttaggtaaaatttggattagagttggggtttataagtattcgttgaataaaaaaaaatgaataaagtgatggtaggatttattgttattttatttaaattaggaaaggttgattgttgatatgggggaagggaggttttgttttggtaattagttttgtttggtaaggtagttattacggttggaatgtttaatgtttgtagagaaagttttagaagaggtttgtttagttggaaggttaaagggttaattttttatttttagtattgtattagaggatagcggaatggggtttttttttttagatatttgtagtggttgttttgtatattttgatgttgaaatagcgggatatggtgtttgaaaatatttagttatattttaacggatattaattcgatttttttgagaaagtaagttagagttttttattggggtgtgtttgttttttataaatgtttttgtttaatggatttgtgtttttaggaaaggtgagggaggatatatttgtcgagggtaaagtgtttgaggagggtagagggagggttttgtttgtagaaaggttgttggttattataagttaagatttaatgtgttttagattgtgttttttaggggattgagtgtttattttttgtatttttgtaatatttggttagttcggttagatgtgaaattataagttgatttttttagattaaagtatttatcgtagataggtttataaaaggttagttatttgtatttaatgataagttatgggggaaggagggaattttattttttaagaagaagttaattgttaggtttttcgtttagtaaatattttttgattttggggttttatggtttatagagatgaattaggagtttatttttaaagttgggagtagaaatttaagttaaaaatattattaataaatttaagggaatttgtttttttaatttagggaattttttattatttatttgttgataaatttttagtttttaaatatttttttttattaattagattatattgatttagttaaagtttgtttttttgtttttttttttttgattagtaggggaatgttagggagtttatattaggagttgaaagaattttagttataggtagagatatttgttattttagattttataattttaagttaagaaacgcgcgtgtttttttgatttgttacgtatatcgggttattatttttcgggttttagggttaggggttatttagcgagatgaattattagttttgatttggttttttgggcgagagaaatatatcgtaattatttcggagtaggtagtatgtttgtgtgttgtagttttcggtaatagaattttagtttgttttgtttgtttgggagagtgatacgatttattttattttgtatttaatttttagtaaatttgcggataatgaggttgaaaagttaaataacgtgtatagttagaaagttacgaggcgggattcgagtttataggtatttttacggaacgaattttaagagaaaaatggtataagtttttatttcgttttttattttattttattttattttattttattttattttattttattttattttatttttttttcgcgttcggacgttaaagttttattgtttacgtcgtttttggtcgagaagacgtcgtagggtaggttgtggatggggaagtcggaattttcggttatcgggatgaaggatatgttgaagagtattcggtacggttgcgggtttaaggtggcgtgcggagagtaggattgaattcggtcgttgaggataggttcggtttcgtttttttgttcgtttttacggtttgttcgggtgatatagtagggatttcggaggtttttatttgatttttggttttatcgtgaatattttcgtttcgaatttcgagttttgtttttatcgtttattttgatttatattaggtgtagaggttttatagtatagtttatttttatagaaattacgcgaagatatggattttaaaaaaaaagatttttttaatgttggggaatttagttatttcgtttttttttttttttttttgagatggaaattttgtttttcgggttaaattgaaatttttaagtaattcgtttcgaaattttaagtcgtgttttttttttttattatgatttttgttagttttaggttttttatagtttcgttcgttttttagagtttcgtttcgtttttggtttcgttttcgtgggttttaggttttttagttttttttttttttttgagtttcgtttttttttttgtttcgatttcgcgagttttaggttttttatagttttattttttttttttgagtttcgttttttttttcgtttcgttttttttttcgtttcgttttgtaagttttaggttatttagtttttttttttttttttgagtttcgttttttttttggttcgggtattcgagagttttaggttttttagttttgttttatttttcgagtttcgttttttttttggtttcgttttcgttttgattttcgttttgttcgcgagtttacgtgggggagatttggttttagttttcgttcggggtagttagttggttttatcgagagtaaattttagtttagtatttaaggttttgttttgtatgattttagtttcgttcgtttcggttgttgttttgttttttagtttaatagaatttttgttcgttttttggaaatattttttttttaagagttgttttttgagttttagaagaatatttagtcgcgttttttttgtttttatattatgatgtttcgtttagttatgatatttttatttgtatgttagagaaggggatagttaggtttgtttggaaggttttaattaatgagaattaatattttaaaaaatataatttatttgttttatatgttagtagtaaaatgacgttgataagatgtttaattttggataagttatttaaattttttttattttagtttttttttttgtataatgttgatgataatagtttttattttataaagttgatataagaatggaatgaattaatatttgtgaagtatttagaatagtgtttggtatatataggttatgtgtgtgtggaaagagagagaagggagggaaaaagaggaaaggaggggagggggataaaggaaaggaaagataaaagagaaataggagaagagagagagggagaaagaaaagaaggaagataggaaagaagggaaaggtagattattttagggtgggtttaaggtgttatttaattatttatgtgtagttagttgtagttttttgagattatgttatagttaggatatttggaatatatcggagagtgtgtcgttgtgttattgttggtgtgaatgatttaggtatatttttaaatagttaggatgtcggttgaaatttagaaaagtagacgatagtttgggtaagggttttttgaagatttttgaggaatgtgatatagtgattgttgagttagggaggttgtttcgtattttagtttagggagaagaggttggaagatggtaggataatgtgagttaagtgggtttgaaattagacggtttgagaggagcgagtacggtaagtagggttcgttgttgagtttttttttttagtttttgagattattttggtgtttgtttattaggcgtgattagtgattattatttagtaaggagtgtaatttgggtatagttttttggtttttattttttgttttgagtggttttgttaaggattggttttagtttttttaagttagttttggggagggaatgaaggtggtttgatttgttttggtaggtttttgaaagaggaaaagaagaggagagtattttaatttggtggttttataaagaggtattttagggagtatttgatatttgtttaatttaagttagtttttagttgtaacgtaatgaattatttttacgttttgtagttgttttgtttttttttattaaaattacgagtttttttattttatgtgtaattttgttaatatttagtaaaatatttggtatagaataggttttttataaatatatgttattaatataaaattgttgattaaaaggaaatgaagtaataattaataagtttatgttttatgttaggttatggggatatattagtaatttatatttttaatttttgtttttatggagtatgtgttgtgtgggggatgttaggttaggagtttttattgaatatatataagttaataaaagtttaaatgataaaatttttggagaaagaaaattaaagtattttagggaaaggatatggggtagatgtatgtgtaggaaagggtgtggggatgagatggttaaagagggagtaagattttatagttttaaaatagatttaattaatttattaattatatatagtgtttgaaaacgttaaagttgttttttatttggaaaatagtatttgaaataatttgtaagtatattatatttttttttttttattttttggaagagaatgtgttggttacgtatattataataattatttaaaaagaattttaaaataaagagattgtttataattttattaatgtagtttttttatttttatgttttttttttattttatttgtatgtatatggtttttttatttttataaattttatatagatgtaattttttagtttttttttattttatttttttgaatatttttttttgaggtttaataggttttattatgattattgttattagttaaggaagtcgtaatgttttagatggtaataataacggtttaatgaagaggtgtatgtatagaatgttttttttttttttgataattatttaaggaagatttttgatttaaagagtatgaatatttttaggattcgtagtgagttttagtatttttagtaatgaaggttggtttgggtttttgtagtattatatttaatgtttttttttgatgttaaaaagtaatatattgtattgtagtttttatttatataaagtatgttttttatttttttataagagagttgagagagaattttttagatttaggatattaatgttttgtaacggttttgagaagttggtagttgttatttagataagtaaggtgtggacgttgtttgtattgggaagtaggatggggtggttttttttgtaatatttagtattgttgtatggtcgttaagaaaaagaggaaattatgttaaaggttaagtattttagtaaagtaagtgtttttttttttttaggtttgagtttagtgatgtttatggtatatattttgtagtgggtattatgggtttggtatgtgtttagtatattttagtattaagaatatatgttatgtgtaaatatatatgatattttgtttttttaaaggagtttaaaatttagaggattttggaattgaacgtaagtaatttaagtgtaagtgtatgttgtagggtggggagaaggggattggatgaagttttaggtgaattagtttaattagggttaggttttttgtaatataaatttttttttttttgttttttttaattttgtttttagtttgttttaggtattattgtgtttatgttttgatggaatattattttaaatttattttggatttaagttggatttgtaagatttataaataataagtagtattttaaataaagaatatgttattgttatttgatttaataatgtgtattatataatgagttttttgttattattattaaagtaggagttattttttagatttttttttattgttattttaataaaatatttttaattttgttttgtttttttataattaaatatatatttaatagtttttttatttgaattatttttttttttttatttaaatgttcggtgtttttttgagttatagttgtggattttattttgtttttagaaatatagaggaatgttgatatataagttataatttttgtatttaatttgtttggtatagttgaatagattatttttagtgtttttttttgtaaatattgtttagtttgttaataataaatttatattaaaatttttttgtttttttttcgttttttttttttttttttttttttttttttttgttatatatatatatatatatatatatatatatatatatatattaaagttggttaggtatgatttttttttgtggttttttttttagatgttgaataaaaggaaatagtatgtggtaatagaatatatatgtttgttgttgttgttgttggtttgttttttgttatgttttgttttgttttgttttgttttgttttgagataaagtttcgttttgttgtttaggttggagtgtagtagtacgatttcggtttacggtaatttttattttttaggtttaagtgatttttttgttttagttttttaattagttgggattataggtttatattattatatttggttaatttttgtatttttggtagagatggggttttattatgttggttaggttcgttttgaatttttgatttcgtgatttgtttattttagttttttaagttgttgggattataggcgtgagtttttgtatttagttgtaagaatatatatgttaaggttttaaataagaaagatttgaaatttttttttagaacgtttatattgagtttgggtttaggttattgtattttat

SEQ ID NO: 669 - DNA, 5663 bp, Artificial Sequence
  chemically treated genomic DNA (Homo sapiens)
gatgagagaattaggttggacgtggcgttttatatttgtcgttttagtattttgggaggttgaggtaggaggattaagagtttgggaggcggaggcggaggttgtagtgagacgagattgcgttattttagttttagtggtagagtgagattttgttttaaaaaaaaaaaaggttaggcgcggtggcgtacgtttgtaattttagtattttgggaggtcgaggcgggcggattatttgaggttaggagtttgagattagtttggttaatatggtaaaattttgtttttattaaaaatataaaaattagataggcgtggtggtaggtatttgtaattttagttattcgggaggttgaggcgggagaatcgtttgaatttggaaggtagtggttgtagtgagttaagattatgttattgtagtttagtttgggtaatagagtgagattttattttaaaaaaaaaaaaaaaaaagaatgtagaagttttttataatttatgggtataattttttttatattgtttagtgataaggtagaggtagaataggttattataaaagatgtgttagattaaaggatagatgaatttttttttttttttttttttttttcgagagggagttttgtttttgtcgtttaggttggagtgtagtgttatgattttagtttattgtaaggtttgttttttaggttgaagcgatttttttgttttagtttttttagaagttgggattataggtgtttattattatagtcggtttattttttgtatttttagtagagattaggtttttttatgttggggacgttggttttaaatttttgattttaggtaatttgtttatttcggttttttaaagtgttgggattataggcgcgcgttattatacgtttttttttttttttttgagatagagttttaatttgtcgtttaggttgtagttggtatgatttcggtttattgtaatttatattttttgggtttaagtgattttttagttttagttttttaagtagttgcgattataggtattggttattacgttcggttaattttgtatttttagtagagatgtggttttattatgttggttaggttaaattcgaatttttgattttaggtgatttatttattttagttttttaaagcgttgggattatagttatgagttattttatttgttttagatagaaaattattttttttttgagacggagtgtcgttttgttatttaggttggagtgtaatggtacgattttagtttattgtaagtttcgttttttgggtttaagtaaatttttcgttttagttttttgagtagttggaattatatgtatttgttattatattcggttaatttttgtagttttggtagagatggggttttattatgttgtttaagttggtttcgaatttttgtttttaggtgattcgtttgttttagttttttaaagtgttgggattataggcgtgagttattgcgtcgggttaagataagagttttgttttagttgtttaggttggagtgtagtggcgtaattttggtttattgtaattttcgttttttgggtttaggcgatttttttgttttagtttttcgagtagttgggattataggtatgtattattatatttggttgattttgtatttttagtagagacggggtttttttatgttcgttaggttggttttgaatttttgattttaggtgatttgtttgttttggttttttaaagtgttgggattataggtatgagttattatatttggttaatttttgtgtttttagtagagatgagattttattatgttggttaggttagttttaaatttttgattttaggtgatttatcggtttcggttttttaaaatgttgggattataagtgtgagatatcgtgtttagtatttttgttttttttttttttttgagatagggtgttattttgttatttaggttggagtgtagtggcgtgatggtggttttttgtagttttagttttttgggtttaagtgatttttttattttagttttttaagtagttgggattatgtagggtttagttttatggggtttagtgggtgttttttttatgtacggagaagagagattgtaataaataaagatataagattaagaaataaagagaaaatagttgggtttcggggattattattattaagacgcggagattggtagcggtttcgaacggttaggttttttgatatttattgtatatatgataagggggtagcgtaaggaaggtgaattttttaagtgattgataaggtgaagtatgttacgtgattataggatgggggttttttttttttaggtaggtgaagtagagaaagaaggtagtatacgttagtatttttttttttgtatttataagaaagattaaagattttaagatttttattattttttttatcgttatttattacgaattttaaagacgaattagaagtaagggaggaatatgaaagtggataaggagcgtgattagtgaagtattatagggaggggtttaggttttcggatgattgcgtgtaggtttggataatatttagttttttataagaagttggtggagtagagtgttttttgatttttttaagtaaaggagatttttttttatggtttgttaagtaacgggtgtttttttagatattggcgttatcgtttgattaaggagtttttaagcggtttttatgcgggtatgatagaaggtttattttttgttttttatttattttttataatgtttttttagtatttgattttatatttatcggttatttttaggttatattagtaatgtaataaatagtaatattaaaagttaatgattaatgtttataataattgataattgtttatgattatttttataatttgtattatgattgtttttattgtaacgattttattatattgaaatagtttgtgttttcggttttttgtttcggtatttgggtaatttttcgtttataggattataggttcgtgttattatattgggtaatataaaaaatataaaaaaaaaattttgtattttttgtagagacgaggttttgttatattgtttaggttggaatttttatttttgttattgtatttaacgtatttttttttttcggttatttttatggttttttttttgatttttatagtttgaatatattgtatgtgttaggtaggggtttatatttattaagttttgtgtgtgttttgagtttaggttttttattattttgggaaaattattggtaattttttttttaaatattttttatgatttgtttttttttttttttttgggagttttattatatgtatatgatattatttgatatttttttatagtttttggatgttttttttaaaaaaaaatttttttttttttttattttttaacgtgggtaatttttattttttttagttgtgttgattttattgttgttttattagaaaaattatttgttattagcgtttttttttttttataatttgatgagttttttttttatgtatattgtttatttttcgtataagagatttttatatattaattatagttaatttaaatttttagtttgttttaatttttcgattatttttgagtttagttttgttaattgtttagtgttattttttgtttttgaaatagggttttgttttgttgtttaggttggagtgtagcggcgcgattttaggttgttttttgagtttatattattttttttaattagtagattgtaaagtgttcgagtcgggtcgtgtaggagtttttgtgggggttttatggatttcgaatttttatttttgttttatttttattttatgaatttaaggttttattttgtgtttcggtttttcgtttgtggtgttgaacgttatttacgttatttacgttatttacgtaattaatataataaagacgtttgtcgggaacgcggtttttcggttgaattttttcggtggttttaaggttattgttagaggatgcggacgggtttttagggtttttatttatttaggattttgaggtatattagtttcgtttaggtattcgtttttacgaatttttatgtttggttttgttttgagatagagtttcgttttgtcgtttaggttggttaaaagatagggttttagtcgggtgcggtggtttacgtttgtaattttagtattttgggaggtcgaggcgggcggattatttgaggttcggagttcgagattagtttgggttaatatggcgaaacgttgtttttattaaaaataataaaaattatttaggcgtggtggcgcgtatttgtaattttagttattcgggaggttgaggtaggagaattatttgaatttaggaggtagacgttgtagtgagtcgagatcgcgttattgtattttagtttgggcgatagagggagatttcgttttaaaaaaaggaaaaaaaaaaaaaagaaaagaaataaaagtgatggggtttcgttttgttgtttaggttagtttggaatttttgggtttaagcgattttttagtttcggttttttaaagcgttgggaatataggcgcggttatcgcgcggttttcggttgtcgaaatatcgttttgcgcgcggatcgttcggtcgtcgggaggaatagcggttgttcggagtttagaggcgcgcgcggttttgcgtttttcgcggcgttttgagtttgtttcggtttggttggttaggtggtttttttaggattaattttagttattttcggtaggaattacgtttgaggggcggtagtttgttcgcgcgagacgttttcgcggattatatcgcggcggtaaagttaaacgtaaaaattattttatcgcgcgtaggcgttttttttaggattaatatggttacgacgtaaggtttcgatttgaggggcgtggtttggtcgtcgttagttaacgggtgtgcgcgtttggtcgtagttaataggaaggtagcgcgggttcgggcgtagggagtcgtcgtcggggttgtaggcgttaaggttatgttcgattcgtgggtttcgaatttcgtttcgggttaggatttagggggtcgtcggagggtttgggtcgagttgttgggtaggtgggcgcggtaggtcgcgggagtgggcggcgttcggttcgggacggtttcgtcggtttttcgattttttttcgttagagttttcgtcggtcggattttcggacgtcgcgttcggggggttgtgcggggtgggcgttcggttggggcggcgcggttgtttcggattcggttttttttgcgtttgggcggacgtttattagatcgtcgttcgcggggcgtttttttttttttcgaacgtcgttttcgtcggtcgttttgttaggcgggtttggggtgcgcggtttggggttttttttagcgtagaggtcgtttttcgttagtcgttttcgggtttttttgtttcgggtttttttgggtcgtttttttcggcgttcgcggtggggtcgttttcgttagtttttcgagatttgcgttttggggaggagtttcggttttttttcgggagggtgtcgttggtgggttttttcgcggcgtttatttgcgcgtcgggtcggggatttcgtgtgtgaattgtgttgtgatggtttcgaatcgattttttttcgtagt

SEQ ID NO: 670 - DNA, 5663 bp, Artificial Sequence
  chemically treated genomic DNA (Homo sapiens)
gttacggagagaagtcggttcgaaattattatagtataatttatatacggggttttcggttcgacgcgtaggtggacgtcgcggagaaatttattagcgatattttttcgaagaggggtcggggtttttttttagggcgtaggtttcgggaaattaacggagacggttttatcgcggacgtcggggaagacggtttaggagggttcgaggtaggggagttcggggacggttggcgaggggcggtttttgcgttgaggggagttttaggtcgcgtattttaggttcgtttgatagggcggtcggcgggggcggcgttcgggaaagaagggagcgtttcgcgggcggcggtttggtgggcgttcgtttaggcgtaggaggggtcgggttcgaggtagtcgcgtcgttttagtcgggcgtttatttcgtatagtttttcgggcgcggcgttcggggattcgatcggcggaggttttggcgggaagggatcggggaatcggcgaaatcgtttcgggtcggacgtcgtttattttcgcggtttgtcgcgtttatttatttagtagttcggtttaggtttttcggcggttttttgggttttggttcgaggcggagttcgggatttacgagtcggatatggttttggcgtttatagtttcggcggcggttttttgcgttcgagttcgcgttgtttttttattggttgcggttaggcgcgtatattcgttggttggcggcggttaggttacgttttttaggtcgaggttttgcgtcgtggttatgttggttttgggggaggcgtttgcgcgcggtgaggtagtttttgcgtttggttttgtcgtcgcggtgtagttcgcgggggcgtttcgcgcgggtagattgtcgttttttaagcgtggtttttgtcgggaatgattggggttggttttgaagagattatttggttaattaagtcgaggtaggtttagagcgtcgcggggagcgtaaagtcgcgcgcgtttttgagtttcgggtagtcgttgtttttttcggcggtcgaacggttcgcgcgtagggcggtgtttcggtagtcggagatcgcgcggtagtcgcgtttgtatttttagcgttttgggaggtcgaggttggagggtcgtttgagtttaggaattttagattagtttgggtaatagagcgagattttattatttttgttttttttttttttttttttttttttttttttgagacggagtttttttttgtcgtttaggttggagtgtagtggcgcgatttcggtttattgtaacgtttgttttttgggtttaggtgatttttttgttttagtttttcgagtagttgggattgtaggtgcgcgttattacgtttggatgatttttgttatttttagtagagatagcgtttcgttatgttggtttaggttagtttcgaatttcggattttaggtgattcgttcgtttcggttttttaaagtgttgggattataggcgtgagttatcgtattcggttgagattttattttttaattagtttgggcggtagagcgagattttgttttaaaataaaattaaatataagaattcgtaaaagcgagtgtttaggcgaagttaatgtgttttaaagttttgggtaagtagaggttttggagattcgttcgtattttttggtagtggttttggaattatcgaagggatttagtcgaagggtcgcgttttcggtaggcgtttttattgtgttgattacgtagatggcgtagatgacgtagatgacgtttagtattataaacgaagagtcgaggtatagagtggggttttggatttatgagatggggatggagtagaaatgagaattcggagtttatgaaatttttataaagatttttgtacggttcgattcggatattttgtaatttgttggttgagggggatggtgtgaatttagggaatagtttgagatcgcgtcgttgtattttagtttgggtaatagagtaagattttgttttaaaaataaaaaataatattaagtaattaataggattagatttagaggtgatcgagaaattgaaataggttggaaatttaaattaattgtgattaatatgtggaggttttttgtacgaaaggtgaataatatgtatgaggaggaaatttattaaattataagaaaggaagaacgttgataataggtaatttttttgatggggtagtagtaggattaatatagttgagaaaaataggaattatttacgttggaaaataaagaagaaaaaaagtttttttttaaaaaaagtatttaagaattgtgggaaaatattaaatgatattatatgtatgtaataggatttttaaaagaagaagaaagaataaattataaaaaatgtttgaagagaaaattattaataatttttttaaaataatgaaagatttgagtttagagtatatataaaatttgataaatatgagtttttgtttgatatatgtagtgtatttaaattgtggaaattagagagaaaattatgaagatggtcggaggaaaaagatacgttaaatatagtaataaaggtaagaattttagtttgggtaatatggtaagatttcgtttttataaaaaatataaaattttttttttgtattttttgtattgtttagtgtggtgatacgagtttgtagttttgtgggcggagaattatttaggtgtcgaggtaagagatcgaaggtataaattattttagtataataaaatcgttataataagaatagttataatataaattatggagatgattatggataattattaattattataaatattaattattagtttttaatattattgtttgttgtattattaatataatttaggaataatcggtgggtatagggttaggtgttgaaaggatattgtgagaagtgagtggaaggtaagaggtgaattttttgttatgttcgtataagggtcgtttgagggttttttggttaagcggtaacgttagtgtttgggaaggtattcgttatttagtagattatgaaagggagttttttttgtttggaggagttagggaatattttgttttattagttttttgtgggaggttggatgttatttaggtttgtacgtagttattcggaggtttaaatttttttttgtggtgttttattggttacgttttttgtttatttttatgttttttttttatttttggttcgtttttgaagttcgtagtagatagcggtagaagaaatagtgaaagttttaaagtttttgattttttttataagtgtagagaagaaaatgttgacgtatgttgttttttttttttgttttatttatttgaaagggaagggtttttattttgtaattacgtgatatgttttattttgttaattatttagaagatttattttttttacgttgtttttttgttatgtatgtaatagatattaaagagtttagtcgttcggggtcgttattagttttcgcgttttgatggtagtggttttcggggtttagttgttttttttttattttttggttttgtgtttttatttattataatttttttttttcgtatatggggagaatatttattaagttttatagggttggattttatatagttttagttatttgggaggttgaggtgagaggattatttgagtttaggaggttgaggttgtagggagttattattacgttattgtattttagtttggatgatagagtgatattttgttttaaaaaaaaaaaaaaggtaggggtgttgggtacggtgttttatatttgtaattttagtattttggggggtcgaggtcggtggattatttgaggttaggagtttgagattagtttggttaatatggtgaaattttatttttattaaaaatataaaaattggttaggtgtggtggtttatgtttgtaattttagtattttgggaggttaaggtaggtagattatttgaggttaggagtttaagattagtttgacgaatatggagaaatttcgtttttattaaaaatataaaattagttaggtgtggtggtgtatgtttgtaattttagttattcgggaggttgaggtaggagaatcgtttgaatttaggaggcgaaggttgtagtaaattaagattgcgttattgtattttagtttgggtaattagagtaaaatttttgttttggttcggcgtagtggtttacgtttgtaattttagtattttgggaggttgaggtaggcgggttatttgagagtaggagttcgagattagtttggataatatggtgaaattttatttttattaaaattataaaaattagtcgggtgtggtggtaggtgtatgtaattttagttatttaggaggttgaggcgggagatttgtttgaatttaggaggcggagtttgtagtgagttgagatcgtgttattgtattttagtttgggtgatagagcgatatttcgttttaaaaaaaagataattttttgtttaggataagtggggtggtttatgattgtaattttagcgttttgggaggttgaggtgggtagattatttgaggttaggagttcgaatttggtttggttaatatggtgaaattatatttttattaaaaatataaaattagtcgggcgtggtgattagtgtttgtaatcgtagttatttgggaggttgaggttggagaattatttgaatttaggagatgtaggttgtagtgagtcgagattatgttaattatagtttgggcgatagattgagattttgttttaaaaaaaaaaaaaaaagcgtatggtggcgcgcgtttgtaattttagtattttgggaggtcgaggtgggtagattatttgaagttaggagtttgagattagcgtttttaatatggagaaatttggtttttattaaaaatataaaaaatgagtcggttgtggtggtgggtatttgtaattttagtttttggggaggttgagataggagaatcgttttagtttgggaggtaaattttgtagtgaattgagattatgatattgtattttagtttgggcgataagagtaaaattttttttcgaaaagaaaagaaaagaaaagaaaagtttatttgttttttgatttggtatattttttataatggtttgttttgtttttgttttgttattgagtagtgtggggagaattatgtttatgagttgtgaggaatttttgtatttttttttttttttttttttaagatggagttttattttgttgtttaggttggattgtagtggtatgattttggtttattgtaattattgttttttaggtttaagcgattttttcgttttagtttttcgagtagttgggattataggtgtttgttattacgtttgtttaatttttgtatttttagtagagatagggttttgttatgttggttaggttggttttaaatttttgattttaggtgattcgttcgtttcggttttttaaagtgttgggattataggcgtgcgttatcgcgtttggttttttttttttttgagatagggttttattttgttattaaggttagagtggcgtaatttcgttttattataattttcgttttcgttttttaggtttttggtttttttattttagttttttaaagtgttgggacgataggtgtgaggcgttacgtttagtttagtttttttatt

SEQ ID NO: 671 - DNA, 5776 bp, Artificial Sequence
  chemically treated genomic DNA (Homo sapiens)
atgttttaattttttttgagtgtatatttagttgtatattgagtaattgttgggttataaggtaattttgtttaattttttaaggaattgttagtttgttttttaaagttgttgtatcgttttatagttttattagaagtatatatgggtaacgatttttttatatttatgttaatatttgttgttatttgtttttgattttaattattttagtgggtgtgaagtaatattttattgtggttttggtgtgtatttttttaatgattaatgatgttgagttgagtatttttttttgtgtttattggagaaatgtttttttagatttttcgattatttttaattggattattgttattattattatttttggattagggttttgttttgttatttaggttataatgtagtggcgtgattatggtttattgaagttatagttttttgggtttaagtagtttttttgttttagttttttgagtaattgggattataggtgtgtattattatggtcgattaattttttattttattgtagagatagggttttattatgttgtttaggttggttttgaatttttgggtttaggtaatttttttgttttagttttttaaagtgttgggattataggtgtaagttattgtgtttggttagtattttttttatatgttagatataggtttttgaatagatatatgatatgatatgatatatgatttataaatgatatatgatttataaatattttttttattttgtgggttgtttttttatttttttgataatattttttaatgtataaatatttttttttttttttttttttttttgagacggagttttgttttgtcgttaggttggagtatagtggtattatttgggtttattgtaattttcgttttttgggtttaagtgatttttttgttttagttttttgagtagttgggattataggcgtgtattattacgtttagttaatttttgtatttttagtagagacggggttttattatgttggataggatggttttaattttttgattttatgattcgttcgttttggttttttaaagtgttgggattataggtatgagttatcgcgtttggtttatataaaaatttttaattttgagaaagtttagtttattttgttttttttttttattgtttatgtttttggtgttatatgaaataaattattgtaaaatgttataatttaattttagaatatttttattatttttttaaaattttttatattgattttttaattttattttaggttaatgatttgttttcggttttttatttatttatttatttatttatttatttagagatggagttttattttgttgtttaggtcggagtgtagtggcgtgatttttgtttattgtagtttttgttttttgggtttaagtggtttttttgttttagttttttaagtagttgggattataggtatgtgttattacgttcggttaattttttgtatttttagtggagatggggttttattatgttagttaggttggttttttgttttttggtgattcgtttattttagttttttaaagtgttgggattataggtatgagtttggtttgtttttaattttttttttttttttttttttttttgagatagttttgttttgtcgtttaggttggagtgtagtgagtcgagattgcgttattgtattttagttcgggtaatagagcgagatttcgttttaaaaaaaaaaagtttgttggtgtatttttttgtttttttttattgttaaattattggttttgattaattgatggatattttgattgtttttagtttttagttattatgaatatttttagttattatgagtatttgtaataaattttagtgtggacgtatgtttttattttttttgggagtattttttggagtggaattgttgagttttatggtaaatttgtgattgatttttttttttttttttttttttgagatggagttttgttttgttatttaggttggagtgtagtggcggggttttggtttattgtaagttttattttttgggtttacgttatttttttgttttagttttttgagtagttgggattataggtgttcgttattacgtttggttaattttttgtatttttagtagagacggggttttattgtgttagttaggatggtttcgatttattgatatcgtgatttatttgttttggttttttaaagtgttgggattataggaataagttattgcgttcggtttatgattaattttttaagaaattgttaaatttttttgaagtgagtgtattattttatatttttattagtagtgtatgagggttttttatatatatttttattaatatttggtataatttgtttttattgtagttattttatgtatgtatgtgtatagtgtttttatttttatttatttatttttgagatagagttttattttgttatttaggttggagtgtagtggtatggttttagtttattgtaattttcgttttttaggtttaagtgattgttatgttttagttttttgagtagttgggattataggtgtttgttattatgtttagttaatttttgtatttgtagtagagatagggttttgttttgttggtttggttggttttaaatttttggttttaagtgatttatttgttttagttttttaaagtgttgggattaaaggtgtgagttattacgttcggttgtgtgaagcgtttttttattttttgagacgaagtttcgttgtgttatttaggttagagtttagtggtaggatttcggtttattgtaatttttatttttcgggtttaagttatttttttattttagttttttaggtagttgggattataggtatgtattattatgtttgtttaatttttgtatttttagtagagacgaggttttattaagttggttatgttggttttgaatttttgattttaagtgatttatttattttagttttttaaagtgttgggattataggtataatatggttcggttttggttatgtttttaattgtgtttttttaatagttaataatgtcgagtatttttttatgtgttttttagttattagtagattttttttggtaaaatgtttttttttttttttttggtttattttaaaattgttttttgttttgttttgagatagggttttattttgttgtttacgttggagtgtagtggtttaattatggtttattgtagtttcgatatttttgagtttaggtgatttttttatttaagtttttcgagtagatgggattataggtgtgtgttattatgtttagttaatttttgtattttttttgtagaggtggggttttgttatgttgtttaggtaggttttaaatttttgaggtttaaatgatttttttattttagttttttaaagtgttgggataataggtatgaattattatatttagttaagattgtttttaaaaattttttttttgagttttgggagtttttatgtgttagggatattagttttttatgaggtatataattagtaagtagttttttttattttgtgattgtgatttttttttttttgaggtagggttttattttgttatttaggttggagggtagtggtgtgattatggtttattgtaatttggaatttttaggtttaagggttttttttattttagttttttaagtagttgggtttataggtgtgttattgtgttagggttaatgttttaaattttttgtagagataatgtttttataaaagatattatttttgttgtttaggttggttttgaatttttggttttagggaattttttagttttagttttttaaagtgttgggattatagtatgagttatatttagtttatgatttttttttttttttttttttttttttttttttttttttgagatggagtttcgttgttgcgtaggttggagtgtagtggggcgatttcggtttattgtaggttttggttcgcggggtttacgttttttttttgttttagtttttcgagtagttgggattataggcgttcgttatatcgttcggttaattttttgtatttttagtagagacggggttttatcgtgttagttatgatggtttcgattttttgatttcgtgattcgttcgtttcggttttttaaagtgttgggatcgtaggcgtgagttacggcgttcggttttagcgtatgattttttaatgatgtttttgtagtataagagtttttaattttaataaagttaatttttttttaaattgtataagtttttagtgttgtgtttaataatttgttgttaaatttaaggttataaagttgtttttttacgtttttttttttttttttttttgagacggagttttattttgttatttaggttggagtgtaatggtacgatgtcggtttattgtaattttcgttattcgggtttaagcgattttttcgttttagttttcggggtagttgggattataggcgtacgatattacgttttgttaatttttgtatttttgtagagaaggttttattatgttagttaggttgttttacgtttttttttagaagttttatatttttggtttttatatttagtttgtgatttattgagttgattttatgtacgtatgtatggtcgcgttttttttttttttgttttttttttttttttttttttgtatatggatatttaatttttttagttttatttaatttgaaatgattgggtaggtatttttgagtagtgtaagtatagagcggtattgttagtagattatacgcggtagaaagtcgattttggtgagcgtgttggtgttcgatagtgagtagagaaaggatggacgattacggagcgttttcgtttttagttatcgttttttggaaatattattcgtcggggcggagttgtttcgtttcggtgcggtattacgatttttagtatgtatttcgtagtcggttttcggtggaagcgggaatttaggaggatttgggggtgtggtagcgaggaagggtcgagttacggattgtggggtcgaaattcgttttcgtttattttttttcgaggttgtggttttcgcgagagtcgagcgggtcgtatcgtcggtcgtgcgattgttttagttagatacgatttcggtttttagttcgtttaagtttgtttggggttgttgattcgtttttttttcgagtttttcgcgggaattaattttttaagaggattaatcgtagtttagagtttcgtagattcggttaattagaggcgaggttgagagttcggcgggtcgcggggagagagcgttttatttgttttggaaagtttgggcgggtggattgggatttcgagagaagtaggggagttcggcggggtgtagaagtgtttaggttttttttcgttggggttgggagtttgggtaggttagttttattttttttaagttcgtttttggttttcgggtttagtttcggttattatgtttcgttagattatttttgtgggttttagttgtttggatttgtggagggaaaagaatgatcggttcgttcgataggttaaggtaatacggttgttggtattttcggtttgtagttttaagatttttgaaagcgggtttgtagtggatttattttaatagatggggagggattgagtttgattaaagagttagaaatgattggagaatgtattttttgttattgttgtaaggggagaaaaaaggattgatttttagtgataattttttttttatgtggtagg

SEQ ID NO: 672 - DNA, 5776 bp, Artificial Sequence
  chemically treated genomic DNA (Homo sapiens)
tttgttatatgagggaggggttgttattgaggattaatttttttttttttttttgtagtagtggtaagggatgtattttttagttatttttggttttttggttaagtttagtttttttttatttgttggggtaaatttattgtaaattcgtttttagggattttgaggttgtaaatcgagggtgttagtaatcgtgttattttggtttgtcgaacgagtcggttatttttttttttttataggtttaggtagttggagtttatagaggtggtttggcgggatatggtggtcgaggttgggttcggagattagaagcggatttaggaagggtgaagttggtttgtttaagtttttaattttagcggggaggggtttgggtatttttgtatttcgtcgagtttttttgtttttttcggggttttaatttattcgtttaggttttttaggatagatgggacgtttttttttcgcggttcgtcgggtttttaatttcgtttttggttggtcgggtttgcgaagttttgggttgcggttggtttttttgaagagttagttttcgcgggaaattcggggaggaaacgagttagtaattttaaataggtttaggcgggttagaagtcggggtcgtgtttgattggggtagtcgtacggtcggcggtgcggttcgttcggttttcgcggaggttatagtttcgagaaagggtgggcgggagcgagtttcggttttatagttcgtggttcggttttttttcgttgttatatttttaggtttttttgggttttcgtttttatcgagggtcgattgcgaggtgtatgttgggagtcgtagtatcgtatcggggcggaatagtttcgtttcggcggatggtgtttttagaaagcggtaattggagacgagggcgtttcgtaatcgtttattttttttttgtttattgtcgagtattaatacgtttattaaggtcggttttttatcgcgtgtagtttgttggtagtgtcgttttgtatttgtattgtttaaaagtatttgtttaattattttaaattaaatggagttaggagaattgaatatttatatgtaaaaaaaaaaaaaaaaaaaagataggaaagaaaagaacgcgattatatatacgtatataaaattaatttaatggattataaattaaatataagagttaaaaatataaaatttttaaaagaaaacgtaaagtagtttaattaatatggtgaaattttttttataaaaatataaaaattagtagggcgtggtgtcgtgcgtttgtaattttagttatttcggaggttgaggcggaagaatcgtttgaattcgggtggcggaggttgtagtgagtcgatatcgtgttattgtattttagtttgggtgatagagtgagatttcgttttaaaaaaaaaaaaaaaagaaaacgtaagagaatagttttatgattttgggtttggtaataagttgttagatatagtattaaaagtttgtataatttaaaaaaaagttaattttattaaaattaaaaatttttgtattataaagatattattaagaagttatacgttggggtcgggcgtcgtggtttacgtttgcgattttagtattttgggagatcgaggcgggcggattacgaggttaggagatcgagattattatggttaatacggtgaaatttcgtttttattaaaaatataaaaaattagtcgggcgatgtggcgggcgtttgtagttttagttattcgggaggttgaggtaggagaaaggcgtgaatttcgcgggttagagtttgtagtgagtcgagatcgttttattgtattttagtttgcgtaatagcgagattttattttaaaaaaaaaaaaaaagaaaagaaaagaaaagaagaaaaattataggttggatgtggtttatgttgtaattttagtattttgggaggttgaggttggaggattttttgaagttaggagtttaagattagtttaggtaataaagatggtgttttttgtagagatattatttttataaaaaatttaaaatattaattttggtataataatatatttgtagatttagttatttgggaggttgaggtgggaggagtttttgagtttaggagttttaggttgtagtgagttatgattatattattgttttttagtttgagtaatagagtgagattttgttttaaaaaaagaaaggttatagttatagagtgggagaaattatttgttaattatatattttataagggattggtatttttaatatataaaaatttttaaaatttaagaaaaagatttttaaaaataattttagttgggtgtggtggtttatgtttgttattttagtattttgggaggttgaggtgggaggattatttgagttttagaagtttaagatttgtttgggtaatatagtaaaattttatttttataaaaaaaatataaaaattagttgggtatggtggtatatatttgtagttttatttattcgggaaatttaggtgggaggattatttgagtttagggatgtcgaagttgtagtgagttatgattgagttattgtattttagcgtgggtaataaagtgagattttgttttaaaataaaataaaaaataattttaagatggattaaaaaaaaaaaaaaagatattttattaaaaaagatttattaatggttaagaaatatataaaaagatgttcggtattattagttattagagaaatatagttaaaaatatggttagggtcgggttatgttatgtttgtaattttagtattttgggaggttgaggtggatggattatttgaggttaggagtttaagattagtatggttaatttggtgaaatttcgtttttattaaaaatataaaaattaggtaggtatggtggtgtatgtttgtaattttagttatttgggaagttgaggtgggagaatggtttgaattcggaaggtggaggttgtagtgagtcgagattttgttattgaattttagtttaggtgatatagcgagatttcgttttaaaaaataaaaaaacgttttatatagtcgggcgtggtggtttatatttttaattttagtattttgggaggttgaggtaggtggattatttgaggttaggagtttgagattagttaagttaatagggtaaaattttgtttttattgtaaatataaaaattagttgggtatggtggtagatatttgtaattttagttatttaggaggttgaggtatgataattatttgaatttgggaaacggaggttgtagtgagttgagattatgttattgtattttagtttgggtgatagagtgagattttgttttaaaaataaataaataaaaataaaaatattatatatatatatatataaaatgattataataaaaatagattatattaagtgttggtgaggatgtgtatgaggaatttttatatattgttggtgggaatataaaatagtatatttattttagaaaagtttggtagttttttaaaaagttaattataggtcgggcgtagtggtttatttttgtaattttagtattttgggaggttaaggtaggtgaattacgatgttagtagatcgagattattttggttaatatagtgaaatttcgtttttattaaaaatataaaaaattagttaggcgtggtggcgggtatttgtagttttagttatttaagaggttgaggtaggagaatggcgtgaatttaggaagtggagtttgtagtgagttaagatttcgttattgtattttagtttgggtgatagagtaagattttattttaaaaaaaaaaaaagaaaaaaaagttaattataaatttattataagatttagtaattttattttaaagaatatttttaagagaaatgaaaatatacgtttatattgagatttgttgtaaatatttatagtagttaaaaatgtttataatggttaaaaattgaaaataattaaaatgtttattagttggttaaagttaatgatttagtaatgaaaaggggtaaaagagtgtattaataaattttttttttttgagacggagtttcgttttgttgttcgggttggagtgtagtggcgtaatttcggtttattgtattttagtttgggcgatagaataagattgttttaaaaaaaaaaaaaaaaaaaaaaaagattgaaaataggttaggtttatgtttgtaattttagtattttgggggattgaggtgggcggattattagagggtaggagattagtttggttaatatagtgaaattttatttttattaaaaatataaaaaattagtcggacgtggtggtatatgtttatagttttagttatttgggaggttgaggtaggagaattatttgaatttaggaggtagaggttgtagtgagtagagattacgttattgtatttcggtttgggtaatagagtgaaattttatttttaaataaataaataaataaataaataaataaaagatcgaaaatagattattggtttggggtaggattagggagttaatgtagggaattttggggggatgatagaaatgttttaaaattaagttgtggtattttgtaataatttattttatatgatattaaaagtataagtaatgaaagaaaaaaataggatgaattggatttttttaaaattaagaatttttgtgtaggttaggcgcggtggtttatgtttgtaattttagtattttgggaggttaaggcgggcggattataaggttaagagattgagattattttgtttaatatggtgaaatttcgtttttattaaaaatataaaaattagttgggcgtggtgatgtacgtttgtagttttagttatttaggaggttgaggtaggagaattatttgaatttaggaggcggaggttgtagtgagtttagatagtgttattgtattttagtttggcgatagagtaagatttcgttttaaaaaaaaaaaaaaaaaaaaaagaatgtttgtgtattaaaggatattattaagaaaatgaaaagataatttatagagtggagaaaatatttgtaagttatatattatttgtaaattatatattatattatattatatatttgtttagggatttgtatttagtatgtaaaaagaatgttagttaggtatagtggtttatatttgtaattttagtattttgggaggttgaagtaggaggattgtttgagtttaggagtttaagattagtttaggtaatatagtggggttttgtttttataataaaataaaaaattagtcggttatggtggtgtatatttgtagttttagttatttaggaagttgagataggaggattgtttgaatttaggaagttgtggttttagtgagttatgattacgttattgtattatagtttgggtgatagagtaagattttggtttaaaaataataataataataataatttaattaaaaatagtcgaagaatttgaagggatatttttttagtaagtataagaaaagatgtttagtttagtattattaattattaaggaaatgtatattaaaattataatgagatattattttatatttattaggatggttagaattaaagatagatgataataagtgttgatatggatgtggagaaatcgttatttatatatatttttggtaagattgtaaaacgatatagtaattttggaaaataaattggtagttttttaaaagattaaatagagttattttatgatttagtagttgtttagtgtatagttaggtatatatttaagagaaattaaaatat

SEQ ID NO: 673 - DNA, 18988 bp, Artificial Sequence
  chemically treated genomic DNA (Homo sapiens)
ttattgaaattcggaatgtagttggtgagatttaggaagtgttttttaatttagtttaattggaagtagttatagggggtaagtggttgtttattatattagtatagttttagaggttttgttaaaagttttttgtttattttattttgaaaattagttattttgattaatattattaattgttatttataagtttttgttatttgtgatttttattttttttaagtaatttggtttatttattataattttaaagtgagtatagtaaattaaatggattttagcgagaagtttttcggggtgaatttattgtgaattattttgaggatttgtaatatgtggttaatttttaattttaattattgatataaaaggagagagtttgtgtagttgaaatagggaagtaggagaagttcgttgggtattgatagattggttttttaagttagttttttttttttttaggaatttggtattttttagttgttttcggggtttgtaggagttttaaaatttttttttatattttttcgtgttttagttttttggattttttttttttttttaaattaaaatgtattttgagggagaggtttgggtaggaggattttttgagtttaggagatttgatttgagtttggagatttgtttggtagaatttttaattagtggtgatgatgttgattttatggattaaaaattgagatattgttaagaagtgagggaagggagcgggggagggtaggaaaattaatattgtttaagtatttattatgtgcgtgttagatattttatatgatgtttagtaaaaatgttttgtttgtatgaataattgttatttttttggtaagtagagtgtagtatgttttttttttgaatggataaatatatgaatatatttttattatatgaagtagatattagttttatattatagatgaggatattgatatttagataagttatgattttaaggttaaatatatataatattttaattatttaattttgttttttttttattgtttagttttttgtttagttttttttgtgtttagaattttgtttttgatttttgtaaaagaacgattagttaaattgattaatatatttatattaacggatgtaaatatgatagaatcgtttttagtttttttttgtaaggattttgaatgttaatgataattttttggggataatgttaatttatagaaatggttttttcggaattttacgttgttcggggaggtattttggtattttagtggtattaaaaatatattttatagtagatatttttttggaggttggatatttatataaagacgacgtattttttataaattaaattttaatagtgtttgtatttatttaaatggatattatttcgaggaggagatagtgatttgcgtattagtttttattattagggatgatttgtaagatatattaggaattggttttttttttattttttcgttttttttttttagaattttataagttttagagtacggttaagataagaggagtattgggaaagaatttgaaaataaaaatatagtttcgtgatttttaatataaagattacgaagagtataataataagtcgtgaaaaaaaatttatatttagaagttggagggttataaagtataagtcgtttaggttagtttgtagagattgtttatgttttcgtttagtaaaaatttggtaggcgatatatcgcgacgaatttcggttgtagaagaggaagagtattatttgtagttcgcggcgtgggaaacgtcgtcggaggggtttcgcgagtcggggaagtgcgcgtagcggggttttaggcggttttaggcgttgagtgcgaggaacgttcgcgttcgtcggcgttcgggagacgtagtcgaaggaggagggcgggcgttttattcgcgttatagttgcggtcggttagagagatcgtagaggtcgggattttcgtagtttttacggtcgttgttgttattgtcggggtggcgcgtttagtcggagaatttcgttcgcgttcggggttgggggcgaggcggggcgttgacgttatttttttttttttatcgtttttaagggggagggagtggggaaagaggtagcgagtcgtcgtagtcgtcggtcgtaattttttaattcggcggttggttgtttgggtacgttttgataaatttggttgttttcgggttttcgtttcggtttcgcgtatttttttttcgtttgcgtttggtgtttaagtttgttttggtcggaagttttcggagatgcggtcgtttgggtttcggcggtacggacgttggtattttggttagggatatgttgaagatttcggggaggtaaagttggtattttaaattcggtttttaatatatatttatatcgcgaggggattacggagttgtcgaggattttagagtttagggtcgaggattcggttagattggtgagttttttgtttaaatcgtgtatgttttttggtatttaagtttaaacgttaatgaaattacgtggggtgtgtggttttaagcgagtgcggggaagcgtgtgcgttttacgggttttcggttttaggagttgcgtatttttttggttttgtgcggatcggcgatgaaagattcgtatgtatagttttgggagtttataaaatatatatagagtattgttaaaaagaatttgagaggcgatgttgtttgtgtattattttgaatgtaatttattatagtaatggtgtttagggagggcgtatcggggtcgcgagatttgtaggggcgtagcgttttttagttcgggtatttggcgaggcgcgttttttgtagggttttgtgcggaggcgaatttggattttttcggcgttcggcgacgtgggcgtttgtttattttagtttttattgattatttattcgggtttattttttatatgagttataaaaattagtttgggtggattggatgtagaggtcgtgttggaggaaagcgttttgtttttggaatcgtttttttaattttttttttaatttttacgagtttttggggatagggttagggagggtcgattatttaaaggataaatgtggaatttgaattatattttttttttttatataaaataattcgatttgtggtagttaataggtatgtttatttcgttttgttggcgtttaaggattagtagaatcgtggtagagttttaagtttgaaatttttatttttggttttcggcggtttttgtggcgacgaagtgtaattttttttaggtagatagattttttagggagtttggaaaatcgggatttttagatagatgtaaaatatttagtaagttttaggaagcgttattatttattaattaatggtaattttttttaggaatttttttgtgttatttaaaaaaaatttcgtgattttacgttagggaatggtatttttgtattttttttattgttttttttttttttttttagtattattttcgttttttcgtttttaggaaacggttggagtttcggtgtgtttgggttttgttgagatttataattcggtaagcggtataagtcggttgggtttggagattaggttatttattttcgaggtgttttatgtatgaaattgatttgtaagtatttggagtaattatggtcgggataaatacgtttttggatgatggagtttgtatttgttggatgtgtgaatttatgtgtattttaattggtgggtagggaatatagggttacgaatcggtatatttattttgtaggtattattttttttttttagttataatttgttagatatttttattattattatttttttcggttatttttaagatggtttataaggtgattgcgttaattttgaatttaggaaatttttttttatatttgattgttttgtcgttttttttttcgttaagttttttttattagttttagggaaatcggatttttttgtttttttagtgttaaaatgtttgagttttataaatttttcgagattaagttcgtttttttgttcgggttgcgttttagcgttttcggtttttcgggtttcggtcgagttcgttttgcgtcgagtttgcggttggagttttgttcgtatcggggatgggtttcgcgttcgggacgtttaggttgggcgttcggcgcggggagttttcggagcgggcgtttcggcgttggggttttttttttgtttaggaatttgtagttgtcggtttggggttacgttttggggtttttggggtcgattttcgggttaggaagttcgcgggacgtcgcgattgttttttgttttataggtttgggcgttcggggtgttagcgggggaggttaggcgttcgcggcggggagggtttggggtttaattcggtagaaaaaggtcgcgggggaagcgttttttttttttggggattgaaggaggaagtagatttcgatttagttgtatttttttggagatttgaaggacgattttagtttattaaattttcgcggatttagagtcgcgttatttaaatgtagatttaggggtttttatatttttatggaaaagttaaagggatgtttttgggaagtttttttattaggttttagtattttttttttttttttttttttttagttaagttaacgttttttttttttggtagggagttttttttaattttttgtatagcgtttgtggttggtcgtaattaatttcggtattataagtttcgttttgtttttcggagtcgcgttagatttcgttgggcgttttttcgttttttagtacggatttggtgttcgtagggattggggttttttgggttcgggcgggattgcgtggtcgaattcgcgggtttagagtcggtagtcggggaaagtgggttcgagttttcgcgttcgagaaacgagcgtcggcgtcggcgggcggggtcggggcggagggattttttgcgttcggggagcgtgaggcgtcggcgtcgagttgggcggtcgggcgcggggagagggcgcggggagagggcgcgggagcggttcgcgcggtaggtattatgcggacgcgcgagttcggcgagggtttcggtaggttcggtttttgttcgggggcgcgttgagacggcgggtgagttttacgagagcgtcgtcgttatttcgggttaattttgcggttagttcgttggggcgcgggtcggcgggcgggggcgagagcgtgtagcgcgttgcggtgcggattttgtgggtgttcgttcggttttcggttcgggtttcggcgttgtcgaaaacggatgagcgcgcgatttttcggagggtggagtgattcggttttttttaattgggaaatttagtattggttaggggggtttcggcggcggagcgggaaaaggaggcgatcgcgcgggatcgattcggggttattgttggggttcgattttttttgatacgtcgtttttttttcgggagttcgtcgggttgcgtcggtttcgcggttttttggggtatttcgtcgtttgcgaaagattcgttcgttgagcggtgtacgcgggaggtttgcgcggggttgtcgggtttttgggtttttgggtgtttgcgttttgtaggagcgttgttcggaggtgtagatgtaatcggtggattgcggagtgaagggttgcgaggttgtatttcggggttgaatatttgtataatgtgcggtttgttagtgttttttgttttttttggaggaggaatttttaagatttttttaaaagaaagagtttttggttttttattgtttttaaaaaaaaatgtttttttttagagagttagttttttgttgtgtgttagatttttttgttttcgttgatgtgaattgtaaggttttggaaataaggacgtaattgtatgagttaggaaagtaaatttataaatattttttatgtagttaagttttttttttgtttgaattgtggttttattaagtggtttttgttaagtaattttcgggtgtttgatagaggcgattttttaaaagtggatattaatagtgattattagtatgagaaaagattgaaaagaaaatgatttttagatatttattttttttttaaaagtagatttttaatgtttcgtatatttagatataggtttcgatagtttaagaaggtatttgtgtgtgagaattaggtaatggtgatgttttttatattatttttaatgagtttggttatgttgtttaatatatttagttgttatagggacgtttgaaaaggtgtttttttagttaatagttaattgtgatatttgtttttgtttttttgttttaggaagatagttttgattttatagttagaattatttttttgtatttaagatgtaaaaatatttaaagtattatgtaattttttaaaataataattggtataagttttgagtgatgttaaatatggtatttaataagtttaaggtaaggtttgatttgaatgaagtttgtatttgtataattattttttgaaaaatgaatattttaaatgagttaaattttttggtattttggaaagaagtgtggttgttagaggattttataaaattatttcgggttatttgtatatttatttgttttttttgaagtattttcgttgggtttttattatgttagtagattatttaaatttatggttcggataggtgttaatagaaaaatgtttaaaaattatggtcgggcgtagtgttttacgtttgtaaatttagttttatgggaggtcgaggcgggcggattatcggaggtcgggggttcgagattaatttgattaatatggagaaatttcgtttttattaaaaatataaaattagcggagtgtggtggtgtatgtttgtaattttagttatttgggaggttgaggtaggagaatcgttttaattcgggaggcggaggttgtggtaagtcgagatcgtgttattgtaatttagtttgggaaaaaaaaagaaaagaaaaagaagagaagaaaaatttttaaaaattatgtataaattaattttgtttttatttttttgattattttttatttttttattgtttttagattttgttttgaggtttttttgaagtagtcgtttttttgaatgttagaggtggataggattttagagattatgttttaatattttattcgtttgttttttatttaagtttggttgattttacgtagaattaattagttaaattaaattagtatattattattgtattagattttgttttagtggtataatttgtagtttaaaggatttgatttaatagtagggagtcgtaaggttggatgtgttgtttaatttttatgagcgggatttgcgttagataattgtttttttgattaaattatgtagaagttgaagttaaattttattttttggttttatttaattgtttagtttgtaagtgtttatttatttttagatattggagaagagtttttgaaatgagtgatatatattagttaagattaggaagttgttatttttttatatttgaggggaattttttattttaaaaatatattttgatgaggaatttgtatattttatttttttaagttttttaagttattttttattgtaagttttagatttaaatatattgtttgaatttttgtttaattttaagggtttattatgtatgtgaagataagtttataaagtaaaaataataaaggtttttatatattgtttaggaaatattagttatgatttaatttgtattttttatagaatattaaggttagagttttgtgataatttgtaatatagatattgatttggtattatttatagttaattttgaggtagcgtaaggtgggtggtgatttttttttgagttattggaaatgagttttttatagagtagttatttgtagtgttgttattagtttcgtggttgtgtttggattttttgttaatttgagaaggatggatgttttatttttttatgttatttttttttatattttttttttaatatagttttgttttatattttttatttttaacgttttatttatttgtttatttattaatttaataatagtggattttttttgtgttaaatattgggttagatataatatttagtgttgaataaatcgtgttttttgtttttaagtagttcgtagtttgataagggagaggataagtatatagttttttatagattagtgtgataagagatttatttaggttaaggtggtttatagtagtattttattgagttgggggatttggggtaggtggatttaggataatgtgagttttgagggaagtgtgaattagaggggaataatttaagtagaggaaatgatgtgtgtaaagtaagttatagaaagtatagtgtggtttgtggtgtgatgagtgtagagaaattttgaagattttatcgtattatgttattttaggaaaaggattggttttttttttttgtttaggtagaatatagagaattttgattatgatttaaataattttatttaaaaagggaggattgtttttatgaggtagaggttaaggagagagaaaaagaaagaaacgttgaagagaaaggtgaaaataaataagttgtatgtgaggagtggagggtaggaaataaagaaaatagtaatgtttgtattatttttcggaagggaagaggttaagatgttatattattttagagtttttattattaggtggtgttattggtttaagatagtttggttattgaatttgttgtaagtttgggaagtatgtttttttgttttgaaataagaagtagtgttgggaaattaggaaattagttagaggttagattattaaaggtttttaatgtaaggttaagaattatatatttagtaggttaaggggaaatattgaatatttttaaattaaagaataatattataaagaagtttgaataggttgattgggattgggggtagaaagtaggaatattaaaagattgtaggaatattttgtatgaataaaatatttattttaattaggtggtagtagtagaaatgtaaagggaattattttgagaaattgagaaagaaatgttaagtttggataatttttgagaaatgaaggtttgagagttaggaggttgtaaagattttagtttattttttaatttttcgaatatatggagtcgaaaggattaagtaagttttttgaatttatatagttgattagtgataaagttggagttaggttttatatttgatgtttttttaatttttttttttttgtttgatttgttagtttgtaaatttggttgatttgggaagtggtgagattggaaaataattggaagagttgttattttgtaatggcgaaagggtgaaaagtttatatagttgttttttggtttttaagggaggtttgggattttatatttaaatttgagaatgtttaagtttttgatataaaatggggtattatttatatttttattgttttattgtttattttaaagacgtttttaatttgaggttggttggatttatggatgtagaatttttatatagtgaaggttaatcgtataatttaggtttgatggtattttaggaggaatgttacgaggtgtttgagagaggttagagttgaaattgtagatttggtgtattgattttttatgatttgaggtagagtagatgagatttttaagggtggtaataaatgtatgtggaggaagagttggaagataagtttgtaatgttagagttttaggtgagttagtgtagagtataaaagagtatggaagagaattaggagaatgttgttatttattttttatatttgtggattgtttttttgttttgggggattttgtgatcgaatgaaggattaggagtgttggggaggggagtgagtggtgttaaaggtgttatgaaattaaggaggatgagtattgagaaaaggttattggtttgatattagtttgtgatgcgggaacggttgttttgttagggtggatttgtaggatttttgtggagtagcgtttggcggagagggagttttaaggaagttagggcggtgttgtgaaatttttttttttgcgatttttgttagtataaaaaaagagaagaataagagtgtttgtttgaaagaagtaaaggtttgaatgaagtttattttattttattttattttatttttttgagacggagtttggttttgtcgtttaggttggagcgtagtggcgtaatttcggtttattgtaagtttcgtttttcgggtttaagcgatttttttgttttagttttttgagtagttgggattataggtgtatgttattacgttcggttaatttttgtatttttagtagagacggggttttattatgttggttaggatggttttaattttttgattttatgatttgtttattttagttttttaaagtattgggattataggtatgagttatcgtgtttggttaagtttattttttaagtaggagaagaatttgtgtgtgtgtatggattttgtataaggtgttaggagtgggaggagttgtagaagaggtaggattttgtggtattagagtatttttatttgtagttagggtgggtggtattttttttgaggtgtaagaagagagaataggtgaagagaatattttaagaagaggagggaagatggatttttttttttgaagattttcgtttttttgttgtatatggaatatttatttttttggttcgttatttagtgaagggttgatcgaatttaattatatagggagtttaatttaacgtataaaataaagttttatttattaatttgggagtggaagaagtggttattgttgattattggttattttgttaagatgttatttaaattatttttatttgtggagaaaaatatattagatgagatgatttttatttataagaggttaatagtttattgagtttttttttgggtaaagtttgttttggaatgtggatgaggagaaagtggttggaggataaggaatatatagagaggggaaagaagagaatagtataggaatgttttattttgttagaaatagatatatagtcgttgtttatttgttttgttttgtcgtttttaggagtatagaataattagaattcgttattttcgtaatgttaatagatatgttttataggtttatgtagataattaggttttatatagaggttgtttgaaaaataggatatttgtttattttttttaagggtaggaatattttaggaatttattttggattgattaaattatgtatatggtgaagttttttgaaaaagttagattgtagttttatattgttattgttagtaaagattatttttagggttaaattggaatcggttgttgattatgtgaaggtaatatttaaagtatgttttgttagagttattagattattgtagttttagttaaagataataatatataaatggagttagtagaagtgattaaatgatatatattaagtttaaggttgttgtttaatttttagggttatagtttttttcgtttatgttgaaaattatatgaagatgggttgaaaagaattagtgtatatttagaaaataaataggatttatttattagtattttagtgtaaggatgaaagtttttaaaagtatcgatatggttatgataattgaattagaaaaatagagagtttttttttttttgttgtaaattttatttggaatgtttgaaattttagaaattatttaatattttttttaatatatagtatttttaaaaagttatttacgttgggtgcggtggtttatgtttgtaattttagtattttgggaggttgaggtgggtggatgatttgtagataggaattcgagattagtttggtcgtttttattaaaatataaaagttagttgggtatgggggtgtatgtttgtatttttagttatttaggaagttgaggtatgagaatcgtttgaatttagaaggtagaggttgtagtgagttacgattgtatcgttgtgttttagtttaggtgatagaataagattgtttttaaaataaataaataaataaaaaaattcgtttataatttataattttttgataattttatgattttgttttgaaaatgtgtttgtcggttaggtttagtggtttataattgtaattttaatattttgggaggtttaggtaggtcgattagttgagtttaggagttcgagattagtttgggtaatatggtgaaattttatttttataaaaatataaaaaattagttgggtatggtggtacgtttaggtatttcggaggcggaggcgggaggattatttgagtttggaaggttggtgttgtagtgagttatgatggtgttattgttttttagtttgggagatagagtaagattttgtttcgggggaagaaagatgtttgtaatttagagattttttaaaaatattttaaaaatgtgatattgaattgaattcgaaattttaaattttaattatgagttaaattttattgacgtttttattatgttgatagaaaatgagagtggagaagagtatagtgagggagaatattgagtttttaatttaataattttgtgtttttattataatatgtgaaatgaaaagtttaataatgttttgttttataaaggttagaatgattatttgtgtttgtaagaattgtgatcgtttagtaataaatatgcggcgtttaatagaattggtgtattgtgtgatgttgtgttttatttaatgttttgtttttgtggcgtgtgaaatttttcgaagatttgagtttgaggttatttaaatatttgaatatatgtagttaggtttttagtataggggttgtgttttgttttgtgaagaatgtgtagttatagtaattgatggaagtattttatatgaaggtttttttaatgaagaaatatgaagatattaatatttgatttttattgtaaaagttatttttttgtcgtatttatagatttttagagatttatgttaaagatatttaagttttagattgggagttttttttttttaaggttagattaagtaaatattttttgttttggtttcggaaaatgtattttagaaattttaaattgtagtgagtttaagtagtgtgattattttttaaatattaaagtatagtttttggtttagatggtttttggagtttaatttttataagtaaaggagtttaggcgataaggttttttttagatgaaatggtgttggagttttttttcgttttagttttattgtttgttttgtatgagagttatagttattgttttgattagggtggtttttatagtgaaatttgaattcgtggtttttggttatattattgtacggttaataatgttttttaaaaagtgtatttttttatttaataatttattttatttatagtagtattttgttagttaagtttgtagagtatatttaggttttttaaagattttagttaggaatgtggtttataagttcgttttagttgtattgtgtttcgtgagaattgttgggtaggatgtggaaggtaattgtatgtttgggaatttagttggggatgagtgggtggtggtgggggttgtggtgggattgagtatttgggatagtatggggagagaatagttaaagtagtttgacgtgttggttatggtttgtgtgttttaggggatggaatagtgttagagttttttggtggggggatggagggggaagtagcgtggcgtattagtaagtattttttttttttgtttttgagatagagttttgttttgttatttaggttggagtgtagtggtgcgattttagtttagtgtaattttcgttttttttgtttacgcgatttttttgtttttgttttttaagtagttgggattataggcgtttattatcgtatttagttattttttgtatttttagtagagataggggttttattatgttggttaggatggtttcggttttttgatttcgtgattcgtttgtttcggtttttcgaagtgttgggattataggcgtgagttatcgcgtttagttggattagtgagtatttatattatatagaattttaagttttaatgttaggttttagttgtagaaaaatttttatttatttattgttttttattatattattatgttgtggttttttttttttttttagtggtcgatattttttttgttagggtttttcgtttggattttttaaattttggggttttgtttttggatttttttttttttttgtttgtttttttttttggtgattttatttagttttgtggttttaaatatcgttttttatatttagataatttttaaatttttatttgtcggttggagttttttatatatttgttgtttatttataatttttatttggatagttcgtagttgtttttattttattttgtttaaaattgatttttcgatttgttttttgaggttgtttttttttttgtttttttttcggtttttggtttttttgttttttacgttgagtagtttttggtattttttttggtattgttttttttttttttttttttttttttttattttagtgtattaggtaattttgaaatagatttataatttgttttttattttcgttgtgttttagtttatacgcgtttcgtttgtgttgtggttgtagtttttgattgttttggtcgttttttagtttttgttttggttgtttataggtttttttattttattgagatcgtggtatttttcggtttagaattcgttgggggattttttatttgatttatattaaattttaaagttttaaaaattgttttttatttatgagtttagacggattttgagaaaaaaaaagatttaggttggatgtagtggtttatatttgtaattttagtagttcgggaggtcgagttgggtagatcgtttgagtttgggtgtttgagattagtttgggtaacgtggtgaaatttcgtttttataaaaaaaataaatatgagttaggcgtgttggtggtttttgagtatgtaaaattttgttagtttaaatttatagacgtatttatagttttagttatttaggaggttgagacgggggttcggaaagtttaaagttttcgtgagtcgtgatcgcgttattgtattttagtttgggtgagagagcgagattttgtttaaaaaagaaaaaaaattgaataaataaatggaggaagatagataaattagtttttagaagaattataaatattttgagtagcgaaattttttgttttttaagaatgggttatatgtagtgatttttttattaagaatatagtatagggaggggtgaaagtaatttgattgtgaggaaatttggtagatattattttagttacgtggttaggagtagcgttaatatcgataaatcgtgttgattttattcgtttgttacggtgtggtggaaacgattttatttttgtggtttttttttttaaaatagaattttaatttaattaggagagaaacgttagattttagttgagggatattttataaaatatttgattagtatttttggaaattgtttagattattaaaagtaaggaaaatttgagaaacgtatattttagaggagttttaggagatatgatagttaaatgtaaggtggtgttttggaagggattttaggatggagagaaggttttgggtaaaatgagtaaatttgagtgaagtatggattgtagttgatgatgtgttagtattggtttgttagttgtatttagtataatgtataaagtgagatgttaatagtaggggaagttttttttgtaatttttttgtaagtttaaaagtattttaaaataaggtttatttttaaaaagaattttttttatgataggtttttttttaggatgtgtttcggttttatcgttgttttttaatcgttgtgttttagttacgtggtttttttttggtttttttaatttagtgtttttttgcggggtgtgattttttgttttagagggtgtttggtaatgtttcgagatagaggtatttttagttattatagttgggtgatgagggggatgttataggttttatgttggtggggattaggaattatattgaatattttacgtttttttaaagaatttaagagttgtttagtatgttattagtgtaagttttgattttttggatttagggttttttttttttttttaggtttttgattttggtttttttttgttttgttttagttttttttttagtatttaattattagtatcggatatattttgtttatttgtttgtttgtgtttggttaggaaatgtattttttattaggatttgttggtaatttggtttatttttgaatttttagcgtttagaattgtatttgatatatagtagatgtttattaaatttatgtaaaaggaattaaataattaatgaaaggggtgagtggatgataaagataatatatatttatgttaaaaaaaaattatagtagagaaaaatgttatagtaattatttttttagttatttgtttttttatcggttttttagaagttattattgttaatagttgtttgtttgtttagatttttttgtttattttaaagtatattcgtgggtatattgtatttattttttttttttttttttttaaataaatataaataggattagtttcgtttttttagtttatatagttagatatatgttaatatatagagtgttattttttaatggttgtatgataattttatacgtagaattaagtaaaaatatttttagtatttgtaatagaattttggtataatattttgttgtataatggatgatggtaaaaatgttttttaaaatataatgtgatttttaaaataaaagatattgtttgttaaatattatttaagtgtttttggttttgtttttttgtttttgagatagagtttagttttgttgtttaggttggagtgtagtggcgcgatttcggtttattgtaatttttgtttttcgggtttaagtgatttttttgttttagtttttggagtaattgagattataggtttgttttattatattttgttaatttttgtatttttagtagagatggggttttattatgttttggttaggttggtttcgaatttttgagtttaagggattcggttgtattggttttttaaagttttgggattataggtgtgagttatcgtgattagtttttttatatgtatttttatttttagtttgtaaattttttgggattgggatttttgttttttattttttaatattatgtaaggttttgtttgataaggttttttatatttgtaggttgaattttttatttgttttgataaaattataagattattttataatatttaaatttttttgagtattagaattgttgattaaatggagatatttaaagagatagttttgggagaaaattgtttttttattttgtttaaatgataattgtttttttagaagttaaaaatttgtttaatttttgattttatttggagaggagaaggtattatagttaaagaataagttagggtggttaatttgaacgtggtttaatattaattaagttttaattgttttaagtatattaggtttttttttttttttaaggtaatgatttatggggtagagttggtagtagttaagttaagatattataaattaatgttgtcgtattaattttaattgggttgttaaatttattttttagtttgttttttatttatttttggtagtatttatattttgtgaatattaatttgagagttattttgtaagatgatagtgttgttttttgtgaagttgtgttgatttataagatgaatttgttggtaaaggggaatagttgatttgaaaataattgttttgtttttttggttagattttagtttagtggatttcgtttatttttttatttgttattgttaaaggtaacgttttttttatttttttagtttttttttttttttcgttagttatttagggattgttttgtagagtttgttattatgtattaatagattgatttgatttttgacgtgtgttagtttagaagatttagtttttgtgtgtgtgtgttatttttttatggaggggtttagggtgataggttgttcgatgttttgaagataggagatattttgtgaataattggttgttgatagtagtggtgataaaatattgatatagttggtaaagtttgttttattgatttagagaggaaaaatgttgtttgatattaggttgttgaattttggttttttttttgtaaattgtttttttttggggtttatgttgttgataagtattatatttgatataattattttaatatttttaagtagttatatagagcgaaatgagataataaatttttatattatgtagggagtgaatttaattatttttatatagaaataatataattttaggatatattttgaaatgagattataagttgtttttatggagcgttatgtaaaattattgttggtttttgtttttttttgaattagttgttagaagttttgtatttttataatattgtaggggtattatgtttgttagtttttgattatttaatttattgtatgtaagtaaatgtaaataatgtttattaatttttaatagttgtttatatttgttttaacgatttaaatataaaaatataatttagttgttatagttagtagttttttatttgatatttatgaagatttttgagtcgtttaaatatgaaagagaggattttgtcgtttaaaaatgaaaaggaagtttttgttaagtttaataattttagatatgttataagaatgttgatatttatattggaaaatatgaaaaatattttaaatcgttgtatttatttatattttatgtgtatggaaaatatttttttaatgagaagtttaaaataatgtatatatttttgtttgttttatttttttaaggtaacgattttgattttttttgttttaga

SEQ ID NO: 674 - DNA, 18988 bp, Artificial Sequence
  chemically treated genomic DNA (Homo sapiens)
tttgaaatagaagaaattagaatcgttattttggggaaataaaataagtaaaagtgtgtatattgttttaaattttttattaaaaaaatattttttatatatatggaatataaataaatgtaacggtttgggatgttttttatgttttttaatataagtattaatatttttgtaatatgtttagaattattaagtttaataaaaattttttttttatttttgaacgataaggtttttttttttatatttaaacgatttaaaaatttttatgagtattaaatgaaaggttattaattgtaataattaagttatatttttatatttaaatcgttaaggtaaatataagtaattgttaaaaattaatgaatattgtttatatttatttatatataatgaattaaatgattaaaagttggtaaatataatgtttttatagtattgtgagaatgtaaagtttttgataattaatttagaaaaaaataaaaattagtagtggttttatatggcgttttataagaatagtttgtaattttattttaaaatgtattttgaaattatattatttttgtataagaatggttaagtttattttttatataatgtaagggtttattgttttatttcgttttatgtaattatttaaaagtattaaaataattatattaagtataatatttattagtaatataagttttaaagaaaggtaatttataaaagaaaaattagaatttagtagtttgatgttaaatagtattttttttttttaagttagtgaagtaaattttattaattatattaatgttttattattattgttgttaataattagttgtttatagaatgttttttatttttagggtatcgaataatttgttattttgggtttttttatgagaagatgatatatatatataaaagttaaattttttaagttaatatacgttaagggttaaattagtttattaatatatggtggtagattttgtaggatagtttttgggtgattggcggagaaaagagagaaattgaagaaatgaagaaaacgttgtttttaataatgataaatgggaaggtgggcgaagtttattgggttgaggtttggttagggaagtaggatagttatttttagattaattgtttttttttgttaataaatttattttgtaaattaatatagttttataaaggatagtattgttattttgtaaagtgatttttaaattaatatttataaaatgtgaatgttattagaggtaaatgaagagtaaattggagggtgggtttgatagtttagttgaaattggtacgataatattaatttatagtattttaatttagttattgttaattttgttttataagttattgttttagggggaaaaaaagatttgatgtgtttaaagtaattaaagtttaattgatattgaattacgtttaagttggttattttaatttgttttttagttatgatgtttttttttttttagataaagttagaaattagatagatttttggtttttaggagaataattattatttaaataaaataagaaaataatttttttttaaaattatttttttaagtatttttatttagttaatagttttaatatttagggaaatttgaatattataaaataattttgtaattttattaaaataaataaaaagtttaatttataggtatggaggattttattagatagaattttgtatggtgttaaggaataaaagataaagattttaattttaagggatttataaattagaaataaaaatatatataaagaggttggttacggtggtttatatttgtaattttagaattttgggaggttaatgtagtcggattttttgagtttaggagttcgagattagtttggttaaaatatggtgaaattttatttttattaaaaatataaaaattagtaggatatggtggagtaagtttgtaattttagttattttagaggttgaggtaggagaattatttgaattcgggaggtagagattgtagtgagtcgagatcgcgttattgtattttagtttgggtaatagagttagattttgttttaaaaataaaaaaataaaattagaaatatttggatgatgtttagtaagtagtgttttttgttttaggagttatattatgttttaggagatatttttattattatttattgtataataaaatattatattaggattttattgtaagtattagaagtatttttgtttaattttacgtataaagttattatgtagttattaaaagatagtattttgtatgttgatatatgtttagttatataaattggaaaaacgaagttgattttatttatgtttatttaaaagagaggagaaggggggtagatataatgtatttacggatatattttaaaatggatagaaaagtttaggtagataagtaattgttaatagtggtaatttttggagaatcggtagagaaataggtagttgagggaatgattattgtggtatttttttttattgtggtttttttttagtatgagtatgtgttgtttttattatttatttattttttttattaattatttaattttttttatataggtttaatgagtatttattatgtattaggtgtagttttagacgttggggatttaaaagtgaattaaattattaataagttttgatggaagatatattttttggttagatatagatagataagtaaatagagtatattcgatgttgataattaagtgttaaggagaaaattaaagtagggtaaagagagattagggttaggaatttgaaggaaaagagggaattttaaatttaaagggttagggtttatattagtgatatgttgggtaatttttagattttttggggaaacgtagagtgtttaatatgatttttggtttttattagtatgaagtttgtggtattttttttattatttagttgtgatgattaaaaatatttttatttcgagatattgttaaatattttttagggtagaaagttatatttcgtagagaagtattagattagggaagttagaaagagattacgtggttggagtatagcggttgagggatagcggtaaggtcggggtatattttgggagagaatttattatgaagggggttttttttaaaaataaattttattttagaatgtttttagatttatagaaaagttgtaaagagagttttttttattgttaatattttattttatatattatattagatataattaataaattagtattgatatattattaattatagtttatattttatttaaatttgtttattttatttaaggttttttttttattttagaattttttttaagatattattttatatttagttgttatgttttttaaggtttttttggaatgtacgttttttagattttttttgtttttaatgatttggatagtttttagaagtattagttaggtattttgtaggatgttttttaattggaatttgacgttttttttttgattagattggggttttgttttggggagaaaagttatagaggtagagtcgtttttattatatcgtagtaagcgggtaaaattaatacgatttatcgatgttgacgttgtttttgattacgtgattgaggtagtatttgttaggtttttttatagttaggttatttttatttttttttgtattgtatttttggtaaggaagttattgtatgtagtttatttttaagagatagagagtttcgttatttaaaatatttataatttttttagaaattgatttgtttatttttttttatttatttatttaatttttttttttttttagatagagtttcgtttttttatttaggttggagtgtagtggcgcgattacggtttacggaagttttgagtttttcgggttttcgttttagttttttgagtagttgggattataggtgcgtttgtagatttagattgatagaattttatatatttaggaattattagtacgtttggtttatgtttgttttttttatagagacggggttttattacgttgtttaggttggttttaaatatttaggtttaagcgatttgtttaattcggtttttcgaattgttaggattataggtgtgagttattgtatttaatttgaattttttttttttttaagattcgtttggatttatggataaaggataatttttaggattttagagtttagtatgaattaaatgagaagttttttagcggattttgaatcgaggagtgttacggttttagtaaaatggaaaaatttgtgggtagttagggtagaagttggagggcgattagagtagttagaggttgtagttataatataggcggagcgcgtgtgggttggggtataacgggggtggggggtagattgtgaatttattttaaggttgtttgatgtattggagtggggagagggagggaaaggaggagagaatagtattagagaagatgttaaagattgtttagcgtagagaataagggggttaggaatcgagagggagataggaggagaagtagttttagggagtagatcgggaggttagttttggatagggtaagatgggaatagttacgggttatttaagtaaagattgtgagtgggtagtagatatgtgggagattttagtcggtagatagaaatttgagagttgtttaaatatgaaagacggtatttaaaattatagaattgaatgagattattaaggaagagagtaggtagaagaaaaaaaaaatttaagagtagaattttaagatttgaagggtttaaacgggaggttttgataggggagatgtcggttattgagggaggaaagggaattatagtatagtggtgtgataagaaatagtgagtaaataaagatttttttatagttgaagtttaatattagaatttggagttttatataatataaatatttattaatttagttgggcgcggtggtttacgtttgtaattttagtatttcgggaggtcgaggtaggcggattacgaggttaagagatcgagattattttggttaatatggtgaaatttttgtttttattaaaaatataaaaagtagttgggtgcggtggtgggcgtttgtagttttagttatttgggaggtagaggtaggagaatcgcgtgaataagggagacggaggttgtattgagttgagatcgtattattgtattttagtttaggtgatagagtaagattttgttttaaaaataaaaaaaaaaagtatttgttgatgcgttacgttgtttttttttttatttttttattagaaggttttggtattgttttattttttaagatatatagattatggttaatacgttagattgttttggttgttttttttttatgttgttttaggtgtttagttttattatagtttttattattatttatttatttttaattggatttttaaatatgtaattattttttatattttatttagtagtttttacgggatataatatagttgggacggatttgtggattatatttttaattgaaatttttgaaaaatttgaatgtattttgtaaatttggttaatagaatgttattgtgagtagaataaattattaaatgaaaaaatatattttttggaagatattgttaatcgtgtagtaatgtaattaagaattacgaatttaggttttattataaaaattattttgattaaaataatggttgtggtttttatgtaaaataaatagtaaagttgaagcggggagagattttaatattattttatttaaaaaggattttatcgtttagatttttttgtttatggaaattaaattttaaagattatttgagttaagggttatattttgatatttagaaggtgattatattatttaaatttattgtaatttgggatttttaaaatgtatttttcgaagttaaaataaagagtgtttatttagtttagttttgaaggagaagggtttttagtttaaagtttaaatatttttagtatagatttttgaaaatttataaatacggtagaaaaataatttttgtagtaaaaattagatattaatatttttatatttttttattagggagatttttatgtaaaatgtttttattaattattgtgattgtatattttttataaaatagaatatagtttttgtgttgaaaatttaattgtatatatttaagtgtttagatgattttaagtttaagttttcgaagggttttatacgttatagagataggatattaggtgagatatagtattatataatgtattaattttgttaaacgtcgtatatttattattgagcggttataatttttataagtataagtagttattttagtttttatggaataggatattattaaattttttattttatatgttatgataaaaatataaaattattaagttgagaatttagtgtttttttttattgtgtttttttttatttttattttttattaatatagtgaaagcgttagtagaatttaatttatgattaaaatttggaatttcgagtttagtttagtgttatatttttaaagtatttttaagagatttttaaattgtaagtattttttttttttcgagatagggttttgttttattttttaggttggagagtagtggtattattatagtttattgtagtattaattttttaggtttaagtgattttttcgttttcgttttcggggtatttgggcgtattattatgtttagttaattttttgtatttttgtagagatggggttttattatgttgtttaggttggtttcgaatttttgagtttaattgatcgatttgtttggattttttaaaatgttgggattatagttgtgagttattgggtttggtcggtaaatatatttttaaagtaggattatgaagttgttaagagattatgaattgtaaacgagtttttttgtttgtttgtttgttttggagatagttttgttttgttatttagattggagtatagcggtgtaatcgtggtttattgtaatttttgttttttgggtttaagcgatttttatgttttagttttttgagtagttaggaatataggtatgtatttttatgtttagttaatttttgtattttagtagagacggttaggttaatttcgaatttttgtttgtaagttatttatttattttagttttttaaagtgttgggattataggtatgagttatcgtatttagcgtaaatggttttttaaaaatattgtatattaaaaagaatgttgaatgatttttaaaattttagatattttaaataaaatttataataggaaaaaaaaaattttttatttttttagtttaattattatagttatgtcggtatttttaaaagtttttatttttatattgaaatattaatgagtagattttgtttattttttgggtgtatattaattttttttaatttatttttatatgatttttagtatgaacggaggaagttgtgattttagaaattgagtagtagttttaggtttggtatatgttatttaattatttttgttaattttatttatatgttgttatttttgattggggttgtaataatttggtaattttagtaagatatattttaaatattgtttttatatgattaataatcggttttaatttaattttgagaatggtttttattgataatgatagtgtggaattataatttggtttttttagaaaattttattatgtatatgatttaattaatttaaaatagatttttgaagtgtttttgtttttaagaaagataaatagatgttttattttttaaatagtttttatataaaatttagttatttatatgaatttataaaatatgtttgttggtattacgaagatgacgggttttagttgttttgtgtttttgggaacgataagataggataggtaggtagcggttgtgtgtttatttttggtagggtgaggtatttttgtgttattttttttttttttttttttatatattttttattttttaattattttttttttatttatattttaggataaattttgtttaaggagaagtttaatggattgttgattttttgtgaatggagattattttatttaatgtatttttttttataaatagaagtaatttaaatgatattttggtagagtagttaataattaataatggttattttttttatttttaagttggtaagtaagattttattttatacgttgaattgggttttttgtataattagattcggttaattttttattaaatgacggattagaaaagtgaatgttttatgtatagtaagaaaacggaaatttttagggagaaaagtttatttttttttttttttttaaaatgttttttttatttgttttttttttttatattttagaagagatgttatttattttagttgtaaataaagatattttgatattataaaattttgttttttttatagttttttttatttttgatattttgtgtagaatttatatatatatataggttttttttttatttaaaaaataagtttggttagatacggtggtttatgtttgtaattttagtattttgggaggttgaggtgggtagattatgaggttaagagattgagattattttggttaatatggtgaaatttcgtttttattaaaaatataaaaattagtcgggcgtggtggtatgtatttgtagttttagttatttaggaggttgaagtaggagaatcgtttgaattcgggaggcggagtttgtagtgagtcgagattgcgttattgcgttttagtttgggcgatagagttagatttcgttttaaaaaaataaaataaaataaaataaaataaattttatttaaatttttgttttttttaaataaatatttttatttttttttttttttatattggtaaagatcgtaagaaaaggagttttatagtatcgttttggtttttttagaatttttttttcgttaaacgttgttttatagagattttgtaggtttattttggtagaatagtcgttttcgtattataagttaatgttaaattaatgatttttttttagtgtttattttttttgattttatgatatttttgatattatttatttttttttttaatatttttgattttttattcggttatagagttttttaaaataaagaggtaatttataggtatgaaaaatgaatgataatatttttttgatttttttttatatttttttatattttatattgatttatttaaaattttggtattataaatttgttttttaattttttttttatatgtatttattattatttttaaagattttatttattttgttttaaattatgaaggattagtgtattaaatttgtaattttagttttaattttttttaaatatttcgtaatattttttttaaaatattattaaatttaagttatacgattggtttttattatataagagttttgtatttatggatttaattaattttaggttgagaacgtttttaaaataaataataaaatagtaaaaatataaatagtattttattttatattagggatttgagtatttttagatttgggtataaaattttaaattttttttagagattaagggataattatatagattttttattttttcgttattgtaaaataatagtttttttagttattttttaattttattattttttaaattaattaagtttgtaaattaataaattaaataaaaaggaaggggttgggagaatattaaatgtggaatttagttttagttttgttattaattaattgtgtgaatttaaggaatttgtttaattttttcgattttatgtattcgagaaattgaaggatggattaaaatttttatagttttttggtttttaaatttttattttttaaaagttatttaaatttgatattttttttttaattttttaaaatggttttttttgtatttttgttgttattatttagttagaatgggtattttgtttatgtagagtatttttatagttttttggtatttttgttttttgtttttaattttagttaatttatttaaatttttttgtgatattattttttagtttgaaaatatttagtatttttttttagtttgttaagtatatgatttttaattttgtattaaagatttttgataatttaatttttaattaattttttaattttttaatattattttttattttaaaataaaaaggtatattttttagatttgtaataagtttagtaattaagttgttttgagttaataatattatttagtggtgaaggttttaaagtaatgtaatattttgattttttttttttcgaaagataatgtaaatattattattttttttgttttttgttttttattttttatatatagtttatttgtttttatttttttttttaacgtttttttttttttttttttttttaatttttgttttataaaaataattttttttttttaaataagattatttaagttatagttaagattttttatgttttatttagataaaaaaaagaagttaattttttttttaagataatatggtacggtgaggtttttagaatttttttgtatttattatattataagttatattatgttttttataatttgttttgtatatattattttttttgtttgaattgtttttttttgatttatattttttttagaatttatattattttaaatttatttgttttagattttttagtttaatgaggtgttgttatggattattttgatttgaatggattttttattatattggtttataagagattgtgtatttgtttttttttttattagattacgagttgtttgagggtaggaaatacgatttgtttagtattagatgttgtgtttggtttaatgtttgatatagaggaggtttattattgttggattggtaaatggatagatgaataaagcgttaagagtgagaaatgtgaggtaggattgtgttggggaggggatatagagagggataatataggaaaataaaatatttattttttttaaattaatagaaaatttaggtataattacgaggttggtaataatattgtaggtggttgttttgtagaggatttatttttaatagtttagaaagaggttattatttattttacgttgttttaaaattggttatagataatgttagattagtgtttgtgttgtagattattataaagttttaattttaatattttatgaaggatatagattaaattatgattaatattttttaagtagtgtatagaagtttttattatttttattttatagatttatttttatatatataatgaatttttggaattaagtaagaatttaggtaatgtatttaaatttggaatttatagtaaaagatgatttaaaaaatttaaaagagtgaaatatgtagattttttattagaatatatttttgaaatgaaaagttttttttaggtatgagaaaatggtaattttttgattttaattgatgtatattatttattttaaaaatttttttttagtgtttaaggataaataagtatttgtaaattgaataattaagtgagattaaaagatagagtttggttttaatttttatataatttggttaaaagaataattatttagcgtaaatttcgtttataaagattaaatagtatatttagttttacggttttttgttattaaattaggttttttaggttataaattatgttattgagatagaatttaatgtaataataatgtattaatttgatttggttgattgattttacgtaaaattagttaaatttgggtggaaagtaagcgggtaaagtgttaaaatataatttttaagattttatttatttttaatatttaaagaaacgattgttttaaagggattttaaagtaaagtttaaaggtaatggaaaggtagaggatgattaggggaatgaaaatagaattagtttgtgtataatttttaaagatttttttttttttttttttttttttttttttttttttaggttgaattgtaatggtacgatttcggtttattataattttcgtttttcgggttgaagcgatttttttgttttagttttttaagtagttgggattataggtatgtattattatatttcgttaattttgtatttttagtagagacggggtttttttatgttggttaggttggtttcggattttcgattttcggtgattcgttcgtttcgattttttatagggttgggtttataggcgtgaggtattacgttcggttataatttttaaatatttttttgttggtatttgttcggattatggatttaaatgatttattaatatgatgagaatttaacggggatattttaaaagagataaatgaatatataggtggttcgaaatgattttataaagttttttaataattatatttttttttagagtgttaaagaatttggtttatttaaggtgtttattttttaaaaaatggttatataaatgtaaattttatttaaattaaattttattttgagtttgttaaatgttatgtttagtattatttaaggtttatattaattgttgttttaaaaaattatatagtgttttaagtatttttatattttaaatataaaggaataattttaattgtggaattagagttgtttttttaagataaaaagataaagataaatattataattaattattaattggagaaatatttttttaaacgtttttgtaataattggatgtgttggatagtataattaaatttattaagaatagtgtgaaaaatattattattatttagtttttatatatagatatttttttaaattatcgaaatttgtatttgaatatacgaagtattaagaatttgtttttgaaaaggaaatgaatatttgaaggttattttttttttaatttttttttatattaataattattgttaatatttatttttaaaaaatcgtttttattaggtattcgggaattgtttaataaaagttatttaatgaaattatagtttagataaaaaaaaaatttaattgtatagaaaatatttatgagtttatttttttaatttatataattgcgtttttgtttttaaagttttgtaatttatattagcgggaataaaaaaatttaatatatagtagaaagttggttttttaaaagaaagtatttttttttaaaggtaatgaaggattaaaaatttttttttttaaaaagattttagaagttttttttttagagaagatagaaaatattgataaatcgtatattgtgtagatgtttagtttcgaaatgtagtttcgtagttttttatttcgtagtttatcggttgtatttgtattttcgggtagcgtttttgtagggcgtaaatatttagagatttagggattcggtagtttcgcgtaggtttttcgcgtgtatcgtttagcgagcgggtttttcgtagacggcgggatgttttaggagatcgcgaggtcggcgtagttcggcgagttttcggagggaaggcggcgtgttagaaaggatcggattttagtaatggtttcggatcggtttcgcgcggtcgtttttttttttcgtttcgtcgtcgggatttttttagttagtgttgaattttttaattgggaaggatcgagttattttatttttcgggaagtcgcgcgtttattcgttttcggtagcgtcggagttcgagtcggggatcgggcggatatttatagagttcgtatcgtagcgcgttgtacgttttcgttttcgttcgtcggttcgcgttttagcgaattaatcgtaaagttggttcgaagtggcgacggcgttttcgtggagtttattcgtcgttttagcgcgttttcgagtagggatcgggtttgtcggggttttcgtcgggttcgcgcgttcgtatggtatttgtcgcgcgagtcgttttcgcgtttttttttcgcgtttttttttcgcgttcggtcgtttagttcggcgtcggcgttttacgtttttcgagcgtaggagattttttcgtttcggtttcgttcgtcggcgtcggcgttcgtttttcgggcgcggaaattcgagtttatttttttcggttgtcggttttgggttcgcgggttcggttacgtagtttcgttcggatttaaagagttttagtttttgcgaatattaggttcgtgttgggagacgagaaggcgtttagcggggtttagcgcggtttcgaggggtagggcgaggtttgtgatgtcgaggttagttacggttagttataggcgttgtgtaaggaattggggaaagttttttgttaagaaagggaaacgttagtttagttaaaaaaaaaaaaaaaaaaaaaaaatgttggggtttaatgagaaagttttttagaggtatttttttagtttttttatagaaatatgggagtttttgaatttgtatttgaatggcgcggttttgggttcgcgaaggtttggtgggttgaagtcgttttttaggtttttaaaggaatgtagttaggtcggaatttatttttttttttaatttttagaaaggggagacgtttttttcgcgatttttttttgtcgagttagattttaggtttttttcgtcgcgggcgtttggtttttttcgttgatatttcggacgtttaggtttgtgggataaaaggtagtcgcggcgtttcgcgggttttttagttcgggagtcggttttaggggttttaaagcgtgattttaggtcgataattgtaagtttttaggtagaggggaagttttagcgtcgagacgttcgtttcgagaatttttcgcgtcgggcgtttagtttgagcgtttcgggcgcggagtttattttcggtgcgggtagggttttagtcgtaggttcggcgtagggcggattcggtcgaagttcggagggtcggaggcgttgggacgtagttcggataagagggcggatttgatttcggaaagtttgtgggatttaggtattttaatattgggaagataaagagattcgatttttttgggattggtgaggggagtttggcggggaggggaacggtagggtagttaagtgtgaaagagaattttttgggtttaaagttaacgtagttattttataagttattttagaggtgatcggaaaaaataataataataaaggtgtttagtaggttgtggttgggaaggaaaaataatgtttgtaagatgagtgtgtcgattcgtagttttatattttttgtttattagttggaatatatatagatttatatatttagtaaatgtaaattttattatttaaagacgtgtttgtttcggttataattgttttaagtgtttataggttaattttatatatggaatatttcgaaagtgggtgatttgatttttaagtttaatcggtttgtgtcgtttgtcgaattgtaaattttagtaaaatttaaatatatcggaattttagtcgttttttgggagcgaggaagcgggagtaatgttaaaaggggaaaagaagaatagtaaaaaaagtataaagatattattttttgacgtaaaattacgggattttttttaaatggtataagagaatttttggagaagattattattaattaataagtaataacgttttttagggtttattagatgttttatatttgtttgggaatttcgattttttaggttttttgagaaatttatttgtttggaagaagttgtatttcgtcgttataggagtcgtcgagagttagggatggagattttagatttaggattttgttacgattttattgatttttaagcgttaatagaacgaaatggatatgtttattagttattataaatcgaattattttatatgagagagagaaatgtggtttaagttttatatttgttttttaaataatcgattttttttaattttgtttttaaaggttcgtggaaattagggagggggttggggagacggttttagaaataaaacgtttttttttagtacggtttttatatttagtttatttaagttgatttttgtaatttatataaagaatgggttcgggtgggtggttagtgaagattggggtgagtaagcgtttacgtcgtcgagcgtcggggaggtttaggttcgttttcgtatagaattttgtaaggagcgcgtttcgttaggtgttcggattagagggcgttgcgtttttgtaaatttcgcggtttcgatgcgttttttttaggtattattgttataataagttatatttaaaataatgtataaatagtatcgttttttaagttttttttaatagtgttttatatgtattttatgaatttttaaagttatgtatacgaattttttatcgtcgattcgtataaagttagagggatgcgtagtttttggagtcgagaattcgtagggcgtatacgttttttcgtattcgtttagagttatatattttacgtaattttattaacgtttaaatttaaatgttaaaaggtatgtacgatttgaataaagaatttattagtttagtcgagttttcggttttgggttttaaagttttcggtagtttcgtgattttttcgcggtgtagatatgtgttaagagtcgggtttgaagtattaattttgttttttcgggatttttagtatgtttttaattagagtgttaacgttcgtgtcgtcgggatttaggcggtcgtattttcggaggttttcgattagggtaaatttaagtattaaacgtaggcgaaaagagagtgcgcggggtcggaacgagggttcgggagtagttaagtttgttaggacgtgtttaggtagttagtcgtcgagttgaggagttgcggtcggcggttgcggcgattcgttgtttttttttttatttttttttttttggaggcggtgggggaggggaggtgacgttagcgtttcgtttcgtttttagtttcgggcgcggacgggatttttcggttgggcgcgttatttcgatagtggtagtagcggtcgtggaggttgcgggggtttcggtttttgcggtttttttggtcggtcgtagttgtggcgcgggtgaaacgttcgtttttttttttcggttgcgtttttcgggcgtcggcgagcgcgggcgtttttcgtatttagcgtttggagtcgtttggagtttcgttgcgcgtattttttcggttcgcggagttttttcggcggcgttttttacgtcgcggattgtaggtgatgtttttttttttttgtagtcgaaattcgtcgcgatgtgtcgtttgttagatttttgttgggcggaagtatgaatagtttttgtagattggtttggacgatttgtattttgtggttttttaatttttggatgtgaatttttttttacgatttattattatgtttttcgtggtttttgtgttgaaaattacggagttgtatttttatttttaaatttttttttaatgttttttttgttttgatcgtattttgaagtttataaggttttgagaggagggggcgaagggataggggaggagttagtttttaatgtgttttataagttatttttagtgataggggttaatacgtaaattattgtttttttttcgaaataatatttatttagataaatgtaaatattgttgaggtttaatttataaagaatgcgtcgtttttatgtaagtgtttagtttttaggaaaatatttgttgtggaatatatttttaatgttattaaagtattaaaatattttttcgaatagcgtgaaatttcgagggagttatttttgtgagttgatattgtttttagaagattgttattaatatttaagatttttgtaaaagggggttgggggcggttttattatatttgtattcgttggtataaatatgttgattagtttagttggtcgtttttttataaaggttaagagtaaaattttgagtatagaggaaattgggtagggagttaaatagtaaggagagaataagattaggtgattggaatgttgtgtgtgtttagttttgaagttataatttgtttaaatgttagtgtttttatttgtgatatgggattaatatttgttttatgtggtaaaaatgtatttatgtgtttatttatttaaaaaaaaaatatattgtattttatttgttagggagataatagttatttatgtaggtaaagtatttttattgagtattatatgaagtgtttagtacgtatatagtaggtatttaaataatattagtttttttgttttttttcgttttttttttttattttttggtagtgttttagtttttaatttataaaattagtattattattattgattggagattttgttaggtaggtttttagatttaagttaggttttttgggtttaagagatttttttgtttaagttttttttttaaggtatattttgatttggaagggaggagaggatttagggagttaggatacggagggatataggaagggattttagagtttttgtagatttcgagggtagttagagggtgttagatttttaaggagggaggaggttggtttgagaggttagtttgttagtgtttagcggattttttttgtttttttgttttaattatataggttttttttttttgtgttaatagttgaaattagaaattgattatatattgtaagtttttaaaatgatttataataaatttatttcgagaggtttttcgttgaagtttatttggtttgttatatttattttaaagttgtaataaataaattaaattatttaaaaaagataaaaattataaatgataggaatttatgaataataattgatgatattagttaaaatagttggtttttaaagtgagatgggtagaaaatttttaatagaatttttagagttgtgttaatgtagtgggtagttatttgttttttgtggttatttttagttaaattaaattaaaaggtattttttgagttttattagttgtatttcgagttttagtga

SEQ ID NO: 675 - DNA, 6089 bp, Artificial Sequence
  chemically treated genomic DNA (Homo sapiens)
gttggttggaagtggagagatttatagttgttgtgtttttttttggattgtgaatttgttagttttttggtgtagtatttatttttttaggttatttttgttgggagtcgtagaggtatagttgaatttggagcgtataggttttacggtagtattatttttaacgttgtaaagtttaaatgacgaaaatgttttttaataagagagtgagtggttaagtaaatgtgtatgcgatttttaaatatatttatttattggatatgtaatggagatttttaataagatagggaaatgttataatgttataatttttattgaaaaatagaatttaagatataaagggagttagatgatttttatttaaatagaggtattgttaatttttagttttgagatttttgggttagagatagggattttattagttgtagtaaaataatagttgtagtttaagtatggtgtttatatgagttttttgtgttttttaagttttagggtcggtgtggagtgggcgaggttaagggtttattatggatggtggatgtttgtatatataatgggttgtattatataggagaatattgagtttggggaatttatcgatttttcggtaaatttgtttagagggagatggtatttttttttttgaggttgttttttgtaaatacgattttgagatacgggtatagagtgattagggttttgtatttgtggtatatttagtaagaatgtgtaggaatgttcgtgtttatgatgggttttttttttagtatttgggtgtggtttatttggattgtaagaattttaggtttatgattttttagtgggtttttggaagttggatgtgttgagaattagagaagggggtcgagagttagtttgggttttggggtttgaagtatgtttagaagtattttggtttattttttgtattttgtagatagggaaattgaggtttagaaagggatttgtttagagttagatagtgaatgaggagggggttaggattggtgtttttttgtgtggttttgaaggtatattattgttattattagtatagtagttgatagtgattatattatagagttttttttgtggggtttatgtgatgagagttagtattttttttaatttttacgatcgtgtaaagtgtaaagttttaatttttgttttacgtgatagatgaggaaataaggtattaagaagttaaatgtttaatgttatagagttagagagtagcgagtttggattggaatttaggtggtttggttttagattttgttttaggttgttaggatttttagtttgttttgggggataggggtttatggtggtgtttatttttttgatatttagtgtttggttttttaagttattagttatagggataagaggatgtggagaggttatggaggataggtttgggatgaggattagagtgagtgtttaaaaagggggcgttttggttgggcgttacggtttacgtttgtaattttagtattttgggaggttgaggtaggcggattataaggttaggagttcgagattagtttgattaatatagtgaaatttcgtttttattaaaaatataaaaaattagttgggtttgatggtgtgtgtttgtaattttagttattttcgagtttgaggtaggataattgcgtgaattcggtagatagaggttgtagtgagttaagatcgtggtattgtattttagtttgggtgatagtgtgagatttgttttaaaaaaaaaaaaaaaaaaaaaaaatggtgggggttgtgttttagaataggagtaagtttttgaagttttaggaaaggttgggagaggttaggtttttatgtttttttttttggttttggtttttttttttagttgttgtaggtttggtttagtttttttttttttagtagtttttttgtttgtttagggtagtgttagtgtttagttgaatgtaggagttatttttttttattgtttttgtttttttatttttattttttttttagttatttataatatagttattttttttttatttttagaaagggtttcggttatatcgttagcggttatttgttttatttttattgggattttttagttttggttttattgagtattgggttatattgggtagttttagttagaattattttttttttgttattatttaggttggagtgtagtggtataattttggtttattgtaattttcgtttttagggtttaagtaatttttttgttttagttttttaagtagttgggattataggtatgtattacgatgtttagttaatttttgtatttttagtggagatggggttttattatattggttaggttggtttcgaatttttgattttaagtgatttatttatttcggttttttatagtgttgggattataggtatgagttattacgttttgtttagaattattttttgatttttttttggatattgtttttttttggtttttttttatttttttgtttgtttttacgttttttttttgaattttttaggttttttggtttttttttcgttttttattatttttttttagttatttagattttttttagggtattttatttttcgatggtttaaacgaattaagttaatattaaagtagtaatgagtttttaatttgttttaatttagaaatgtttttttcgggttatttgttgatgtgttgttttcgtattttattttatttaaagttaaaacggattaggatttttggtgtttttaaatttttgtagagatattaggaaagttggtattattaaggaaattttttttatttttgtttattttttattggttagtcgtatgttatttttttttgaggggtttttttaattttagaggcgtgagtatgttggtttttttggtaagtttttttgggttttttgtaaattttaaatttataagatattttgtggggagatgagtttttgtttttttgttttttattttaaaatttaatatgtgatcgggtacggtgatttacgtttgtaattttagtattttgggaggataaggcgggtggattatttgatgtcgggagtttaagattagtttgattaatacggagaaatttcgtttttattaaaaatataaaatttgttaggcgtggtggtgtatgtttgtagttttagttatttaggaggttgaggtaggagaatcgtttgaattcgggaggtggaggttgtagtgggttgagattgcgttattgtattttagtttgggtaataaaagtaaaatattattttaaaaaaatagaaagaaataatatgtatttagaaaagggtacgtattataaatgaatagtttaataaatttttataaattgagtttaattttgtaattaatatttagagtaagaaagttgaatttaattagttttcgaaagtttagtacgtttttattttaggattattatttttttgatttttgaattgtttttgtttttttttttttttttttttttttttgagacggagttttatttcgtcgtttaggttggagtgtagtggtgagatttcggtttattgtaattttcgtttttcgggtttaggcgatttttttgttttagtttttcgagtagttgggattataggtgtgtattattatgtttggttaatttatttttatttttatttttagtagagatagggttttattatgttggttaggttggtttcgaatttttgattttaggtaattcgtttattttatttttttaaagtgttgggattataggtgtgagttatcgttatcggtttgtttttgttttttatgtaaatggaattatgtagcgagtgtttttttgtggttgattttattattttgatttacgtttgtgagatttattcgttatgtgagttgcggattatttatttttgtttcgtttgtcgtgtttttaagttcgaatattttacgatatttatttgttttgatgacgttaggttttttaattggaggaattatgaatgtgcggttatatgtttttttgttttttggagtatatgttgtatgcgtttttgttgagtgtaaggttgggcggggcgtcggtggtttaaggggtttatggtgaatttataggaatatcgttttgagttgtttagtggcgtttttatgcgttttatttagttttttcgtatttttatttgtattattttattttttttttttggaaaataaatttatttgtggttttaaagtttaatttatttttagtaatttcggtagttatgaatttttatataagaggttttcgtaggtttagcgttaaagttgttttttttgtagtttcggtgatttttcgggttttttttttcggttttggtgtttcgggtgagtttagtatacgttgggattttggttgtttgttggtttggttcgattgtttttgtttttgagggtagagtcgggttttatttcgggatacgtttggggttagttatcgatttgtagtttttcggtcgagggtgcggggttggcggtaaggtttgttttagtgttttttagtagtcgggttttcgattgtaggttcgggttttcgttttttcgcgcggagtcgggcggggataatttttgatttcgagtttttttttcgagagggggtggggggaggaggggatcgggttttacggagtgttgggggataggattgggggtattcggttcgaaggcgttttttttgtgtttttttcggggaagtttgggatttaggttttcgtttttagtcgtgggcgcgcgtttttcgtagtcggggttcggggagggagggtttcggtagggggcgtcggggagggaggattaggagattcgcggtttcgttttcgtcgcgtttttttttcgggcgggataattgaacggcgcggttttggtttagcgttggttgtcgaggttcggtcggagcgtggagttcgcgtcgttgttttaggatcgcgttcgcgtttttgttcgtcgtcgtttatcgttcgtcgttcgtcgtttatggagcgcgtcgcgtcgtcgcgtcgggtttcgttttcgttgttgttgttcggcggttttgcgttgttggcggtcggaggtaggggcgtttcgggttcgtcgttttagtttagggtttcgattttttcggtttcgcgttttttgcgagtttcggaattacggggattcggagttcgtgcgttgttttgcgcggcgttttcggattgttagcgtcgaggtttcggcgacgttttttttttttacggttagtttcggtttttatttttttttcggtttggggatttgttttaaaatcggatttttttattttttaaatatatcgttttattttagttttagtaaatttagtcggtttcgggggtcgtatttcgggttttgggggtttaggggcgttagttgggttgggggacgttggttgggggttatcgagtttagggcgttttgtatttgacgttggaagcgttttcggttatttttttttatcgtttttcgtttttatttttaggtaggagttgttgtatttagtttgcggatgtgaaatttgagtttggagggtgggaagtagttttttttttaggagatattagcggttttgggataggggttggagaggaagaaatgagaaagttagggagtagtttggaggtttttggggcgtagttgggaggatggaggggatgcggatttggttattttttttttgtttttttttcgggatagagggtttaaggtagtggttttgtcgggttcggtgtttagcggggattggggattggttatttttattaacggtaagggggatggagttttttaagagtagatttgatcgatggtttagattttaggttttaattttgggattgatagtttcgggatagtgtttatttagttcgcgttttttttttttttaatttttaaggtttggtttttggggggattgttacgaggttttttgattagagtagttgttgggcggtagagttatgatttgtgatttttttgttgattcgtggttttttagagttattagttaggttcggtatttttggcgtttttgtttttttagtggtttaggttta

SEQ ID NO: 676 - DNA, 6089 bp, Artificial Sequence
  chemically treated genomic DNA (Homo sapiens)
tggatttgggttattggagaaataaagacgttaggagtgtcgggtttggttagtggttttgagaagttacgggttagtagagaggttataggttatagttttgtcgtttagtagttgttttgattagaggatttcgtggtagtttttttagggattaggttttgagggttagaggggagaaaagcgcgggttgggtgggtattgtttcggagttgttagttttagagttggggtttaaggtttgggttatcgattagatttgtttttggaaaattttattttttttgtcgttggtggaagtgattagtttttagttttcgttgagtatcgagttcggtagaattattgttttgggttttttgtttcgggagggaggtagggaggaggtggttaggttcgtattttttttatttttttagttacgttttaaaaatttttaggttgttttttggtttttttatttttttttttttagtttttattttaggatcgttagtgttttttggggaaaagattgttttttattttttaggtttaagttttatattcgtaagttgggtataatagtttttatttgggggtggaggcgggaagcggtgaggaaagatagtcgagggcgtttttagcgttaagtgtaaggcgttttgggttcggtaatttttagttagcgttttttagtttagttagcgtttttgaatttttagggttcgggatgcggttttcggagtcggttggatttgttaggattggggtaggacggtgtgtttgaggggtgggggaattcggttttgaaataagtttttaggtcggggaggagatgaggatcggagttggtcgtgggggaggggggcgtcgtcgaggtttcggcgttgatagttcgggggcgtcgcgtagggtaacgtacggatttcgagttttcgtggtttcgaaattcgtagggagcgcgaggtcgagggggtcgggattttaagttggggcggcggattcgggacgtttttattttcggtcgttagtagcgtaaggtcgtcgagtagtagtagcggaagcgggattcggcgcgacggcgcggcgcgttttatgggcggcgggcgacgggcggtgggcggcggcggataaaggcgcgggcgcggttttggggtagcggcgcgggttttacgtttcggtcgagtttcggtagttaacgttgggttagggtcgcgtcgtttaattatttcgttcgggaggagggcgcggcggaggcggggtcgcgggttttttggtttttttttttcggcgttttttgtcgggatttttttttttcggatttcggttgcgaggggcgcgcgtttacggttgggggcgagggtttggattttagattttttcggagggggtatagagggggcgttttcgggtcggatgtttttagttttattttttaatatttcgtgaaattcgatttttttttttttttattttttttcgaggggagggttcgggattaaaggttattttcgttcgatttcgcgcggaggagcggggattcgggtttgtagtcggaggttcggttgttggggggtattggggtaggttttatcgttaatttcgtattttcggtcgggaggttgtaggtcggtggttaattttaggcgtgtttcgggatgggattcgattttgtttttagagatagggatagtcgggttaggttaataaataattaaaattttaacgtgtgttgggtttattcgggatattagggtcggagggagagattcgggaagttatcgaggttgtaggggaggtagttttggcgttgggtttgcgggagttttttgtataggaatttatagttatcggggttattgaggatgagttaggttttggaattataagtagatttattttttaaagaagaagaataaaatggtgtaggtgaagatgcggaggaattggatgagacgtataggaacgttattgggtagtttaaagcggtgtttttgtgagtttattatggattttttgagttatcgacgtttcgtttagttttatatttagtagaaacgtatataatatgtgttttaaaagatagaaagatatgtagtcgtatatttataatttttttaattgggaagtttagcgttattaaggtagatgaatatcgtggagtattcgggtttaggagtacgataaacggaataggagtgaatgattcgtaatttatataacgggtaaattttatagacgtaagttagagtaatagagttagttataaaggaatattcgttgtatgattttatttatataaaaggtaagaataggtcggtggcggtggtttatatttgtaattttagtattttgggaggatgaagtgggcggattgtttgaggttaggagttcgaaattagtttggttaatatggtgaaattttgtttttattaaaaataaaaataaaaataaattagttaggtatggtggtgtatatttgtagttttagttattcgggaggttgaggtaggagaatcgtttgaattcgggagacggaggttgtagtgagtcgagattttattattgtattttagtttgggcggcggagtgagatttcgttttaaaaaaaaaaaaaaaaaaaaaaaaaggtaagaatagtttagaggttaggagagtggtgattttggagtgggagcgtgttgggttttcgggggttggttaggtttagtttttttattttgggtattggttataaggttgggtttagtttgtgagaatttattgagttgtttatttatggtacgtgtttttttttgaatatatgttgtttttttttgtttttttgagatggtgttttgtttttgttgtttaggttggagtgtagtggcgtaattttagtttattgtaatttttatttttcgggtttaagcgatttttttgttttagttttttgagtagttgggattataggtatgtattattacgtttggtaaattttgtatttttagtagagacggggttttttcgtgttggttaggttggttttgaattttcgatattaggtgatttattcgttttgtttttttaaagtgttgagattataggcgtgagttatcgtgttcggttatatgttaaattttaaaatgaaaaataaaaggataagaatttatttttttatagggtgttttataagtttgaagtttgtagagagtttaggaaagtttattaaggggattagtatgtttacgtttttgaggttaaggaggttttttaggaagaggtgatatgcgattggttagtgaaaggtgagtagaggtgggaagggtttttttggtggtgttagtttttttgatgtttttgtaaaagtttggaggtattagagattttggttcgttttgattttggatggggtggggtgcggaaatagtatattagtagatggttcgagggaggtatttttgagttggaataggttgggaatttattattattttggtattaatttaattcgtttaagttatcggagaatggggtgttttggaaggagtttagatgattaagggaaggtggtggagggcgaagggggaattaggggatttgggggatttagaaagaagacgtagaaataggtagaggggtagaaggaaattaggagaaggtaatatttaagaaggaattaaaaagtgattttgggtagggcgtggtggtttatgtttgtaattttaatattatgggaggtcgaggtgggtggattatttgaggttaggggttcgagattaatttggttaatatgatgaaattttatttttattaaaaatataaaaattagttgggtatcgtggtgtatgtttgtagttttagttatttgggagattgaggtaggagagttgtttgaattttgaaggcggaggttgtagtgagttaagattgtattattgtattttagtttgggtgatagtaaaaaaaaagtgattttggttgggattgtttagtgtggtttagtgtttagtgaagttaggattgagaagttttaatggggatggagtaggtggtcgttggcgatgtgatcggggttttttttggggatggggagggagtggttgtgttgtgggtggttgagaagggggtggggatgaggaaatagggatagtaggaggaggtgatttttatatttagttaggtattgatattgttttaggtaggtagagggattgttgggaggaggagggttgagttaagtttgtaatagttggggagggaggttagagttaggagagaggatatggaaatttggttttttttagttttttttgaagttttaagagtttatttttgttttgaggtatagtttttattattttttttttttttttttttttttgaggtaagttttatattgttatttaggttggagtgtaatgttacgattttggtttattgtaatttttgtttgtcgggtttacgtaattgttttgttttaggttcgggggtagttgggattataggtatatattattaaatttagttaattttttgtatttttagtagagacggggttttattgtgttggttaaattggtttcgaatttttgattttgtgattcgtttgttttagttttttaaagtgttaggattataggcgtgagtcgtggcgtttagttaaggcgttttttttttaggtatttattttagtttttattttaggtttgttttttatggtttttttatatttttttgtttttgtggttggtgatttggaaagttaggtattgggtgttagggaagtaggtattattatggatttttattttttaggataagttagaggttttgatagtttgggatagggtttgaggttagattatttgggttttaatttaagttcgttattttttggttttgtggtattgagtatttgattttttggtattttgtttttttatttgttacgtggggtaaggattaggattttgtattttgtacggtcgtgagaattgaaggagatgttgatttttattatataagttttatagagaaaattttgtaatgtaattattgttagttgttgtgttggtggtgatagtgatgtgtttttaggattatataggggagtattagttttgattttttttttatttattgtttggttttgggtaagtttttttttgggttttagtttttttatttgtaaaatgtaggagatggattaggatgtttttaagtatgttttagattttaaaatttaggttgattttcggtttttttttttagtttttagtatatttagtttttagaggtttattggaagattataggtttgagatttttgtagtttaggtgagttatatttaggtgttgggagaagaatttattatgggtacgggtatttttgtatatttttgttgagtatgttataaatgtaaagttttggttattttgtattcgtgttttagggtcgtgtttgtaaaaagtaattttaaaggaggaggtattatttttttttggataagtttatcggaaaatcggtaaattttttaaatttagtgtttttttgtgtaatgtagtttattgtgtgtgtaggtatttattatttatgatgggtttttgatttcgtttattttatatcgattttaggatttggaagatataaggaatttatgtgaatattatgtttaaattgtagttattattttattgtaattaataaagtttttgtttttgatttaggagttttagaattggagattggtagtgtttttatttgaatggaggttatttgattttttttgtattttgggttttgttttttaataaaaattatagtattgtaatatttttttgttttattagaaatttttattatatatttagtgagtggatatgtttagaagtcgtatatatatttatttaattatttatttttttattaggggatattttcgttatttaaattttgtagcgttagaaatgatgttgtcgtgaaatttgtgcgttttaggtttagttgtatttttgcggtttttagtaggaatggtttagaagagtaagtgttgtattaagaaattgataaatttataatttagagagagatatagtagttgtgagtttttttatttttagttagt

SEQ ID NO: 677 - DNA, 6297 bp, Artificial Sequence
  chemically treated genomic DNA (Homo sapiens)
taaaaggattttgttttttgaatttgaattttaagaggggtggtaaaaagatgaaaatggttggaattgatttatttatatgatattagtttgaagaggttttttgtttattattattttagaattgtattattttttattttattataaagttaagtttaatgagttattttataatttgataatatttaaaatatttttttttttgttgaaattttttatagttagtttttttgtttgtagataaagaatttttgttgatatagatatttatataggaggtataaaatgatgagagtggtttgaagttgaaaatgttataagattttaattgattattttggttaatacggtgaaattttatttttattaaaaatataaaaaaattagttaggtatggtggtaggtgtttgtatttttagttatttgggaggttgaggtaggagaatgacgtgaattttagaggtggagtttgtagtgagtcgagatcgcgttattgtattttagtttgggtgataaagcgagatattgttttaaaaaaaaaaaaaaaaaaaagaaagattttaattgatttaataataaataaagtatttgtgttttgttatagtttttaggatattagtaagtttttttgaataaggaatgttattttgtttttaaggatttattatatagttagggggagtaagtataatggttatagaaaaaaaatatatatttaggttgacgttaaagtaattgcggttttgttagtatttttaaatggtaaaaattgtaattatttttgtgttaatttaatagtttattatagtaatagaagaaatatttttaatgtttagtgtttgatatggtatttggtatatagtaggtatattataattatgtattaattattaagtgaatgatttagttaataagtgtaatgatgttagaataagagagatgggtatgagttaaaatatttacgaataagaaggaatttgagtaaggttttttagggtgaatagaattttttgaaataaggagatggaagtaaggaattttagtttatggatttaatttgtaaatagtgtaaaataatttattacgaaaaaaaaaaaaaaagtttgtgataggtttaaggagagttgggtttttaattatttggtattaagaaaattttattgtaaagatatagatttttattattcgttattgaattttgttataagtagtatgttattttaatatatgttgattgtttagatagcgggaatagtttttgtatatttaaaatgtatttatttttaagtaattaagttttttttgttttttttttttttgtaattttttattattgtggttagaatatgagatttattgtttaaagaggggagtatatggtttggagttgttatttaatatgaaggaagaattttttttttattggagaaagaggttaatgaataaagaggaggttgtcggggaaagtaaaggttaggtaaaaacgtttaatttaaattttttttttggaggtgaaattttggaaggtagtttgagttagaaataatagaaatgtttagaaatgttggaagaggggatttgtagggtattaggatttggtttttattttttgggtagaagttttagaaaaggtttgtgtttggttgttgttgattaatatgttattgagtgtaagattttgagagaaagggtatagtatgttttgtatgttgttggagtataaggaaagtatgtagtttttagagttttttgtgggtgtagagtagtttagaaaattggtgggtaggataaggtttttttggatgtttaatagttttgtttttttttaatttatgggttttttgtttagattttttttttagtgtgaattatttttttatttttttttatttagggagttttaaaaaatatttatgtgaagaatttattatagattatttaaattagaaattttgggtgttggggtttggtgttagtgttagattttttttttttttttttttttttgagggaaagttttattttgttttgtttaggttgtagtgtagtggtataatttttttttattgtaatttttattttttaggtttaagcgattttagtgttttagttttttgagtagtaagatttataggtatgtattattatatttggttaatttttgtatttttagtagagatagggttttataatgttggtcgggttgttattgaattattggtttaaagtgatttattcgttttggttttttaaagtgttgggattataggtttaggtatgagttattatgtttattttggtgttagaatttttttaaagttttttattattttattgtatagttagggttgagaattgttattttaagtagagtttagttatgttttagatttaagttaaatattatttttttagggattttttttttgattagttttagtttaggttaagtttttttgttatatattttttaagtaagtatttagtatttattttgtttggcgtttaataattggtttattatttgttttaagtttgtttttttttgttgattatttgttgtgtgaggggagatatatttttgttttttttattaaattgttgaagttagtcgtgtttaaattgttgaatttgttttgttaaaattgttgaagtttagtttaataatgtattaagtagtatatagttcgtgtttagtaaaaatattttgaatgaatgattttttttatttagttaggagtgtgtgattaaggtttttatttatgaatttgttaagagattttttgtaggtgagattttaaagtatattatatatatatttataggattatggttttagattagtttatagtttttatagtttttttgttttatttttatgtattatagtagtttagtatgtttattattattattataattttgtgtggtggatattataagttttattttgtatttggaaagaagttgaataatttgtttaggtttttttattttattgtttgggtttttttataaacggttataaataaggaaaattttttttaataagatatatttttagggtatttgtttgtgttgagtttttattattggtttgatagtaggttggtggttgtttgtaggggattttttgggggtttttagttatagtagttaggatttagtgtgcgattttaggtttttttaaattgttatagggtgtaggtattattgggtattatttatataaggatgttataaatattatattttttaaagttattaaatttattgtgtcgcgtatattttggggagaggtagttgtgtgtgggggagggcgaggggatcgggagggtgtaagtagagttttttagatgaattttagttttaatttgggttgggtaagaggattatttttttatcgtttttattttatattttaggttttaatatttataggtttttgggttggatatcgatttagagagagtattttggatttaggtttgggtggtttgaattgagttttagaagagtcgcgtttggagtgggttttcgatatttagggtaagtgggggcggtagagtttttttttcggtcggtatagtagtttttgtcgcggtttcggtttgcgacgcgtttagttttagtttttcggttttcggcgtttgttgagtgttcggcgggagaggcgtagggagcgcgttatcgggaggcgcgggtagcggggattggttttttttcgggttagggttttcggggtaatcgtttttagcgcgtatttttggtgtaggtggaatagttttttgtttcggtagggttttatttatcgcgggagaggttaatttcggatttaaatttcgtagtcgtagagcgggttaaaatcgttattttatttttttttattttttttttttttattttaagataaaaagttttaggtcgggtaggatttgattatttttgtttttttttattgcgttaattttgcgagcgagaggtttcgtatcgaggcggaggttggtaaaggggagtggaaagggaggatggatggggtcggggggtggggtggtgatgagggcgacgaaggagggggtgttattttttttttttttttttttttaaaaaaagtatttttttcgcgagaaatcgttgcgcggacgatatttgaagaggtggggaaaggagggggttgcgggagtcgcggtagagattgtgggtgttataagcggataggagttatagttgggatagttgcgagcggagtcgagtagtggttgtagcggttacgattgggagtagtcgtcgtcgttttttcgggagtcggagtcgtcgtttttttagtgggtgtagtcggggtttcgacgggggtcgggcggttatcggggttggagttgcggttacggaggtttttgcgtttgcgtcgcgtcgagggtagggatagggattggggtgaggggttgtttcggaacgtttatagttggcgttggtttttttttgtttgatagttttttggttcggggtttttggtgtcgggtttcgcgttagatgttcggggggcggtggtatcgttcggagtcggcggggacggcgcggttggtttttagtttggcggagagggtaggttgaggagtggggcgtttagagcgcgtatcgcgcgtaattcgtgtcgttaaaaaaaataaatttagagagttcgttcggggtttaggatcgttggggatatgggtattttgcgtcgcgtttttttggcggggttcgggaggtcgagggatcggtcggggttgttgtcgtcgggggtttgggttttttagttagttgtggattaaacggtttttttttatttaaattaattgcgttacgcgtaggcggcgtacgggttgggtttgggaatggggatcgcgaggttttagtatttcgatgttttgaaagttttttcgtttcggggatttgtttttgtgttgtagttggtaggggtcgtttgaagtgggagtagcgtttggagaaggcgggaggagttcggttcgggggacgggcggcgggatagcgggatttcggcggcgcggtgcgttttagggcgtagcggcggtcgtagatcgagtttcgggcgcggtaagaggcggcgggagtcggtggcggttcggtattatgcgtcgagggcgtttgttggagatcgttttgggatttatcgtgtttttagcgttttatacgagttatggggcggacgttaatttggaggttgggaacgtgaaggaaattagagttagtcgggttaagagaagaggcggtggaggatacgacgcgtttaaagggtaaaggaatcggtttttttttttggtgtgggttttttaagttttaagatttagaataacgggtaggatgattttttttgtggaagattttttggtaagattttttgggggtattttagaggtgttagggttgtttagtttttatttcgttcgtggttaaattattttgtttttatttttagagatttttgttttaaaggagaggacgtggttaaatggaattttgggttattgttgaggtagattttgggaggcgagaagagttttttggggaagaaggggaggagttgcgagtgggataagaggagaagttcgtttttttttttgtaatattaattttggttgtttttagaggaaagtattttttttggggttattttggtagatgttgtatttgaaagggggtaaggaaaggaagggatttttatgatagttagaggagaaattatatagtagttgattttttcgtaaattatgtttattaaaattacggattgggttttttgggtaatgttttttttaaatgtttatattggaagtagaatagggtaagtggttttgagaattggttttttgagttgtgtggggtttttcgttttattgtagtagtaaggttgttgtggtcggttttaagggagtatttttaattagtggtgtttgtgttgtgtatatgtaattgattattttattggttttttatgtcgttgttatagatgttttagtcggaaaaattttaattagatttgattaagggttgttatttttttgtattgaaggatagtgggaatatattttttttaagagaaatttgtttgtagttgtttaagttaaagtttttatggaaataataggatggattgttagtgattttttttatttttttggaggagtttgttaaataaatttagatagtatatatagggagattttgtattaaatttttattattttcgttgatgttttttttttgagtggttttgtagttttattatatagtttt

SEQ ID NO: 678 - DNA, 6297 bp, Artificial Sequence
  chemically treated genomic DNA (Homo sapiens)
agagttatataataaagttatagaattatttaggaaaagagtattagcgagaatggtaagaatttaatataaaatttttttatatatattgtttgaatttatttaataggtttttttaagaagataaaaggggttattgatagtttattttgttgtttttatggaggttttaatttaaataattgtagataaattttttttaaaggaaatgtatttttattgttttttaatataggaaaatgataatttttagttaagtttaattaaaattttttcggttgaaatatttgtaatagcggtatgggaagttagtgaaatggttagttgtatgtatataatataaatattattagttaaaaatatttttttaaggtcggttatagtagttttattgttgtagtgaaacggagagttttatataatttaaaaaattagtttttagaattatttgttttgttttgtttttaatgtagatatttaaaggaagtattgtttagaaaatttaattcgtaattttaataagtataatttacggaagagttaattattgtgtgattttttttttgattgttatgggaatttttttttttttttgtttttttttaaatatagtatttattaagatgattttaaggaaagtatttttttttagaaataattagaattgatattgtagggaaaggaacgggtttttttttttattttattcgtaattttttttttttttttttaaggaatttttttcgttttttaaaatttgttttaataatggtttaagattttatttaattacgtttttttttttggggtagaaatttttgggagtaggggtaaggtagtttaattacgaacggggtggggattaaataattttagtatttttaaggtgtttttaggaggttttgttaaggagttttttatagggagagttattttgttcgttgttttggattttgaaatttgggagatttatattaaaggagggaatcggtttttttattttttaagcgcgtcgtgttttttatcgtttttttttttggttcgattggttttggttttttttacgtttttagtttttaaattggcgttcgttttatggttcgtgtaggacgttaaaagtacggtaaattttagggcgatttttagtagacgttttcgacgtatgatgtcgagtcgttatcggttttcgtcgttttttgtcgcgttcggggttcggtttgcggtcgtcgttgcgttttgaagcgtatcgcgtcgtcggggtttcgttatttcgtcgttcgtttttcgggtcgggtttttttcgttttttttaggcgttgtttttattttaggcggtttttgttagttgtaatatagagataaattttcgaggcggggagatttttagggtatcgggatgttgaagtttcgcggtttttatttttaagtttaattcgtgcgtcgtttgcgcgtggcgtagttaatttgggtaagggaagatcgtttggtttatagttggttggaaagtttaggttttcggcggtagtagtttcggtcgatttttcggtttttcgggtttcgttagaagagcgcggcgtaaagtatttatatttttagcggttttaagtttcgggcgagttttttgggtttattttttttagcggtacgaattgcgcgcgatgcgcgttttgaacgttttattttttagtttgtttttttcgttaggttggaagttagtcgcgtcgttttcgtcgatttcgggcgatgttatcgtttttcgaatatttgacgcggagttcggtattaagagtttcgggttaggaagttgttaggtaggggagggttagcgttagttgtggacgtttcgggatagttttttattttagtttttgtttttgttttcggcgcggcgtaaacgtaaaagttttcgtggtcgtagttttagtttcggtggtcgttcgattttcgtcgggatttcggttgtatttattggagaagcggcggtttcgattttcgaggaggcggcggcggttgtttttagtcgtggtcgttatagttattgttcggtttcgttcgtagttgttttagttgtggtttttgttcgtttgtggtatttatagtttttgtcgcggttttcgtagtttttttttttttttatttttttaagtatcgttcgcgtagcggtttttcgcgagagaaatattttttttaaaaaaagaaagaaaaagaaaatgatattttttttttcgtcgtttttattattattttatttttcggttttatttattttttttttttatttttttttgttagttttcgtttcggtgcggggtttttcgttcgtaggattagcgtagtgggaggaggtagaggtgattaggttttgttcggtttgggattttttgttttgaggtggggaggggagaaatgggaagaggtggagtagcggttttagttcgttttgcggttgcgaggtttagattcgagattaatttttttcgcgataggtgaagttttatcggagtagaaagttgttttatttgtattaagaatgcgcgttggagacggttgtttcggaggttttggttcgagagaaaattagttttcgttgttcgcgtttttcggtagcgcgttttttgcgtttttttcgtcggatatttagtagacgtcggaggtcgggaggttaagattgggcgcgtcgtaggtcgggatcgcggtagaggttgttgtgtcgatcgaggagagggttttgtcgtttttatttgttttgggtgtcgagagtttattttagacgcggtttttttgaggtttaatttaagttatttaggtttgaatttagggtgttttttttaagtcggtgtttaatttaggggtttgtaaatgttggaatttaggatgtaggatgggagcggtgaagggatggtttttttgtttagtttagattaagattggggtttatttggaggattttatttatattttttcggttttttcgtttttttttatatatagttgtttttttttaggatatgcgcggtatagtgaatttagtggttttgaaaggtatagtatttgtggtatttttatatggataatgtttaatgatgtttgtattttgtaatagtttaggaaggtttgaagtcgtatattgggttttggttgttgtaattggagatttttagaagattttttgtaagtagttattagtttgttgttaagttaataataaaagtttagtataaataggtattttgggaatgtattttgttgaaagggattttttttatttgtaatcgtttgtaaaggggtttagatagtagggtagagagatttgggtaagttatttaatttttttttaaatataagatgggatttgtagtgtttattatatagggttgtaatggtgatgatggatatgttgaattgttgtgatatatgaagatgaaatagaaaaattgtgggaattatgagttgatttaaagttatagttttgtaagtatgtatgtggtgtattttaaggttttatttgtaaaaggttttttagtagatttatgaatgagagttttggttatatatttttggttgagtaaaggagattatttatttaagatgtttttattgagtacgaattgtgtattatttagtgtattgttgaattagattttaataattttaataaggtaggtttaataatttgaatacgattgattttaataatttagtgaaaagggtagaaatgtgtttttttttatatagtaggtagttaataaggaaaggtagatttgaaataaataatggattaattgttaagcgttaaataggataagtattgggtgtttgtttggaggatatataataaggggatttgatttaggttagggttgattaggaaagggatttttgaggaagtgatatttaatttaagtttaaaatataattagattttatttaggatagtagtttttaattttggttatgtagtaaaataataagaggttttaaaaaaattttgatattaggatgggtatggtggtttatgtttgggtttgtaattttagtattttgggagattaaggcgggtggattattttagattagtagtttaatagtagttcgattaatattgtgaaattttgtttttattaaaaatataaaaattagttaggtgtggtggtgtatgtttgtaaattttgttatttaggaggttgaggtattagaatcgtttgaatttgagaggtagagattgtagtgagaggagattgtgttattgtattatagtttgggtagaatagagtgaaatttttttttaaaaaaaaaaaaaaaaaaaaaaaatttgatattgatattaggttttaatatttagagtttttgatttgagtagtttgtagtggattttttatatggatattttttaaagttttttgggtagggaggggtaaggaggtaatttatattgggaaaaggatttgagtagagggtttatggattaggagaaagtagggttgttggatatttagaaaggttttgttttgtttattagttttttgggttgttttgtatttataggggattttggaaattgtatgttttttttgtattttagtagtatgtaagatatgttgtgtttttttttttagaattttatatttagtgatatgttggttagtagtaattaaatataagttttttttaaggtttttgtttaggaagtaaaggttaaattttggtgttttgtaagtttttttttttaatatttttggatatttttattatttttaatttaaattgttttttagggttttatttttaagggagggatttggattaaacgtttttatttggtttttgtttttttcggtaattttttttttatttattggtttttttttttaataaaggaaagattttttttttatattgggtggtagttttaagttatatatttttttttttgagtaataagttttatgttttgattataatggtggaagattataggggaaggggaagtagggggaatttgattatttaaaagtaaatatattttaaatatataagaattattttcgttatttaggtaattaatatgtattagagtagtatgttatttatgataaaatttagtaacgaataataaaaatttgtgtttttgtaataagatttttttgatgttagatgattgaggatttaattttttttaaatttattatagattttttttttttttttcgtaataggttgttttgtattgtttgtaaattaagtttatgggttagaattttttgtttttatttttttattttaaagaattttatttattttaagaaattttgtttagatttttttttgttcgtaggtgttttagtttatgtttattttttttgttttaatattattgtatttattaattgaattatttatttaatagttaatatataattatagtatgtttattatatgttaagtgttatgttaggtattggatattagggatattttttttgttgttatagtgaattattaggttggtataaaagtaattgtagtttttgttatttaaaagtattagtaaaatcgtaattattttggcgttaatttaaatatatattttttttttgtagttattgtatttattttttttagttgtatgatagatttttaaagataaggtggtattttttatttaaggaaatttgttagtgttttgaaaattatgataaaatataaatattttgtttgttgttggattaattgaaattttttttttttttttttttttttttgagatagtgtttcgttttgttatttaggttggagtgtagtggcgcgatttcggtttattgtaagttttatttttgggatttacgttatttttttgttttagttttttaagtagttgggaatataggtatttgttattatgtttggttaatttttttgtatttttagtagagatggggttttatcgtgttaattaggatgattaattgaaattttgtggtatttttagttttaagttatttttattattttatattttttgtataaatatttatgttagtaagggttttttgtttataagtaagaaaattagttatggaaaattttagtaaaaaaaaagatattttaagtattattaggttatgagatggtttattgaatttgattttgtgataaaatggggagtagtatagttttgggataatggtaagtagagaatttttttaggttgatgttatgtgagtaaattaattttaattatttttatttttttgttattttttttggagtttaaatttaaaggatagggtttttttg

SEQ ID NO: 679 - DNA, 6381 bp, Artificial Sequence
  chemically treated genomic DNA (Homo sapiens)
ttttttgggaggtcgaggcgggtagattatttgaggttgggagtttgagattagtttgattaatatggtgaaattttatttttattaaaaatataaaaattgggttaagtatagtggtttacgtttgtaattttagtattttgggaggttgaggtgggtggattacgaggttaggagattgagattattttggttaatatagtgaaattttatttttattaaaaatataaaaaattagttgggcgaagtggcgggggtttgtagttttagttatttaggaggttgaggtaggagaatggtgtgaatttgggaggcggagtttgtagtgagtcgagattatgttattgtattttagtttggacgatagagtgagattttattttaaaaaaaaaaaaaagaaaagaaaagaaaaggaaaagaaagaaaagttttagtttttttatttgtaaagataggggtttgattagaagttattttagagtggttttggattgattaaaggttgtttttgaagttttgggtaagtgttatatttttagtaagtgttaaatagatgtttgttgtttagtttttatattaggttttcggggttataggagttgggggaggtgtttaaggaaggattatgttattgtaattttttttatatatattatttggtttttgtttttttttttgtgtttttgttagagatatatttttattttattgtttaggttggagtgtagtgttgtgattacggtttatcgtagtttcgattttttgggtttaagtgattttttttttttagtttttttagtagttgagattataggtatgcgttattatttttgggtaatttttaaatttttttagagatagtgttttttttatgttgtttaggtcgtttttaaaatttttgggtttaagtggtttgtttgtttcggtaatttagagtattgggattataggtgtgtgtattgtgtttggtttgttttttttttttgtggtattaatcgtttttatagaggggaaagtaagtagtggagttttgggttgagggcggttgttgtaggggtagggattgtttatattgttatttttttattgttcgtttttaatataattttatcgtgggagttgggtgaggaaatgtatgagtattgatttttcgtaggatttcgagtgttatatatgtggtaatattgtttatattatttgaatttgtaattttatgtgaagttggagtatgtggtaagaagtaattttgcgagggtggtgggtggaggagggaggggtttaatttataggttaggaatttatgtgaggtggtcgtttttttttgttttttgttaatatttgggtgatgggttttatgtattttgatttagaaaagagcgagttataatcgattaatatgatggaggggatattattgtatattaggtaaatataggtttagttgttaatttttatatttttttagttttttttgatggttagggaatttttttgtttttgtttatatgaaaataatagttggttttatttatgtaacgaagtaaatatttatatattgtgtatttattatatgttgggtattgtttttaaatattattagtattgtttgtataatttttttagtaattttatgaggtggttataattattagttttagtttatagatgagttaatggttgtttggtgaggtttagttaattgtataggtttgtatagttagtaagtggttaggttagggtttggatttaagttatgtagttttagagtttgtgtattttattataatgcgacgtggtttagttttaaggggaatggtttgttttgtaggtaatgagttgtttattatcgtgggtgataagtagaagtgattgagttagataggggttttttttacgtatttagtgtgttttttgtgtgtagttttgagttaagtattttgttaatgttattttattttagttcgatgatattattgttagatggaattattattttattatatggatgaataaattgggtttatagagattaggtaattggttcgagatttttggttgttgagggttggagttgggatttaaataagtttgtttaatgtagattttaagttttttattttttattagggatggtgtttaatgagggttggttggattagatgatttttacggttttagttaatttaagattttgagggattgagagtttggtaagtaaaggggtatatttttttagttattagttttagtttttttttagtaattagttattatgttaaaaatattagttattatattttagtttttttttttttttttgagattgaatttcgttttgttgtttaggttggagtgtagcggtaggattttgatttattgtaatttttgtttttcgggtttaagcgatttttttgttttagttttttgagtagttggaattataggtgtatattattatgttcggttaattttttattttagtagagatgggttttattatgttggttaggttggttttgaatttttgattttaagatttgttcgttttagtttttagtttgtttgttttttttttttttttttttttttgagatggagttttgtttttgatgtttaggttggattgtaatggtgttatttttgtttattgtaattttcgttttttaggtttaagcgatttttttgttttagttttttgagtagttggaattataggtatgtattattatgtttagttaatttttgtatttttagtagagacggggtttttttatgttggttaggttggtttcgagtttttaattttaggtgatttgttcgtttcggttttttaaagtgaagtgttgggattataggtgtgagttagtgagtcgggtttatttgagtttttatgtttaaggatgtattttttttattattttttttaatatagggttttttttgaaaagttgtttgaggaataaagagttaaataagatttttaaaggattaattttttttgttaggtatttaagttttttttggggttttgaggagatagtcgttgttttttttggtggtattattatttttttttatttaacgtcgtcgtatttgataattttgggtataggaatttgtattttaggtttttacggtgaatttagtagttaatttttagagtttgttttgtttgttttatttatatcgtttggtatatgggttagttcgtttttatttattttttttatttggtttttcggatgttatattttttggtttttggttggtttttttagttggtttttttaatttatatttgtagtatggattttttttttgaattttagatatataaatttgtttatttgatattgttttggatgtttagaaggtattttaaatttagtaggttttatatttagtttttaattgttagttttgtttttagtatacgtttttttcggtgttttttatcgtagtcgaggataattgtatttttttagttttttaggttttaaattttagaattattcgagatttttgttttttatatattttatttgttaacgaattttattagttttatttttaaaatatgtttagaatttattatttttattgttaatatttggtttattattttttagtaatttggagggtattgtttttagtttgatttttatatagtagtcgtagtatgaagatatagggtagattatgtttttttttttttttaaattttttagtgggttttttttagttaaagttaaattttatttggttttttagattttatttttgtattttttcgttggttttattttttttatttttgatttttgttagttttattttagttttatcggttttttggttattttttgaatttgaaatatggttttttattttagggtttgtgtattggttttttcggtgaggaaatcgtttttttttttatttttatcggcgcgttgtattttttatttttttgtttatatattttttttttagagaagtttttattgaggtttttgtttattttttttttttttttatatttcgtgttttttttttttatttcgtttttttttatggtatttatggtttatgtaataaattaatttattgtttatatatttatttttattgtttttttgtgaaaacgtatattcgaaaagggtaggagttttgtttgtttggattaggttttatttttggaaggtaggatagtgtttagtatagtaggtgtttaataggtgttgtttcgtgaattagtatattaattgtagtattgtggttattagggggttaggatgcgggcggtggagttttttggtttttgtgtggtagtcgaggattttgtgttagcgatcgtttttcgggaaattttcgggcgagatttatattttggaaatttaaatatttaatagttttcgaattttaggaattttgagaagaggtttggattaaggatttagacgtgggtttttagatgggtgagaaacggggattttgtgttttttagcggggatagaagggttaggtgataggttaggtagagtggacggggtttgggtagggggcgggggtaggtagttatacggggtaggagttgtagagttaaagttaggttatgtggattggttgcgggtttcgttgtttagttggtggtattgagtaagttatttaatttttttgaattttcgttttatgattttggaggaaatagttatagttttttttttggtagagttcgatggttcgagtttcgttttatagtgcgggtggagggtacggaggggtgtgtgtggggggcgatagtttaggaagattagggggcggtagggcgcgtgggggcgggggttgggagatcgtagggaggattttcgattttgtttgaagatttaagtaggcggagtcgcggtttggttcgcggggtaggcggggcgtaagagtgttttcgggggcggggggtcgattcgcgtttaaaggttttcgcgatttattcgtcggcgtttggtttggtttagttgtattacgagcgttgcggatattcggggcggtagtcggtttgttagttttttcgttaggtttcgcggttcgtatttgtcgttcgtatttgtagtttcgtatttgcggttagtgtttattgtttttttttgtcgttcgtatttgtagtttcgtatttgtcgtttgtatttgtagtttcgcgttttattcggtttaagtatggttgattaggcgtttttcgatacggacgttaatattttgattcgtttcgttatggaggagggtaggaaggttcgcggtacgggcgagttgatttagttgtttaattcgttttgtatagtagttaaagttattttttcggcggtgcgtaaggcgggtatcgcgtatttgtgagtcgggttttgggcggtgggtttcgttttgtttgtttgtttggggagtttgttcggcgggttgacgttgggttttttgagttttttgtcgttagtttttgtttgttcgtttgatgtttgagcgtttttttcgttttttgtttggtagtttttttttttagaagttggtttagttttatttaagtttttatttttttttttgattttggaggggtttatttgggggttcgttttataggtgtatatttgattttattttgtattttttttttttgttttgagtagtttgtttcgtattttttttagtcggttaagtgtgggtatttggtttgttcgttatattcgttttagttttagataggaaagtgttagtttaggtgttttttttttttattttttttttgtttttttttattttttttgtaattagggatttaagttaggtttttaatttagttatttttgatttgaaataagatttgttaggagcgagtgtttttttcgtttttttcgtaagtaggttgggaggttttttgtgtgtttagagtttttaggagtagtagggtttgtgtgtaaaggagttttcgtgggttgttttttgttgggatagttgttatgttgtgttagaaataggaaatatttagggttttaaaatttttatcgatttgtaatgatggtgtgtgtagtttttgtttaattagtggaaagtttaaaagtggtttgtagaatggttttgaatgcgttatggagtgtatttcgaacgttattgggtataggaattatttggggattttggtaagatgtgtgttttttttttatagttttgggataggttttgagattttgtatttttaagaagtttttttgtggtgggtgttgtttattagatattgtttgtttatttattatattgtgagtagtaaggggttaagtggagtggagatttaaaggatttttttttgtgaggttttttgtaagttatataatattttttcgt

SEQ ID NO: 680 - DNA, 6381 bp, Artificial Sequence
  chemically treated genomic DNA (Homo sapiens)
acgaaaggatgttgtgtgatttataaaaaattttataagaaggggttttttgagtttttattttatttgattttttgttatttataatgtgatgagtagataaatagtatttgatgggtagtatttattataggagaattttttagaaatgtagaattttaggatttgttttagagttatggaaggagggtatatattttattaagatttttaaatgatttttgtgtttagtgacgttcgagatgtattttatagcgtatttagaattattttataaattatttttgagttttttattaattgggtagaggttgtatatattattattgtaaatcgataggggttttgaagttttgggtgttttttgtttttggtatagtatggtaattgttttagtaaggggtagtttacgggagtttttttgtatataagttttgttgtttttaaaggttttggatatataggagattttttagtttgtttgcggggggggcgggggggatattcgtttttaataggttttgttttaggttagagataattggattagaaatttgatttgggtttttaattgtagaaagagtgaaggaggataaagaagaaatggggaaggaaggtatttgagttagtatttttttgtttgaggttagggcgggtatgacgggtaggttaggtgtttatatttggtcggttgagaggggtacgaggtaggttgtttagggtagagaagaggaatgtaagatggaattaggtgtatatttgtgagacggatttttaggtgggtttttttaaggttaagggaggagatgaggatttgagtgaggttgagttagtttttggagagaggggttattagatagagagcgagagaggcgtttagatattagacggatagatagaggttgacggtaggaggtttagagggtttaacgttagttcgtcgggtaggttttttaggtagatagataggacggggtttatcgtttaaggttcgatttataggtgcgcgatgttcgttttgcgtatcgtcgaagagatggttttgattgttgtgtagagcgagttgagtagttgggttaattcgttcgtgtcgcgggtttttttgtttttttttatgacgaagcgggttagggtgttgacgttcgtgtcgaagggcgtttggttagttatgtttgaatcgggtagagcgcggggttgtaggtgtaagcggtaggtgcggggttgtaggtgcgggcggtaagagagggtagtaggtattggtcgtaggtgcggagttgtaggtgcgggcggtaggtgcgggtcgcgggatttggcgggaggattgatagatcgattgtcgtttcgagtgttcgtagcgttcgtggtgtaattgggttaggttaggcgtcggcgggtgaatcgcggaaatttttagacgcgggtcggtttttcgttttcgggaatatttttgcgtttcgtttatttcgcggattagatcgcggtttcgtttgtttggatttttagataaggtcggggattttttttgcggttttttaattttcgtttttacgcgttttgtcgttttttagtttttttgggttgtcgttttttatatatattttttcgtgttttttattcgtattgtggagcgggattcgggttatcggattttgttagagagaaagttatgattgttttttttaaaattataaaacggaagtttagaaaggttaagtaatttgtttaatgttattagttaggtagcgaaattcgtagttagtttatatggtttggttttagttttgtagtttttgtttcgtgtggttgtttgttttcgttttttgtttaagtttcgtttattttgtttggtttgttatttggtttttttgttttcgttaggagatatagagttttcgttttttatttatttgagggtttacgtttgaatttttaatttaggtttttttttaagatttttagaattcgagagttattgagtatttgaatttttaagatgtgagtttcgttcggaagtttttcggaaaacggtcgttgatatagagttttcggttattatataaaggttagagggttttatcgttcgtattttgattttttggtagttataatgttgtaattgatgtgttgatttacgaaataatatttattgagtatttgttgtgttgaatattgttttattttttaggggtggagtttgatttaaatagataaaatttttgtttttttcgagtgtacgtttttatagagaaatagtaaaaataaatatataaataatagattagtttgttatataagttataagtattatagagagaaacgaaatagaaaaggaagatacggaatgtggaggggagaagagggtgagtagaggttttagtaaaagtttttttgagaaagggatatgtgagtaaagaggtgaaggatgtaacgcgtcggtggagatgggaaggagagcggtttttttatcgggagagttagtgtataggttttggggtaggagattatgttttaggtttagggaatggttaggagatcggtggagttgaaatagagttagtaagggttagaggtggaggagataaggttagcgggaggatgtagaggtgaggtttagagggttaagtgaggtttgattttgattaggaggaatttattggagagtttggagaagaagagaggtatggtttattttgtgtttttatattgcggttattgtgtgaagattagattgaagatagtgttttttaggttattaggagatagtgagttaggtgttagtagtggaggtggtggattttggatatattttgaaggtagagttgatgggattcgttgatagatgagatatgtgagagataggagtttcggatgattttaaggtttgaggtttgagaaattagaagaatgtagttgttttcgattgcgatggggaatatcgagaggggcgtgtgttggaggtaggattgataattaggagttaagtgtgggatttgttaagtttgaaatgttttttagatatttaaggtaatgttaaatagatagatttatgtatttggagtttagaggagagatttatgttgtaggtataaattggaaaagttaattggaaaaattaattaaaaattaagagatgtgatattcgggaagttagatgaagaaggtaagtaaaggcgggttgatttatgtgttaagcggtgtggatggggtaggtaggataagttttgaaaattgattgttggatttatcgtggagatttggggtgtagatttttgtgtttagggttgttagatgcggcggcgttgaatgaaggaaggtggtggtattattaggaaagatagcgattgtttttttaaagttttagaggggatttagatgtttggtaaagagagttgattttttaagggttttatttaattttttgttttttaggtaattttttaggaaaaattttgtgttaaaaaaaatagtaagagaaatatatttttaaatataaaaatttaaataggttcggtttattggtttatatttgtaattttagtattttattttgggaggtcgaggcgggtagattatttgaggttgggagttcgagattagtttgattaatatggagaaatttcgtttttattaaaagtataaaaattagttgggtatggtggtgtatgtttgtaattttagttatttaggaggttgaggtaggagaatcgtttgaatttgggaggcggagattgtagtgagtagagatggtattattgtagtttagtttgggtattaagaataaaattttattttaaaaaaaaaaaaaaaaaagaaaaataaataaattggaggttgaggcgggtagattttgaggttaggagtttaagattagtttggttaatatggtgaaatttatttttattaaaataaaaaattagtcgggtatggtggtgtgtatttgtaattttagttatttaggaggttgaggtaggagaatcgtttgaattcgggagatagaagttgtagtgagttaagattttgtcgttgtattttagtttgggtaatagagcgagatttaattttaaaaaaaaaaaaaagaattgaaatgtgatgattagtatttttggtatagtaattagttattaggggagagttagagttagtaattaggggagtgtgtttttttatttgttagatttttagttttttaggattttggattggttaggatcgtaaaagttatttagtttagttaatttttattggatattatttttgataagaggtgaagagtttgggatttgtattaagtaaatttgtttgagttttagttttagtttttagtagttagagatttcggattagttatttaatttttgtaaatttagtttgtttatttatatagtggaataatggttttatttggtagtggtgttatcgggttgaaatgagatggtattggtagagtgtttagtttagagttatatataggggatatattgaatacgtggaggagatttttgtttagtttagttatttttgtttgttatttacgatgatgggtagtttattgtttataaggtaagttattttttttgggattaggttacgtcgtattgtggtgaagtgtatagattttggggttgtatggtttgggtttaaattttggtttggttatttattggttgtgtaagtttgtgtaattggttaaattttattaagtaattattggtttatttgtaaattggggttaatgattgtagttattttatagggttgttgggagaattatataggtagtgttggtagtgtttaagaatagtgtttagtatgtagtaagtatatagtatgtaagtgtttgtttcgttatatgggtagggttaattgttgtttttatgtgaatagaagtaagaaagttttttggttattaaaaggggttagagggatgtgggaattggtagttgagtttgtatttgtttggtgtgtagtgatattttttttattatattggtcgattgtgattcgtttttttttgggttaagatgtataaagtttattatttaggtattagtaagagatagaggaaggcggttattttatatgggtttttggtttgtgggttgggttttttttttttttatttattattttcgtagagttgttttttgttatatattttaattttatatgggattgtagatttaagtgatgtgagtagtattattatatgtgtaatattcgaaattttgcgaagaattagtgtttatgtatttttttatttagtttttacgatggggttatgttggaggcgggtagtggagaagtaatagtgtggatagtttttgtttttataatagtcgtttttaatttagggttttattgtttatttttttttttgtgggggcggttagtgttataggaaagaaaaataggttaggtatagtgtatatatttgtaattttaatgttttgggttgtcgaggtagatagattatttgagtttaggaattttaaaagcggtttggataatataaggaaaatattgtttttaaaaaaatttaaaaattatttaggagtggtggcgtatgtttgtagttttagttattggagaggttgaaggaggaggattatttgagtttaagaggtcgaggttgcggtgagtcgtgattatagtattgtattttagtttaggtaatagagtgagagtgtgtttttaataaaaatataaaaagaaaaataaaagttaagtggtgtatgtgagagggattgtagtagtatggtttttttttaaatattttttttagtttttgtggtttcgggggtttggtgtggaaattaaatagtaaatatttatttagtatttgttaagggtgtggtatttgtttagggttttagaagtagtttttaattaatttagaattattttggggtggtttttaattaaatttttgtttttatagatgaagggattgaggtttttttttttttttttttttttttttttttttttttttttttttgagatagagttttattttgtcgtttaggttggagtgtagtggtatgatttcggtttattgtaagtttcgttttttaggtttatattatttttttgttttagttttttgagtagttgggattataggttttcgttatttcgtttagttaattttttgtatttttagtagagatggggttttattgtgttagttaggatggttttaattttttgatttcgtgatttatttattttagttttttaaagtgttgagattataggcgtgagttattgtgtttggtttaatttttgtatttttagtagagatgggattttattatgttggttaggttggttttaaatttttaattttaggtaatttgttcgtttcggttttttaaaggg

SEQ ID NO: 681 - DNA, 5929 bp, Artificial Sequence
  chemically treated genomic DNA (Homo sapiens)
gatagaaagtagtttggtgtttgttaggggttgggagaaaggaggagtggagggttgtttaagaagtataagtttttttttggggcgatgatgaaaatattttggaattataggggtgatggttttatatatgtgtatgtgttaagtgttattgaattatatattttaaaattgttaattttatgtgaatttaatatttataaaattagtggttattttaatagaggaaagtatgtaagttattggaattagaaattttagtattattttatgtatttttatgtagttagttatttaaaataataatgtatttatttattttttaaataagaaaatagataagtatttttaaataaaaattattgaaatattttttataaatttaatttattgtaaggtttttatttttaaatataatttaagtgatagatattttaatataaaattttattaattttaaagaatatgtattataataaaaacgtttagtagaaaggattttgagatttttgatgtttatagatgttattttttgttttttcgttgttatattagtttataattttggagatttatatagttaaaaataattattttgtatttagaagttgaggtaatttatgtgatatgttatataatttttaaaaataatttattaggtttttatttttattttttgagaggaagttttttggaggttggtttttgttaaaaggtataattaagtgatgttgttatttttatttattattttttttttttataattttttattattagatttaattgtttaaaaatgtttttagagaatatttttttagatttttagatatgtgtatatttataataaaatgtttgtagggaaagtaaaattaaattagaaagtattgttttgttaaagtttagattataggtgtgtggatttgtttatttgaattaaaattttttgaagttgattataagtatcgattagtgagcgtatttcgttttaggtttattggatttgaattattggttgggaggtagagtaaaagtttttttatttttttttttttataagaatttagagtgaatataatatgtaatattgtaatattgttaattaatttataaataatttttttgtattattatttgaattttttaaattattttgtaaagttttattttaataatttaatagatatatattaaatattatgttagatataattttagatatatttatatgtttgagaaaaaagatatggtggtaggagatgtagtttagaattattttttatgtgtttttttttgagtttttgatttattttttaatggtaaaaatcgtaattatttttgcgttaatttaataattttagttgtgaggataaaaagttaaaattatgttaaggggtttttagtgttttttagaatgataaattattatttatagttgaggaggtaagaggtttataaatatttgtggaggtttatttttttaggttttttgttttttgtgatattttgggttggaatttgaagtaatgaagattttttgtgtgttgggaaagttttttatgtttttcgagttgatttatggtttttaagattgtaagaaaaagagggaatttttggaggtggtaattttaattagtagggttttttttttttttttttttaatatattgttgattttgggagtttgttttttttataatttagtgattaattgttaataattaatgatcgtaaagttatagttagattagttttatttttatttttgtatttttttttgaattttttttttaagttgattttaaggtgttgttgttttttatttttttttatatgtaaaatatttttaggttttttttttgttggagattagtttgttattttgttgaatgtgaaatatttatagtgattggtaaaattaggagagattgtttagtgtttaagagaggaggttatttaggtttatatttttggtcgtggggtatgaagtttggatagagagtagttagttgtatttaattgtatatgattttttttagagttgaggttttgaatagatttggtatagattttaattttgatttgttatttaatagttatatgattttaaatttatttatgtgtaaatatgggataataataaaattgattatagaaatgtattgaaaatgaagtaagattttaaattaaaatttaatatagttggtaattaaaattattatcggagtaattgtagtattattttgtttttgaatttttagtgttatatattaattaatatttattggtttagatattttgatgtaaaataaaattttaagtggaagtacgtgatatatttttttattgtgtgtagttaaatgtaaagtttttttttgtttttttattttagatagatattatttatatttagatatattttaatatggttagatatttgttttttttagaaatgtttttggagtttttgagatgagaggttttagtgtttgtagaggtattttttattattatttattaggatggttattttgggttggattaaaagtttggttattgattgaatatgtgtgttaattgagtgtttgttatttgatgattttgagttaggtattggagttgtagtgatgagtagataacgaggtaatagataagtatttaggtaattaaagtttaggttgattaagtggtatgagaaggaaagttgaggaaattttgagagtaatttaaaggggtgtatgttttttttagagttggttaggattaaaaatagtattttggaagtatgatatgtgggttgaaaattagtttggaagggtcgggcgtattgatttacgtttgtaattttagtattttgggaggttgaggtgggtggattatttaggttaagagttcgagattagtttggttaatatggagaaattttatttttattaaaaatataaaattagtcgggcgtggtggcgtatgtttgtaattttagttatttcggagatttaggtaggtgaatcgtttgaatttaggaggtggagtttgcggtgagtcgagatttttttttcgtattttagtttgggtaataagagcgaaatttcgtttaaaaaaaaaaaaaaaaaaaaaaaaagaaaagaaaagaaaaagaaagataaaatgaaaattcgtggttgggcgtagtggtttatttttgtaattttagtattttgggaggtcgaggtgagtgagttatttgaggataggagtttaagattagtttggttaatatggtgaaattttttttttattaaaaatttaaaaaaattagtttagtgttgttgtatatttttgtagttttagttatttgggaggttgaggtaggagaattgtttgaatttgggaggcggaggttgtagtgagttattgttttttagtttgggtgatagagtgagattttgttttaaaaaaaaaaagaaaaaaaaagaaaatagaaaattatcgaggttattattttaattttaagtttgtttttaaatgttattttgtttgggaattttttttttgaattttatatattttttattaggtagaattgttttatttttttatgtgttttaatattttttggtttttaatatattgggtaataatatattatttatttttgttttattttgtttgattgtggattagaaggatttgggattttggtatttatttgtgtatgtatagtgataagggtagtgtttggtatggaatattaagttttttttggatgaacgtataagtgagaaagttttattttttaattttaatagtattttgtttaggtttattaatttttgaagatattatgggaagatgatatttgagttaataaatttagatataaaagttatattaatatgttttttagtatattttgtttatgtaaatattttagttttttgtaaaaagatttttttttttattttttatttttattaaaaaaattatatatgattagaggtgtgatttttagtattttaaatattattgaaagttatttaaggttatgtttataattaaattgaaataaaagagattaaaattttttttgaattttatttgtattgattttgttatggtttagttagttatggtattttaatgattatatggtttagttttaattttaatttaggtatattatttaatttaatgttgtttagatttgtttatgggatttgttataaagtttatgttttttagtgtttttattattttatttttgttattgtaaagatttaagtattattagtttaataatttagtagataatggagtttttttagtttttatatattattaggtatggtttatagtagttagaatgtagtttgttgtatttttaagattatttgttgtagcgaattatgtaaatagtttttaaaagacggaaagagagagaaagatgatagatattaaagttagagatggatttggagatttagagattaatatatatttatttatatataatagtattttagttttgggtttatgtgtgaaattaagtatgttttaaataaggaagataagttttttaaaggtgtaattggataatttttgttatagaaatggttgaattgggatataagtggggataattttagaagaagggtatattttttttttttttgtagtttttttttatttttttaatttttattaaaatgttttatttttaggttttgtaaattttgttagttttaggtaaaattatgttttaggagttttaaatttttttattttatattagtttttatttagtagattttttaatttttttatttattataagtaaaagtttgttgattttaattagttaagaaatttatttgtttggtaaatgatttatgtataaagagaattattaatgttatgaggtaatttattttaattgtttatttagagtatgtagtaagaggaaatttattaagttttaatataataatattttttatttttggatagttcggttaatgaaaaaatggatatagaaagtaataggagagtaaattttgtttttttataggagttttttaggtaggtataaggtattatttttttttatttttagttatttagtggtaggggaagttatagttacggtgtttaggagatgaaattttattgatttaggtatggatttatttagtttaattaatatattgggtatgaggaagttatttgttgtattttttatgtggttttttttttttggagaggaatatttttatttagtttgtaaattggaaatagatttttttatattagaagtttattttttgggtatgagataggagagtttatattgtgtatgtagatttttggtttttgggtttgatatgtgttgagggatatatattttttatatatgtttttataaatatttgataaagtaatttgttttttgattggtttttataatttataagttgtgggatgtttttttgaagatgaaaatagtaatagagttttatttagttatttaaagttatttttttattgtattttgtgtatatgaagttggggtttgttattgataaaatatatttagatatatttttatgttaaaaggattgtgagatgtataggtaaatgtgtttatttttagttttatttgttaatatagatgaatgagaaagaatttgaaagtaatattggattaagaataggaaaatttggtatggattttgttttattttgttttatttaattatttggatagtgtttaggtgtttttggttagttatttggatgttttgagttttagttttttggtgattataatgaagatttgaattataggatggttttgaaaaaataaataaaatttttttttttgtttgtcgagaatgttgtatagggagttatagaatgtttttatgattgaattgtttttaaattttatagt

SEQ ID NO: 682 - DNA, 5929 bp, Artificial Sequence
  chemically treated genomic DNA (Homo sapiens)
attgtgaaatttaaaagtaatttagttatgagaatattttgtaattttttgtgtaatattttcgatagatagaaaggggagttttgtttatttttttaaagttattttgtaatttaaatttttattgtaattattaagaaattaaagtttagagtatttaagtaattgattaagaatatttgaatattatttaagtgattagatgggataaaatggagtaaaatttatgttaaatttttttatttttaatttagtgttatttttaagtttttttttatttatttatgttgataagtaaaattgaaaataaatatatttatttatgtattttataatttttttaatatagaaatgtatttgaatatattttgttagtaataaattttaattttatgtgtatagaatataatgaaggaatggttttgaatagttagatgggattttattattatttttatttttagagaagtattttatagtttatggattataaagattaattaagaagtaggttattttattaagtatttataaaagtatgtgtgaaggatatgtgttttttagtatatgttagatttagaagttagagatttatatatatagtatgaatttttttgttttatatttagaaaatgagtttttaatgtgagaaaatttatttttagtttgtaagttgagtaaaaatgtttttttttagggagagagaattatatggaaagtatagtaagtagtttttttatatttaatatattaattaaattagatggatttatgtttaaattaataaagttttattttttaagtatcgtgattatgattttttttgttattaagtgattgagggtagaaaaaaataatattttgtatttatttggaaggtttttgtgggagagtaagatttgtttttttattattttttgtgtttatttttttattaatcgagttgtttaggaataaagaatattattatattgagatttggtggatttttttttattgtatgttttgaataggtagttgaaatgggttattttatgatattgatgattttttttatatataagttatttgttagatagataagttttttggttgattaagattaataggtttttatttgtgatgaatagaaaaattaagaagtttattaaataaagattaatatgaaataagaaaatttgagatttttggagtataattttgtttgagattagtaggatttatagaatttgaaaatgagatattttagtaggagttgagaaggtgagaaagaattgtagaaaagaaagagatgtgttttttttttggaattgtttttatttgtgttttaatttagttatttttatggtagaagttatttaattgtatttttgaaaagtttgttttttttgtttaaggtatgtttggttttatatatagatttaaaattgaagtgttgttgtatgtgagtgagtatgtgttagtttttaaatttttagatttatttttgattttaatatttattattttttttttttttttcgttttttggaaattgtttatatgattcgttgtagtagatggttttggaaatataataggttgtattttaattgttgtgaattatatttgatagtgtgtaaaagttaagaagattttattgtttgttaaattattagattgatggtgtttagatttttatagtggtaagaatgggatagtgagaatattgagagatatgaattttataataaattttatgagtaaatttaaatagtattggattgagtagtatgtttaaattagaattagggttaaattatgtgattattgaaatattataattagttagattatagtaaaattagtatagataaaatttagagaaggttttaattttttttattttagtttaattataaatataattttgaatggtttttaataatatttaagatattaaaaattatatttttaattatgtgtggtttttttggtgggggtggggggtgaaaaagaaaatttttttgtaggaaattaagatatttgtataaatagagtatattaaaagatatattggtatagtttttgtatttaagtttattaatttaggtgttatttttttatggtgtttttaggaattggtggatttaaataaggtgttattggaattaaggaatagaatttttttatttatacgtttatttaaaaagaatttagtgttttatgttaggtattgtttttattattgtgtatgtatagatgaatgttaaaattttaggtttttttagtttataattaagtagaatagaataaagataaatgatatattattatttaatatgttggaggttagaggatgttggaatatatagaagggtaaaataattttgtttgataggggatatgtagagtttagggaaggaatttttagataaggtaatatttgagagtagatttaaaattaaaatgatagtttcgataattttttattttttttttttttttttttttttttgagatagagttttattttgttatttaggttggagggtaatggtttattgtaattttcgttttttagatttaagtaatttttttgttttagttttttaagtagttgggattataggagtgtgtagtaatattgggttaatttttttgaatttttagtagagaaggggttttattatgttggttaggttggttttgaatttttgtttttaggtgatttatttatttcggttttttaaagtgttgagattataggagtgagttattgcgtttagttacgaatttttattttatttttttttttttttttttttttttttttttttttttttttttttttggacggagtttcgtttttgttgtttaagttggagtgcgggggggggatttcggtttatcgtaaattttattttttggatttaagcgatttatttgtttgagttttcggagtagttgggattataggtatgcgttattacgttcggttgattttgtatttttagtagagatggggtttttttatgttggttaggttggtttcgaatttttgatttaggtgatttatttattttagttttttaaagtgttgggattataggcgtgagttaatgcgttcggtttttttagattgatttttagtttatatgttatatttttaggatgttgtttttagttttggttaattttggaagaagtatgtatttttttgggttgtttttaaaatttttttaatttttttttttatattatttaattagtttgagttttaattgtttggatatttgtttgttatttcgttgtttgtttattattgtaattttagtgtttagtttagaattattagatggtaagtatttagttaatatatatgtttaattagtaattagatttttggtttagtttaaggtagttattttgataaatgatgatggaaaatatttttgtaagtattggagttttttattttaagaattttaagagtatttttgaagagagtaaatatttaattatattaaaatatatttaggtgtaagtgatatttatttgaaatggagaaataagaaaaagttttatatttggttgtatataatagaaaaatatattacgtgtttttatttaaaattttattttgtattaaaatatttgagttaataaatattaattagtatgtgatattaaggatttagaaataaaataatattgtagttatttcgatgataattttgattgttaattatgttaaattttggtttgaggttttattttatttttagtatatttttatggttaattttattattattttatatttatatatggataaatttaaggttatgtaattattaagtggtagattaggattaaaatttatgttaaatttatttagagttttaattttgaaaagaattatatataattgaatatagttgattattttttgtttaaattttatattttacggttagaaatgtagatttaggtaatttttttttttaggtattgggtagttttttttgattttgttagttattgtaagtattttatatttagtaaagtaataagttagtttttagtagagaaagaatttggaaatattttgtatgtaaaaaaaaataaaaaataatagtattttgagattagtttagaggaaaaatttaagaggaagtataggggtaaagataaaattagtttggttgtaattttgcgattattagttattagtagttgattattaggttataaaaaaaataaatttttaaagttaataatatgttaaaaaaaaaaaaaaaaaaagttttgttgattgaaattgttatttttaaaaatttttttttttttttataattttggagattatgaattaattcgaaaagtatgaggagtttttttaatatataagagatttttattgttttagattttagtttaaggtattataggaaatagaaaatttagggaagtgggtttttataggtgtttataaattttttgtttttttagttgtgggtgatggtttattattttggaaagtattgagaattttttagtatagttttggttttttgtttttatagttgaagttattaagttggcgtaaaagtaattgcggtttttgttattgaaaggtaaattagaaatttaggaaagaatatatggaaagtggttttaggttgtattttttattattatgtttttttttttaagtatgtggatgtgtttgaaattgtgtttgatataatatttgatatgtgtttattgaattgttaaagtagggttttgtaagatgatttgagaaatttaagtggtgatatagaagaattatttatgaattgattaataatattgtaatattgtatattatatttattttgggtttttgtgaaaaaagaaaaataaaaaagtttttgttttattttttaattaatgatttagatttagtaaatttgggacgagatgcgtttattaatcggtgtttgtaattagttttaggaggttttgatttaggtaaataaatttatatatttgtggtttaagttttggtaaaataatgttttttggtttaattttgttttttttataagtattttattatgaatgtgtatatatttagagatttaaagaaatattttttaagggtatttttggataattaaatttagtaatgaaaaattgtaagaaaaagggataatagataagaataatagtattatttggttatattttttggtagaaattaatttttaaaaaatttttttttaaaaagtaaaagtaaaagtttaataaattatttttagaaattgtgtagtatattatatagattgttttagtttttaagtataaaataattgtttttagttatatgaatttttaggattatgaattgatgtaataacgaggaagtaaaaagtaatatttgtgaatattagaaattttaaagttttttttattaaacgtttttattatagtgtatgttttttaaaattagtaggattttatgttaaggtatttattatttaaattatatttgggaatgagaattttatagtagattaaatttatgaagaatattttagtggtttttatttgaaaatatttatttgtttttttatttaagaggtgaataaatatattgttattttaaatagttaattatatagaagtatataaaataatattggaatttttaattttaatagtttatatgtttttttttgttgaaataattattaattttgtaaatgttaagtttatataaaattagtaattttgaagtatataatttagtggtatttggtatatatatatgtgtgaaattattatttttatagttttaaaatgtttttattatcgttttaaaggaaaatttatattttttaagtaattttttatttttttttttttttagtttttggtaagtattaagttattttttatt

SEQ ID NO: 683 - DNA, 7302 bp, Artificial Sequence
  chemically treated genomic DNA (Homo sapiens)
aaaagagggggttttaggattatgggtggtagggaggtttttatataaattggtgttgtgggttggtttagtattttaggtagtagttgttcgtgcgaaggtttggagatagtttggtgttttagaattgtgtgaagttaaggtattttgtggagttttggaggaagaggtatgggcgtggttggagagattagttgttaggtttgagtaggtaggatttttgaattttaggatatgggaagttggagttttgggtttagggtagaagggagttatggatggttgtaggtagagagaagatatgggtaggtggttgtcgtttagggaagatatagaggaggggttttagggagattttaaaggaggttgttatgaaggtttggtgggggtgaggattttaaggggagtttttatgggggttggagttgggtaaatagggagtgagtgttttatggggatacggttttagtttgggaagatgagaaagtttcggagacggatggtggtaatggttgtataatagtgtgaatgtgttttatgtttttgaatggtgtatttagaaatggttacgatggtaaattttatgttatgtatattttgttataatgaaaataaaataaagcgtgatttaggaattatgtttttaaagtagcgttttttaattacggtgattttttcggcgattagtggttagagatgtttttaaatatttaataatgtataggatagtattttagcgaggaattattagttttaaagttaatagtgtagggtgggagagatttagttttgaatatatttttttttggaagtttttttggatttgatatatttattgttttttttttttatttttgtattttttttttttttttttcgtaattttaggagaggttaaataggtaggaaagtttagggttgtgtcgggatggggttagagttagggtcgttaggttttatttcgttgggatatagcgttaggttttgttttaggtgtgggggttttgtgattagagtcgcggacgtgttttcgttttgtgtagagtagaggttagggttgggattagagtatcgtggggtgaggggattaagttgtagttgagttggggttacggttagggtcggggttgggatgagagtttagttggagatggttgagggttgttgttgttggatattttaaatttttttttgttgaattttgatttaggttaaacgaggagcgagacgcggttttttttaatatgtagaggattttaaatttgaaagaagaatcgatatttatagatttggggtttatattcgtataattttttgtttttttttcgaagtgagtaagaggcgtattaatatcgtagaggggaagcgggtggggtagtttcgtgattgggtttttggggttttaaagtattttagtgtttgagttgagttttggtaggaatttagtaggtagggggtttttatttttgggaaggatatgatggggtcggtggggttgggttggggtatttgggtttgtagaatttagaaatattaaattttagttgggtatagtgatttatgtttgtaattttagtattttgggaggttgaggtaggaggattatttgagtttaggagtttgagattagtttgggtaatatagtgagattttatcgttattaaaaatttaaaaaattaattaggcgtggtggtgcgtgtttgtggttttagttatttaggaggagaaagtaggaggattttttgaattttaggaggttgaggttgtagtgagtcgagatcgtattattgtattttagtttgggagatagagcgagattttgtttttaaaaaaaaatatggataattttgttgtatagtttaatttagtagtaatggttgttgggtataggaatttgtttgtttgtttgttttttgggatcgtttaggttggagtgtaatggcgtaattttagtttattgtaattttcgttttttaggtttaagtaatttttttgttttagtttttcgagtagttgggattataggtatttggaattatttttggttaatttttgtatttttcggtagagacggggttttattgtgttggttaggttggttttaaatttttgattttaggtgatttattcgttttagttttttaaagtgttgggatgataggtatgagttattacgtttagtcggatatagtttttagtgatttgtgtgtatattaatatatttaatttttattattattttaggaattagatgttttggtgattaatgttgttttatgtgaagtatagagaggttaggtgatttgttaaaggttatatagtattttaatggaagaattaggaatttgaatataggtagtgtgggttaggtatttgtagttttagttattatgttatttagatttttatatattaagattttttggtattttgtttattttttttattttttttaaaatgtgttttttgatttttaatattttttttatttttaattggggaattttaaatttttatttttgggtgggttattttttatgttttttattttagaagatatttttttgtgtttttataatttattttttaattaggagggggttgggttgggttatttattagggttggacgtttttattgtgttagggaggggtttggttgaaatgttttttggattttgtattttagaatagttgggattatgttgttttgtttgttattttggatcgagtgatttttggtgtatgtttgttgagtgaatgattgattttggtggtttgaggttgtttattttgggttttaaaatgttttttttattttgatttggggtaatggtcgaggattaagatggtaaagaagtgagggagggttcgggtgcggtggtttatgtttgtaattttaatatttcgggaagtcgacgtgggtggattatttgagattaggagtttaagattagtttggttaatttggtgaaattttatttttattataaatataaaaaattagttaggtgtagtggcgcgtgtttgtaattttaggtatttgggaggttgaggtaggagaattatttgaattcggggaggtagaggttatggggagttgagattatgttattgtattttagtttggatgatatagtaagattttgttttaaaaaaagaaaaaaaattaaaaaggaagggaaagagttggtcgttgagtattggagaggtggttgggggttgttgagtggatatagggatagtatttgaggttaagttagggtggggttattgggggattagttttgagggtaggtcgggttggggattttaagggggggtttgtcgtggtggttaggtgggagtgaggattttggagggtttgttttggggggtaagataggaggtagagttttagggaaggttgttatgggggtaggatgagagtggggaggttatggaggaggtagttttagggataaggtaaattaggtagggggaattttaagagggggatgttatttggtttagggggaagagggagtagttgtggggatggggagaagtaggttatttttttgagacgagttaggcgcgggtgttgggtgagcggtggggtggaagatcgggaagtgtttggataaggtttggatttgggtcggggtgtttgggtggatggacggattgttttattaatggggatatacgaggagaaggaggaggaagtttgggaataagtttagttgggttatgttgtgaggatatggggatgaagttttagttttaggatggggttgggatggagtttggtgttttttttttgttttttttttttttttttttttttttttttttttgtgagatagagtttagtttttgttgtttaggttggaatgtaatggcgcgatttcggtttatcgtaatttttgtttttcggatttaagcgatttttttgttttagtttttcgagtagttaggattataggtgtttattattatgtttagttaatttttttttttttttttttttttttgtatttttagtagatatagggttttattatgttggttttgaatttttgattttagatgatttatttgtttcggttttttaaagtgttgggattataggcgtgagttattgtgttcggttttttttttttttttttttttttttttttttttttttattttattgtgttgtttaggttgattttgaatttttgggtttaagtgatttatttatttttgtttttttagtagttgggattataggtatgtattattatgttttgttagtttttatagtttttgtagagataacggtttgttatgttgtttaggttggttttgaatttttaggtttaagtgatttttttattttagttttttaaagtgttgggattataggcgtgagttatcgtgtttagttaaaattgtttatatttgatttgaatattattttacgtattttttttttttttcgttttttttttttttttttatttttttttttttttttttttttttttgtttttttttttttttttttttgtttttttttttttttttttttttttttgttgggatttaaatttgggatatttgatttgggagtttatttgtttaattattaagagatataattttatggtggggtgtttgttggtaagtgtcgggtggtaggattttaattttaggtcgtttttttaatttaagaggttttgtttttgtttagagtttttcgtggttttttagggttttttgtgatcggttatagtggtatgatttagtgtgtagtaatagtggtttatattttgacgttattatttattttttttagttttgtgggaatttgttgtttaatatttttagtttttatttaatttttttatttgagaaatggagataataataatacggattttattcgggtgtggggagtattaggagaggttatgcgtgtaatgttattcgggtggtaagtttatatttaggtttatgaaaatagaagttgttagtggttttatttttagaagaaagtgtttttttttttgtttaaatttttgtttttgacggtttttgttaatcgttttggtcgattttaatatattaggaggatagatataggttttaaattttattaagtgagtacgtatttggtgtgttgggggttggttatgggaagtggagattaaagcgtttttggaagaaacgattttgggttgagttttaagggatgattagtaggaggttataattagagaagggaggtggtgggtggtgagggggcgggggtgggggtcgtagtgtggatagaatttcgaggtattcgagtttttgatttggggaagtgaaagtaggttatttggtttgagatgagtttggtgagtgcgttgggtcgattatagagggttttggggagttatggaagattttaggtagaggtaggattttttgggttagaaggacggtttggagttgggattttgttatttagtatttattagtagatattttattatgagattatgtttttagatgattgagtaaatgggtttttagtttaagggtttcgggtttgagttttagttttattattgcgtgatggggataaatgatttatttttttggaattttagttttattgagagaggttttatagaatgaggatagttttttagtattttgttagtaggtttattgagtatttattgtgtgttggtgttttgaatatttttaatttatagatgagtaaattgagttgtttatttaggaagaagttaggattcggatttaggtttgtttagttgtttttttggatagttttagttttaggatggtttttgggttttttttataatgttaaaagggttagtttgagttgtcgttaattagagtttggtcgcgttatattttatttttttgaggtttcgagagaagggatttatttatagttaagtagcgaaagaaggtagttcgtgatttttaggtttgaaggattttaagttttatgttttttagtatatagtagatgttttaaagttagaggatttggtcgggcgtagtggtttacgtttgtaattttagtattttgggaggttgaggagggtagattatttgtggttaggagttcgagattagtttgattaatatggtgaaattttgtttttattaaaatataaaaattagttaggtgtggtggtgggtgtttgtagttttagttatttgggaggttaagataggagaatcgtttgaattcgggaggtggaggttgtagtgagttaagatggtgttattgtattttagtttgggtgatagagcgagattttattttaaaaaataaaaaaataggttatgtatagtggtttacgtttgtaattttagtattttgggaggtcgaggcgggcggattatgaggttaggagtttgagattagtttggttaatatagtgaaaattcgtttttattaaaaatataaaaattatttggttatggtggtacgtgtttatagttttagttattcgggaggttgaggcgggagaatcgtttgaatttaggaggtggaggtggtagtgagtcgagatcgtgtttttgtattttagtttgggtaatagagcgagattttattttaataaataaataaataaataaataaagttagagtattttatagatgttttggggatattggtagaggagaaggttgaggtttgggttatgggtttttagtattttttagtgggacgtggtatagagtagatgttttataaatgtttagaattcgaagatttattgtgcgtagttcggtattaaaaattttaggtatgttgtgattttattggattttattttggttttatgagttgggtgttgttattagtttattttatagaggggaaaattgaggttgagaatggttgaatttttggttgaggttatataggtaaggtaattataataaacgttggtgatatttttagtatagattattaattaatagtataggtgtttttggtattattattttacgaatgaggaaagaagtttttaggttaattaagttatttgttaagattttatgggtgtatttgttgtgtagtttaagtgtgatgggttttggagtgttttatttttgattttaggttgttatttttttatattagttgtgtttttttgttaattacgttagtgagtttagattgtagattaaataaaattagtaaatggtttttgagtgttattaagttttagatgttattttgtgttggtaattaggatttgatggtttattttaattattattaaattttaaattagt

SEQ ID NO: 684 - DNA, 7302 bp, Artificial Sequence
  chemically treated genomic DNA (Homo sapiens)
gttgatttgggatttaatgatggttagggtgagttattaaattttagttattagtataggatagtatttgggatttggtggtatttaggggttatttgttgattttgtttagtttataatttggatttattagcgtggttagtagggagatatagttggtgtggagagatagtagtttgagattagaagtggggtattttagagtttattatatttgagttatatagtaggtgtatttatgagattttgataaatggtttaattaatttggaaatttttttttttattcgtaaaatgatgatattaagaatatttatattgttggttggtgatttgtgttaaaaatattattagcgtttattataattgttttgtttgtgtgattttagttaaggatttaattatttttagttttagtttttttttttgtaaaatgggttgatgatagtatttaatttatgaggttaagataggatttaatgagattatagtatatttgaggtttttggtgtcgggttgcgtatagtgggttttcggattttaaatatttatgaaatatttattttgtgttacgttttattgagaaatgttaagagtttataatttaggttttagtttttttttttgttaatgtttttagggtatttgtaaagtgttttgattttatttatttatttatttatttattgaaatggagtttcgttttgttgtttaggttggagtgtaggggtacgatttcggtttattgttatttttattttttgggtttaagcgattttttcgttttagtttttcgagtagttgggattataggtacgtgttattatgattagataatttttgtatttttagtagagacgggtttttattatgttggttaggttagttttaaatttttgattttatgattcgttcgtttcggttttttaaagtgttgggattataggcgtgagttattgtgtatggtttatttttttattttttgagatggagtttcgttttgttatttaggttagagtgtaatggtattattttggtttattgtaatttttatttttcgggtttaagcgatttttttgttttagttttttaagtagttgggattataggtatttattattatatttggttaatttttgtattttagtagagatagggttttattatattgattaggttggtttcgaatttttgattataggtgatttgttttttttagttttttaaagtgttaggattataggcgtgagttattgcgttcgattaagttttttgattttaaagtatttattatgtgttgaggagtatgggatttggggttttttaggtttggaggttacgggttattttttttcgttgtttgattataggtaagttttttttttcggagttttagggaggtggggtgtggcgcggttaggttttgattagcggtagtttaagttggtttttttgatattgtgagaggaatttagagattattttgggattggaattgtttagggaggtagttggatagatttgagttcgagttttggtttttttttggatgagtagtttagtttgtttatttgtaaattgggagtatttaaagtattagtatatagtaggtgtttagtaaatttattggtaggatgttgggggattgtttttattttgtggggttttttttagtggaattgaggttttaagagggtaagttatttgtttttattacgtagtggtgggattggaatttaaattcgggatttttgagttgggagtttatttgtttaattatttggagatataattttatggtggggtgtttattggtaagtgttgggtggtaggattttaattttaggtcgtttttttaatttaagaggttttgtttttgtttagagttttttatggttttttagggttttttatgatcggtttagcgtatttattaagtttattttagattagatggtttgtttttatttttttaaattagggattcgaatgtttcgagattttgtttatattgcggtttttattttcgtttttttattatttattattttttttttttggttgtgattttttgttggttattttttgaggtttagtttaaggtcgttttttttaagggcgttttgatttttattttttatggttaatttttaatatattagatacgtatttatttagtggagtttggagtttgtgtttgtttttttagtgtgttggggtcgattagagcgattggtagggatcgttagagatagaggtttaagtaggaagagagatatttttttttgaaagtagagttattgatagtttttatttttatagatttaaatatgggtttgttattcggataatattatacgtatggttttttttggtgttttttatattcgggtgaagttcgtgttattattatttttattttttaggtaagagaattgggtgagaattagagatgttaagtagtaagtttttatagggttgaaggaggtgagtggtagcgttaagatgtgaattattgttattgtatattgaattatattattatggtcgattatagagggttttggggagttacggaaggttttaggtagaggtagggttttttgggttagaaggacggtttggagttgggattttgttattcggtatttattagtagatattttattatgagattatgttttttgatgattgagtaaataggtttttaggttaaatgttttaggtttgagttttagtaagaaaaaagggaagaggagagagaggtagaggaaggggaaaaaaaagatagaaggaaggagagggagaaggaggagtaggagggaaggagggaagcggggggaaagaaagatacgtgagataatatttaggttaaatatggatagttttggttgggtacggtggtttacgtttgtaattttagtattttgggaggttgaggtgggaggattatttaagtttgggagtttaagattagtttggataatatagtaagtcgttgtttttataaaaattataaaaattagtagggtatggtggtgtatgtttgtgattttagttattggggaggtagaggtgagtggattatttgagtttaggagtttaagattagtttgggtaatatagtgagatgaaagaaagaaagagagagagaaagagagagagagagatcgggtatagtggtttacgtttgtaattttagtattttgggaggtcgaggtaggtggattatttgaggttaggagtttaaggttaatatggtgaaattttgtatttattgaaaatataaaaaaaaaaaaaaaaaaaaaaaaattagttgggtatggtggtgggtatttgtaattttagttattcgggaggttgaggtaggagaatcgtttgaattcgggaggtagaggttgcggtgagtcgagatcgcgttattgtattttagtttgggtaataaaagttaaattttgttttataaaaaaaaaaaagaaaagaaaaaagaaagaaaaatagaaaagaaatattaaattttattttagttttattttggaattaagattttatttttatgtttttataatatggtttagttggatttatttttaagttttttttttttttttttcgtgtgtttttattggtgggatagttcgtttatttatttagatatttcggtttaggtttaggttttgtttaagtatttttcgattttttattttatcgtttatttagtattcgcgtttggttcgttttaaaaaaataatttgtttttttttatttttatagttgtttttttttttttttggattaggtgatattttttttttagggttttttttgtttggtttgttttgtttttgggattgttttttttatggtttttttatttttattttgtttttatgatagttttttttggggttttattttttgttttgttttttaaaatagattttttagggtttttatttttatttggttattacggtagatttttttttaggatttttaattcgatttgtttttaagattaattttttagtgattttattttggtttggttttaaatgttgtttttatgtttatttagtagtttttagttatttttttaatgtttagcggttaattttttttttttttttttgattttttttttttttttgagatagagttttgttgtgttatttaggttggagtatagtggtatgattttagttttttataatttttgttttttcggatttaagtgatttttttgttttagttttttaagtatttgggattataggtacgcgttattatatttggttaattttttgtatttgtagtagagatggggttttattaagttgattaggttggttttgaatttttggttttaagtgatttatttacgtcggtttttcgaagtgttgggattataggtatgagttatcgtattcggatttttttttatttttttattattttggttttcggttattattttagattaaggtggaggggatattttgggatttaaaatgaatagttttagattattagagttagttatttatttaataggtatgtattaagggttattcggtttagggtgatagataaggtagtatggttttagttgttttggagtgtagggtttaggggatattttagttaggtttttttttgatatagtgggaacgtttagttttagtggatggtttagtttagtttttttttggttgggaggtgggttgtaggggtataggggggtgttttttggagtgagagatatgggaggtagtttatttaggagtggggatttggagttttttagttgagagtggggagggtgttaaggattaggggatatattttgggaaggatgaggagggtgggtaaagtgttaaggggttttagtatatagaagtttaggtggtatagtggttagggttgtagatgtttgatttatattatttgtgtttaaatttttggtttttttattgaagtgttgtgtgatttttggtaagttatttaatttttttgtgttttatataaggtagtattgattattaaagtatttaatttttagggtggtggtgaaaattagatgtgttaatatgtatataagttattaagaattgtgttcggttgggcgtggtggtttatatttgttattttaatattttgggaggttgaggcgagtagattatttgaggttaggagtttgagattagtttggttaatatagtgaaatttcgtttttatcgaaaagtgtaaaaattagttagaagtggttttaggtgtttgtaattttagttattcgggaggttgaggtaggagaattgtttgaatttgggaggcggaagttgtagtgagttgagattgcgttattgtattttagtttgggcgattttaaaaaataaataaataaataaatttttgtgtttagtaattattgttattaaattaaattatataataaaattgtttatatttttttttagagatagggtttcgttttgttttttaggttggagtgtagtggtgcgatttcggtttattgtagttttaattttttgaggtttaagagatttttttattttttttttttgagtagttgggattataggtacgtattattacgtttggttaattttttaaatttttggtagcgatggggttttattatgttgtttaggttggttttaaatttttgggtttaagtgatttttttgttttagttttttaaagtgttgggattataggtatgagttattgtgtttagttggaatttggtgtttttgagttttataagtttaggtgttttagtttaattttatcggttttattatgttttttttaggggtgaaagttttttgtttgttgggtttttgttaagatttagtttaaatattaggatgttttggggttttaaggatttagttacgggattgttttattcgttttttttttgcggtattaatacgttttttgtttatttcgggggaaaaatagaaaattgtgcggatgtgggttttagatttgtgggtgtcggttttttttttagatttgggattttttgtatgttgggggaggtcgcgtttcgtttttcgtttgatttaggttagaatttaataggaaggagtttagggtgtttagtaataataatttttaattatttttagttgagtttttattttagtttcggttttgatcgtaattttagtttaattataatttgatttttttattttacgatgttttgattttagttttaatttttgttttgtataggacggaggtacgttcgcggttttaattatagaatttttatatttgggatagggtttggcgttgtgttttaacgagatggagtttggcgattttgattttaattttatttcgatatagttttgggtttttttatttgtttaattttttttggggttacgaaggggagaaggaaagggtgtaggggtggggaggaagggtagtaggtgtgttaaatttaggggggtttttaggaggaggtgtgtttaaagttgggttttttttattttgtattgttgattttgggattgatgatttttcgttgggatgttgttttgtgtattgttggatgtttagaagtatttttggttattagtcgtcgaaagagttatcgtggttgagaagcgttgttttgaaaatatgatttttagattacgttttattttgtttttattgtggtaaaatatatataatataaaatttattatcgtagttatttttaagtgtattatttaggagtatgaaatatatttatattgttgtgtaattattattattattcgttttcggaatttttttatttttttaaattgaaatcgtgtttttatgaaatatttattttttatttatttaattttagtttttatgagagttttttttagggtttttatttttattagatttttatgatagttttttttagggtttttttgaaattttttttttgtgttttttttgaacggtaattatttgtttatattttttttttgtttataattatttatggtttttttttgttttgggtttaaagttttagttttttatgttttggagtttaagggttttgtttgtttaggtttggtagttggtttttttagttacgtttatatttttttttttaagattttatagagtgttttaattttatatagttttgaaatattaggttgtttttaagttttcgtacgggtagttgttgtttaaagtgttgagttaatttatagtattaatttgtatggaagtttttttgttatttatagttttaaggttttttttttt

SEQ ID NO: 685 - DNA, 5427 bp, Artificial Sequence
  chemically treated genomic DNA (Homo sapiens)
atgagttttagttattttggtttttttagatttagttttgtttttttaattttgggattttattgggatttgtttgagtttttttgtattatagtttggagatttttttaatgtagtaggtgaggtaattgtagggtttatttttttttttttttattttttaggggtgattgttttttgttgtttgatgtttatagttttaaaaaaatattgttttatgtattttgttgttttgtttaattttgtttagtttaattttgttttaggtgagaggataaatttagtttttgttattttattttggttggaaatttggtatattattaataatatttttgttgttaatttgggttgtgggtttataaatgtttatttttttattttgtattattaattatatatatatatatattatatatttttttatttgcgtaaaatattagttaatttttttaagttttaaaagaaagtgaagagttttggggcggaataagggtaaagaagtaggaagagtttgtggttaattttttaatttacgtatttttttgatttttttattttttttatttagagttttttattttagttagttttttcgtttttgttattatgattttgaaggtgtttttttgatatattaagatggttaaggaaaaatggtgttgggttaggtgatagggaagattatgagtttttatattttatgatttgataagttattgtagttttttatatttatatattaagtgagggttttttagaatagcgttttagtgtttgtatttgatttatattattaggtagttaaaagttggggaatgagtttatgtgaagagtttttttattttagatgatagttatttttaggaatataagttatataaatgttttaattttttttttatttttttttttttgttgttgtgatataggaagaaaattaaaatggagtgattttgttatttggggaaagatgaaaattgtatatgtaaaagtaaatagattgagatttataacgagttgattttttaaaagtttaggaaagaattttaagggtatataggaaaataagtaaagggtttgatagatatatttatgataatataagaaggtgaagtcgggaagaggaaatggataaggttattttaaattgaaataatttataaaagataaattataatatttttagaaattaattgtaaatatttttataaaattatagatgataattttttaaaataaaagattgagtagtaagaataattaagaataaaaaattaatgagtttttagtggaaatttaaaattgaattattgggggattttttataatgaatggtagttgaagaaaaaaatcgggtaaattttatatgaatatttgagaaatattttaagtattagtaattatataaaagttatatattttatttgtttaagagttgttataatagtatataaaatatattaagtaaaattgtattatagataattatttatatgtaattttttatttaaaatttagtagatatatttgaatagtttttaaaatatatgattattaaagaaggaattgagtaggaaataaagtattattgttttttatttataaagagatgaaaataaaataaattattggttaattttttatgagatttaaattattttagtatttatttgtttgtttttgagatagggttttgttttgttatttaggttatagtgtagtgatataattatagcgtattgtagttttaattttttagatttaagtaatttttttgttttagttttttaagtagttgggattataggtatgaattattatgtttagttaattttttttatttttagtagagataggattttattatattatttaggttagttttaaatttttgggtttaagtaatttatatattttggttttttaaagtgttgggattataggtatgagttattgtatttagtttattttattttttaaaaaaaatatattaaataattgtttataaattattttttatagtagagagtaattttttttaaaattggtaaataagattttgtatttatttttgagaaaattgtatttgtaaagtgattttaaaagaatgaagtttatgagtatgatggtattataaaagtattagtggttaggcgtagtggtttatgtttgtaattttagtattttgggaggttgaggtaggcggattataaggttaagagattgagattattttggttaatatggtaaaatttcgtttttattagagatataaaaattaattgggtatggtggtgtgtatttgtgattttagttattgggtaggttgaggtaggagaattgtttgaatttgggaggtggaggttgtagtgagttaagatcgtgttattgtattttagtttgggtgatagagcgagattttattttaaaaaaaaaaaaagtattaatatatggaaatataaatgttatatatagatgtaaatttttttaattgtttttttgagtattatgatttttttttatgaatttttattttaagttttagggtatatgcgcgggatgtgtagtttgattatataggtaaacgtgtgttatagtgatttgttgtatagattaatttattatttaggtattaagtaaagtatttattagtttttttatttgatatttttttttttttaattttattcgattggttatagtatgtgttgtttttttattatgtgttcgtgtttttttatcgtttagtttttatttataagtgagaatagagtattatgatttttattgtttattaaatgttagaagattattttgtttttgttattatgtttgttttatttttttagttttttttatatgaatttaaatttatattaatggttatttttttaatatttggaaataataatatttattagaaagaaagtattttatttttttaggttatagattttatattttttttatataataattttaatttttttatgttattttgattaatgaaatgattttatttattttttaaagaagtagttattttattataaagtaggaatcgtaaggtatggggtgggtattgttttattttattagtgagtacgtaaaggaaataaaattgtttgattttgaattttgtttttattttttataattttggataaattattgatttttttttttattaagtttattatttgtaaaatggagatattagtgtttatttatggattattgtgaggtttaaataagaaaatatgtattaagtatatttgtttggtatgtaataagtattttaaaatttatgtagtgatgaggataatgattatagataatttgatagtattttatttaaaggaaaaaatgcgtattttttttgagtaagtattattgattttaggaatgtgttttaaggaaaaaataagttaaatgtttaaaggtagttataagattattttggtagtaagtagttttttttattggttatatagtaaaaaattagaaataatttatatgtttatgaagagaagttggtgaaataaattatggtatatgtatatagtagaaaattttggagataaaatagtaaaatagttatagatataggttttgaatataaattttaataagttgaggtttttttcgtttttttagaatattttgagtttttttcggttttttttttttgttttttatttgtgttagttagtttttgttcgtatagtaatttttaaattttagtagtatataaaggtaagtatttagtttttatttataagtttgtagggtaggtgaggtagttttgttttaagttataatgtttaggatagttttgtttcgtattgtggttgattagttaaaaaatgtttttgttttagtaattataggagaataagagggtgagagataatgtgtgaagttttttaagtgttaagtttgaaattagtattatgttatttttatttatatttcgttggttaatgaaagttttatgatgagttatagttaagagttagagatatatttttatgaggttgtggagagagtgtagatttagggagcggtgagaaattggggttagtatattaatttatagtatgatttgttattattttttattttttgttagtaagattgttaaagtttttttgtatttattgaatttatttagttttttttagttttttttttttagtttttatttagtttttatttagtttttttttttttttattataatatttaaaaatttttttatggggttataattttgttttaggagttattttagtttggtggtatagagttttttatttgtattttgaaattttttttttgaagatattgttatttatgtgtatgagttattttttttttttatagtatttatattaaataattaattattttggatttagttaaaataaatattttaaatttatgatgttttttaggaagagagtttgtttttttttttaattaaaatgggagattgattttgtttgtgttttttagaggagtagaggttggtttgtattagggtagtttttgtagatgagtaattttttttatggttttatagaggttgatatagaaatttttggatttaaatgattgtttggaggtattagttaggtattgaattaattataaagagtgaggttttgttatattttaatcgtaagaaatagaaacggtagagggtaaaaatagaatagaatgttaatataattttagttttttttttggattttgagagtttataatttgaaaattagagatttaaattgggagagatgggttaataggtatgagtatgggaaaagtatgttttaagaatttgagatgtattttttagaaaagtaatatgatgaaaatggttagaaaaggtaatttttttttttttttttaatttggttttggagttattagtagaatttttttaatattttgtatgttatagattttattgtttttattagtttggagataatatgtggtttttgataattttgtttttttggggtaagttggatttagaggggatagttagaagggtataggttgtggttgttgtgagttaagagttttgtttttttgtggtaattttgggtagaatttatgagtatgaagtaatttgtatttgtgtttttatggtttattagagtttattttatgaaaaggatgggaagggtaattttgaggtagtattaagtttggacgtatcgtagtgaagtttttttgataattatttgtagtttgtttagttttgttagtattggattttgagaaagagaaatagaaatttaagagatttgagttgattttttagagtttatattaattttgtttttttaatttttttttttttattattttttttggattaattgatatttttattttttgattttttgtagt

SEQ ID NO: 686 - DNA, 5427 bp, Artificial Sequence
  chemically treated genomic DNA (Homo sapiens)
attgtaagagattagagaataaagatattagttggtttaaggaaaataatgaggaagagagaattggggagatagaattaatgtagattttgagggattaatttagattttttgagtttttattttttttttttaaaatttagtattaatagaattgaataagttataggtggttattaaggaaattttattgcggtgcgtttaggtttaatgttattttagggttgttttttttattttttttataaaataagttttaataaattatggaagtatagatataagttgttttatatttatgagttttatttagagttattataggaagataaaatttttgatttataatagttatagtttgtatttttttaattgttttttttgagtttaatttattttaaaggagtagagttgttaagaattatatgttgtttttaagttggtgggagtagtgaaatttgtaatatgtaagatattgaagaggttttgttggtggttttagagttaaattagaaaagaggaaggaaattgttttttttgattatttttattatgttgtttttttgggaaatatattttaaatttttgaaatatgttttttttatgtttatatttgttagtttattttttttagtttgaatttttgatttttaggttatgaatttttagaatttagggaaaaggttaaagttgtattgatattttattttatttttattttttatcgtttttgttttttacggttagaatatggtaaaattttattttttataattggtttaatgtttggttaatgtttttaaataattatttgaatttagaagtttttatattagtttttatgaggttatgggaaaagttatttatttataagagttgttttaatataaattagtttttgtttttttaggggatatagataggattaattttttattttggttaaaaaagaaaataaattttttttttgaaagatattatgaatttggagtgtttattttggttaaatttaaggtaattaattgtttaatgtggatgttatggagaagaaaaataatttatgtatatggatagtaatatttttaagaaaagagttttagagtataagtggggagttttgtgttattaaattgaggtggtttttgagatagagttgtaattttataaaaagatttttaggtattgtggtaagagagaaagagagttaaatggaaattaaatgagagttaaaaaaagagagttaaagagagttaaatgaatttaatgagtgtagagagattttggtaattttattagtagagaatgaaaaatgatgataaattatgttgtaagttggtgtattggttttagttttttatcgttttttgaatttatattttttttatagttttatgagggtatgtttttgatttttgattgtggtttattatgagatttttattggttagcgaaatgtgaatggaaatgatatggtgttaattttaaatttagtatttaggaagttttatatattattttttatttttttgtttttttgtgattgttgagataagaatattttttagttagttagttatagtgcgaaatagagttgttttagatattgtggtttgaggtagagttgttttatttgttttgtaaatttgtaagtgagaattaaatgtttatttttatatgttattgagatttgaggattgttatacgagtaagagttgattgatataaatgaaaagtaaggaagaaaggtcgggaagaatttagggtgttttgaagagacgagagaagttttagtttgttaaaatttatatttaaagtttatatttgtaattattttattattttgtttttaaagttttttattgtatgtatgtattataatttattttattaatttttttttatgaatatgtaggttatttttaattttttattgtgtgattagtaaaaaagattgtttattattaaaatagttttgtgattatttttaaatatttgatttattttttttttaggatatatttttagaattagtagtgtttatttaaaggaaatgcgtatttttttttttggataagatgttattagattgtttatgattattatttttattattgtataaattttagagtgtttattatatgttagataaatatgtttgatatatgtttttttatttaagttttataataatttatgagtagatattagtatttttattttataaatgataaatttagtgaaagaggaaattagtaatttgtttaaggttgtaaaaaatagaagtaggatttaaaattagatagttttattttttttacgtatttattgatggagtagaatagtgtttattttatgttttgcgatttttgttttgtagtaaaatagttatttttttgaaaaataagtgaaattattttattgattaggataatatgagggaattaggattgttgtgtaagaggaatgtaagatttatagtttggaaggataaaatattttttttttaataagtattgttgtttttaaatgttgaggaaatagttattgatgtaggtttaaatttatgtaagaagagttagaaaaatggggtaaatatagtaataaaagtagagtagttttttagtatttgatggataatgaaaattatgatgttttgtttttatttataagtgggagttgaacgatgagaagatacggatatatggtgggggaataatatatattgtggttagtcgggtggggttgggggagggagaatgttaggtagaagagttaataaatgttttgtttaatatttaggtgatgggttgatttgtgtagtaaattattatggtatacgtttatttatgtaattaaattgtatatttcgcgtatgtattttggaatttaaaataaaaatttatggaaaaaaattatgatgtttagaagaataattaggagaatttatatttatatatgatatttgtatttttatatattaatattttttttttttttgagatggagtttcgttttgttatttaggttggagtgtagtggtacgattttggtttattgtaatttttattttttaggtttaagtaatttttttgttttagtttgtttagtagttgggattataggtgtatattattatgtttagttaatttttgtatttttagtagagacggggttttattatgttggttaagatggttttaattttttgattttgtgattcgtttgttttagttttttaaagtgttgggattataggtatgagttattgcgtttggttattgatatttttataatgttattatatttataggttttatttttttaaaattattttataaatataatttttttaaaggtagatgtaaaattttatttgttaattttaagaaaaattgttttttattatagaaaatgatttatgaataattatttgatatgttttttttaaaagatgagataggttgggtgtagtggtttatgtttgtaattttaatattttgggaggttaaggtgtgtggattgtttgagtttaggaatttgaaattgatttgggtaatatagtgagattttgtttttattaaaaataaaaagaattagttgggtatggtagtttatgtttgtggttttagttatttgggaggttgaggtaggaggattgtttgagtttgggaggttaaggttgtagtgcgttgtgattgtgttattgtattgtagtttgagtgatagagtaagattttgttttaaaaataaataaataaatgttaagataatttaaattttataaagaattgattaataatttattttatttttatttttttatgagtaaaaaatagtaatgttttattttttatttaattttttttttgatgattatgtgttttagaaattatttaaatgtatttgttaaattttaagtaaagaattgtatataagtaattgtttatagtataattttgtttaatatgttttgtatattgttgtaatagtttttggataggtgaaatgtataatttttatgtagttgttaatgtttgaggtgttttttaaatatttatataaagtttattcgatttttttttttaattgttatttattatagaaagttttttagtggtttaattttaagtttttattaggaatttattaattttttatttttagttatttttattatttaattttttattttaaaaaattattatttatgattttataggaatgtttatagttaatttttggagatattataatttattttttataagttattttaatttgggatgattttgtttatttttttttttcgattttatttttttgtgttgttatgaatatgtttattaagttttttgtttatttttttatgtgtttttgagatttttttttaagtttttaagggattaattcgttataaattttagtttgtttgtttttgtatatgtagtttttatttttttttagatagtaaggttattttattttgattttttttttgtattatagtagtaagaggaaaaggatgggaaaagggttaaaatatttatgtagtttgtgtttttaaaaatagttattatttgaaatggaaaaattttttatatgagtttattttttagtttttaattgtttaatagtgtgagttaggtgtagatattgaagcgttattttgaaagatttttatttagtatataaatgtgagaggttatagtggtttgttagattataaagtatgaaagtttatgattttttttgttatttaatttagtattatttttttttgattattttggtgtgttagaaaggtatttttagagttatggtgataaggacgggggagttggttgagatggagggttttaggtagaagaggtagaggggttagaaaggtacgtgagttaagaggttggttatagattttttttatttttttgtttttgtttcgttttagggttttttatttttttttagaatttaaaaaagttgattaatattttacgtaaatgaaaaaatgtgtaatatatatgtgtatatggttaatgatgtaaaataagaaaatgaatatttataaatttataatttaaattaataataagaatattattaatgatatattagatttttagttaagatggagtagtagagattgaatttatttttttatttgaaataaaattaaattaaataaaattaaataaaataataaaatatatgaaataatgtttttttgaaattgtggatattaggtaataaaagatagttatttttgagagatagggaagaaaaaagatgagttttgtaattgttttatttattgtattgagagggtttttaggttgtggtataggggaatttaggtaggttttagtggagttttagaattgaggagatagagttgagtttggagagattaaggtggttagaatttat

SEQ ID NO: 687 - DNA, 4172 bp, Artificial Sequence
  chemically treated genomic DNA (Homo sapiens)
aaaaataagtatagttattagtgttaaaaaagtgtgtttatttttaaatggtagcgtgtgtattaagagttaagaaagtatacgtggagttagtttaaatgttagttattttttatttgtttaattttagtgtttttgtaggaaatattagtttagttagttgtgtgtttgtgtttggagagagaaagatatacgttttataatatttatagtgtttgttgtatattttgtttgatggagtttttgttttataaaggaattttcgtttttgaagagagtataatttgtattttttataggggttttattgagattttttttggttgtagaggtttgtattataatttgtttatagttatttttaggttttttagttttttatggatggatagcggttgggtttaggtgagagtaagtttttaattggattataggttttttttatagtagagtttgatatttaaagagtcgtttgtttattagttaaaggttttttttataggatagtaattttattatattacgtggaggtataaagagttttgttattttttacggataatttggtagtttttggtattagtaggattattgttgttattgtttagaggtatgttggttattttttagttattaaattaagttttttatttaggtagtttattggttgttgagatgatttttaggtttgatttaaaatttttagtgttattttttttttttttaatatataaagattgaaggttttttttatgggaaggttgagggttggtgttttaagtaaggtttgtttttgttggttaaaggttttttgaattttaggttttaaggttaggaaatgagttttagttagttgagttttttttatgaggtgttattaggggtgagttattttattatatttaggtatttatagtttgtaaaattttgttatgtattaaaattatattagttgtttgagggttttaggaagggggaaggaagaaatgggtttaattttttttatttataatgttatggtttttttagataatagtaaatttaggtattttattgaggtttggtaaagttgtattttggattttgaaattttatattttttgttagttaggaaattaagaagagtttgtgtgtttttatgagaagtttttttagttggggtatagagtaggatgttatatatatattgtgagattttgatttgaggatgagaaaatttagataggttttttgatagtgtttttttaaataagtgaggattatattgaaatttttgaggtagtattatttatgttaattaggttgtttggttagaatttagaagataaataggtattgagagttaggatataatggtatatagtaaaaaggtaatttttagatttaggattgtgaattatttagtttttttatgtatttgagttagtaaggtataggaattagagattattggatgaattgggattatggtttattaatgaggtagaggttttgaattattttttattttttattgggtttttgtatttttaatattggggtgttgtaggtgtttttatagggtttgaggaggttttgtatttttaggttattaataatggtttatagtttttttttagtttttgattttagaagatattgtttttggttaggaaaataagtaggatttttatggttgatttggatcggtttagtggttaaagttcgattttattttttttttagttgtttatatttttgtattaatattagtttttattaggggaagataaagagttttttttggggttataaggatgttggtggttatgtgaattaaattgtttttatttagtaaaggagtgggatttttaggtataattaggaagatatgtgtaaataataggtttttttaattgtaagtaatgggttgagaaaaaattaggttagaattttttttgagatgtttattatggttatgttatgggaagatgggaggtttgtattggaaaggagaagagagagagatttattttttatcgtggagtgtatcgtgtacgttttgatttttaggaggtttagtttatgggtatgataattagtattttttatggcgagcgagattttttgtgtattaatagtggttttttacgtgttgtgggaaatatttttttttaggtagtgggaatgagtattttttttaggtaaaatattattttttaaatataggggtgttattatttttttataggtttatttataaaagagtagtataaagatagtaattaaattattttatattttgtgatatttgtgttattattttgagtattttatataattaatttatgtgatattattttatttttaaaataattttataaggtagttattattttattttattaaatttataaaaataataatttttttatttaataaaattttttattttatttattttttaattaattttatagagatgagatttttttttgttgtttaggatggttttgatttgtttatattattttttaattttgatttttttttttatacgttataatattttaatgaatatttttgttgatttttttttttatatttaagtgtttttattggatgtattttttgaaatggaatttttaggtgataaggtttataaattttaaatgtttaatagatagtgtttaaattttttttaaaaatgtttgttaatttataattttattatttgtgttttatttttgaaagatataaatatgtgtgtaaattaattgtttcgtatgggtagttttttataatttttgtaatggaaaatatagagggaaaattatttgtagttttagtgggagaaaaggttttcgttttaagaaaagaaaattttagtaggagaaaatattgtgaaaaataaggtaattttttattttaagtttttgttttatgggtataaaaaatagttggatattattttttttttaggttttttttttttttttttcgttaggttgtattgttggttatttttggtttttgttggaagtaaattgttttaatgtttttggataagattttaattaggaattatttttttttttttttttttttttttttttttgagacggagtttcgttttttcgtttaagttggagtatagtggcgttatttgggtttattgtaagttttgtttttcgggtttacgttatttttttgttttagtttttcgagtagttgggattatttgttatcgcgttcggttaaattttttttgtattattagtagagacggggttttatcgtgttagttaggatggtttcgattttttgatttcgtgatttattcgttttggttttttaaagtgttgagattataggcgtgagttatcgcgttcggtcgattaggaattattttaaatagaaaaagaatattttaaggaggggtatatcggttagtagaatagtaattttttttcggggtttttataaggatataagttggtgtgtaatagatttatttataaagtagatttaatttttaattggaattgtttttgattggttagtagaaatagaattgaggattgacgatagttgtataagaagatgaaattatttttttttttttttttaagtttgttttttaaaatttattggacgttggtatagtgttgggatgattatggagatttaaatgttttagaatgtatgttttagaaatttgtggttgttttaattattgatagttttgttgttgttgggtgagtgagggttattttgaaatggggtaattttagatatttttattgtttggattttaggtattagtgtggtaaggagtaggtttgggttttggaagtaggggatagattgaaagaggagagaggattttgaatttttaagtgttttaatggtttttaaggttagaatttagaggtagttttatagtttttggaaagtttattttgtattaaatatttatgtgtattttgtagttatgaggaggaataggaaatgagataaaggggatatatgaagtgaatatttttataaaagattaattggaaataggattttgagatgggttttggagaaggaagagtttaagtttatttttttagtattttatatacgtagttaaatttgaagtcgtgtttttttgttcgacgttgatttattttttttttttttatagt

SEQ ID NO: 688 - DNA, 4172 bp, Artificial Sequence
  chemically treated genomic DNA (Homo sapiens)
gttgtaaaagagaagagagtggattaacgtcgagtaggagaatacggttttaaatttagttgcgtatgtgaaatgttggggaggtgagtttgggtttttttttttttaggatttattttaagattttgtttttagttgattttttataaaagtatttattttatatgttttttttattttattttttgtttttttttatgattataaagtatatatgaatgtttggtgtagaatggattttttagggattatgaaattatttttgagttttgattttaggaattattggaatatttaagaatttagggttttttttttttttttaatttattttttgtttttagggtttaggtttgttttttattatattggtatttggagtttaggtagtaggagtgtttgaaattgttttattttagaatgatttttatttatttagtagtagtaaaattgttaatggttgaagtagttataggtttttgggatatatattttgagatatttgggtttttatagttattttagtattgtgttaacgtttagtgggttttaagagataagtttagaaaagaggaaggaaatggttttatttttttgtgtagttgtcgttagtttttaattttgtttttgttaattaattaggaataattttagttaggagttgagtttgttttatagataagtttattatatattagtttgtgtttttgtgaaaatttcggggaggggttattgttttgttggtcggtatatttttttttagagtattttttttttgtttaagataatttttggtcggtcgggcgcggtggtttacgtttgtaattttagtattttgggaggttaaggcgggtggattacgaggttaggagatcgagattattttggttaatacggtgaaatttcgtttttattaataatataaaaaaaatttagtcgggcgcggtggtagatagttttagttattcgggaggttgaggtaggagaatggcgtgaattcgggaggtagagtttgtagtgagtttagatagcgttattgtattttagtttgggcgaaagagcgagatttcgttttaaaaaaaaaaaaaaaaaaaaaaaaaaaaagataatttttggttaaaattttatttaaaggtattagagtagtttgtttttaataggagttaaaaatgattagtaatgtagtttgacggagaagaggggagaagagtttgggaagaagataatgtttagttattttttatatttataggatagaaatttaaagtagaaaattattttgttttttataatatttttttttattgaaattttttttttttgaaacgggaatttttttttttattgaaattgtaagtagttttttttttatgttttttattatagaaattgtaaggaattatttatgcggagtagttgatttgtatatatatttatattttttaaaaatggaatataaataatggggttataaattggtaaatatttttgaaggggatttaggtattatttattaaatatttgaaatttgtaagttttattatttaaaaattttattttaaaaaatatatttaatagaaatatttaggtgtgaaaaaaaaaattaataagaatatttattggagtattgtagcgtataaggaaaaaagttaagattagaaaataatatagatagattaagattattttgggtaatagagagaaattttatttttataaaattaattaaaaagtaaataaaatgggggattttattaaataaaaaaattattatttttgtaaatttaataaaataaaatagtaattgttttatagagttgttttgaaggtgaaataatgttatataaattaattgtgtaaagtatttagaataataatataaatattataaaatgtgaaataatttaattattatttttatgttatttttttatggatgggtttgtgagaaaatagtgatatttttgtatttagagggtggtattttatttgaaaagggtgtttatttttattgtttaaagaagaatgttttttatagtacgtggagagttattgttggtgtatagggaatttcgttcgttatagagggtgttagttattatgtttatagattggattttttgagagttaaggcgtatacgatgtattttacggtgggaagtaagtttttttttttttttttttttaatataggttttttatttttttatagtatgattatgatgggtattttaggaaagattttaatttaatttttttttagtttattatttgtagttaaggggatttattatttatatatgtttttttaattgtgtttgaaagttttatttttttattaggtagagataatttagtttatatggttattagtatttttatagttttagaagaaattttttgtttttttttggtggaagttaatattaatatagaagtatgggtaattgaaggaagaataaggtcgagttttaattattaggtcggtttagattaattataaggattttatttatttttttaattagagataatattttttaaagttagaagttaggaaagggttataagttattattaataatttgaaaatgtaggatttttttaaattttgtaaaagtatttgtaatattttaatattaggagtataaaaatttaatggggaatggagagtagtttaggatttttgttttattaataggttatagttttaatttatttagtggtttttaatttttatgttttgttaatttaaatatatgagggaattaaatggtttatagttttagatttaaaggttgtttttttgttgtatattattatattttaatttttaatatttgtttgttttttaagttttggttaaataatttagttaatatggatggtgttgttttaggaattttaatatagtttttatttgtttggaaaggtattattaaaggatttgtttgagtttttttatttttaggttagggttttataatatgtatatgatattttgttttgtgttttaattgaagaagttttttatgaagatatataaattttttttaattttttagttgataaaggatatgaggttttaaaatttaaggtgtagttttgttaaattttagtgaagtatttaggtttattgttgtttgaagggattatagtattatgggtagaaaggattgaatttattttttttttttttttttttaagatttttaagtaattaatatgattttggtatatgataggattttgtagattatggatatttgggtatggtgagatagtttatttttgataatattttataaaagaaatttagttggttaaaatttattttttgattttggaatttgaagtttaaaaggtttttaattagtaaaaataagttttatttaaggtattagtttttagtttttttatagggagggtttttaatttttatatattagaaaggaagggaatggtattgggaattttaagttaagtttaaagattattttaataattagtgggttatttgagtaagaaatttgatttggtagttaaaggatggttagtatgtttttgagtagtagtagtagtggttttattggtattagaggttattaaattattcgtgggaaatggtagaattttttatatttttacgtaatgtagtaggattgttgttttataggggaaatttttggttaatggatagacggttttttaaatattaggttttgttgtaagaagggtttataatttagttaaaaatttgtttttatttaaatttagtcgttgtttatttataggaaattgggaaatttaaagataattgtgagtaagttgtggtatagatttttgtagttagggaggattttagtgaaatttttatagaagatatagattgtattttttttaaggacggaagtttttttgtggagtaagaattttattaggtaggatatgtagtaggtattataaatattatggaacgtgtgtttttttttttttaggtataagtatataattagttaaattgatattttttataagagtattagaattaaataagtgaaaggtagttaatatttaaattgattttacgtatgtttttttagtttttaatgtatacgttgttatttggaaataaatatatttttttaatattaatggttgtatttattttt

SEQ ID NO: 689 - DNA, 12007 bp, Artificial Sequence
  chemically treated genomic DNA (Homo sapiens)
ttttgaattaagggagattggaagattttagaagtaaggtttttttgatatttttttgtttttttgttttttattttttttttttttttgaagtaagttatagaaattaaaattttttttttttaaagtaagtcgtaaaatttagaaatgttatttttttttttttttttggttgaagtgatttatttattttggttttttaaagtgttcggattataggtgtgagttattatttttggtcgggtatttgtatttttaatgggttgttagagatgatgatgttttaatataaagatttgaattttttgaggaggtgtggttgatgtttagatttggttgaggtttttttaattagagtttttattagttaattattttttttgtttgtttttttggtgtttgttttttttgttaggttttttttttttttggggttggtagttgattgtagtgtttggttgttttagtttgtggggaagtggttataaggaggaaattgtagagaggattgataaaaataattatagggatttattgagtttgtggttaggatattaagaggaagagaaataaaatttaattaagtagaataaaaagaaaggagtatattttgaattaagaggttggaaattgagagtatgtaaaattggaattatttgagtttataatattaatttgtttttttaaagtgggtttataaatattagttttaattggaagtagagattagatttttttagttttttaatgataataatgattaagattaaatttatatggtaggttttgtgtttagtattatttatggatttttttatttaatttttatgttataaggtgagtattaatgtaatttttattttatagatgagataatagagtttataaagtatgaataggttaggtacggtggtttatatttgtaattttagcgttttgggaggtcgaggtgggtagattatttgaggttaggagtttaaggttagtttggttaatatggtgaaatttcgtttttattaaaaatataaaattagttgggcgtggtggtatatgtttgtaattttagttattcgggaggtagaggttggagaatcgtttgaatttaggaggtggaggttgtagtgagttgagatcgtgttattgtattttattttgggtgatagagtaagattttgttaaaagaaaaaaaaaaggataaataagatatttaagattgtatagttgataagagataagatgaggtttttgatttgggtttgtttttaagtatttttattatgggtttttatgatttttgagttatttatatttttttttttattagaatatatattttatataaaatcgttttttttaaagaatttttttttttttttttttttagagaaaagttttgttttgttgtttaggttagagtgtagtgatatgattttagtttattgcgatttttgtttttcgggtttaagcgatttttgtgttttagttttttaattagttgggattaaaggtatgcgttattacgtttagttaatttttattttttatagagatagggttttattatgttggttaggttgtttttgaatttttgattttaagtgatttgtttatttaggttttttatagtgttgggattataggtgtgagttattgggtttcgtttaagaatttttttttttgattgatatattttagttttaataaatagtgtgtttttttattttaattattttgttttagaaatatttttttgtattttgtgtttttttttttttagtcgtgatgggaaaaagagatttatttttgttttgatttagtgtttttggaaatgttttatttgattttgtgtttattttttttaataagttatttaaaagatattgtttggtttttttgttttagttaaatgtttagtagtggaatttggattttgagataatttagggaagtagtatgtgtattgtgtaggattttttgattatttttaaatcgtggtatagagaaaattatataagtaaagttgtaaataaatgaggttgtttatagttaggggtaattggttttatttggttatttttaggtttgagagttatttattagttttgtgtgttggttatttatataaggtatgtaggtggtttttgtatattgtttgtgaagtttatttagtgttgtagaaaatttaagtttttagcgttaggtagatttggttttatattttgattttattatttattaattatgtagttttggataaattattttaatttttttgaatttaagttttttatgtgtaaatgagggtgataatatttattttttgggattgttgaaaattagaaataatgtgagtttagtgttttttttatagtaataatgtgaaaggaaaataaaaatttaggattttaatatattgtgttaaaagaaaaaataaattaaattgaaagttgagtcgtgtaagatattgatttttcgttggattttaagtagatagttatagagaaaagattaaaaattttcgtagatggttaggtgtgttggtttatgtttgtaattttagcgttttgtgaggttaaggtgggtggattatttgaggttaggagtttaagattaggttgtttaatatggtaaaattttagttttattaaaaatataaaaaaaaaaaaaaaaaaaagaaagaaagaaattagtagggcgtggtggtagatgtttgtaattttagttgtttgggaggaggaagtaggagaatcgtttgaattcgggaggcggaggttgtagtgaatcgaggttatatttttgtattttcgtttgggcgatagagtgagattttggtaagaaagaaagtaaagtaaagtaaagtaaaaagaaagagagattttggtaagtaagaaagaaagaaaaagaaagagaaagaaagaaaggaagaaagaaagaaagaaggaaggaaggaagaaaggaaagaaagaaagaaagaaagaaagaaagaaagaaagaaagaaagaaagaaagaaagaaagaaaggaaggaagtaagaaaggaagaaagagagagaaagaaagaaaggaaaaattttataggttattcgtttttattttattttatatgaagtgttaatttatcgagagtaagatagtatataatcgattatttttttatttgttattttttttttataatacgtggattattatatttttttttttttttttttagtttgttttttttttaaatattgaaatttttaaatttatttttggagaaagttatagattatatattgtttttgtgattttgtgttgtttttttttaggtatgtttttaattttggtaaaataaatttttaaattaattgttatttgttttagatatttttggttttatagtaagaatttatatgtttatatagtaattattaattttggttttttagtgtgttatttatatattgtatgtttttgtttttaatgatatttataaagtattgatgttagtttattgttattatattgttagttaaaaaaaaaattaatttttaatttaaaaattagataagagttggagatggatttgggggtagaacgggggtagtagtaaaagtacgcgttagagtgggtggggttgtcgaaggtttttgaagattatagagtgtgataataaggttttatagtgttatttttttaagtattaaagtattatagtttgttttttgagaaggtatttgggaaagagtttttagaaaggggttttaggagagattttagagaaattcgtgttttgtagatgttgagggtgaataaatggtaatgaggatgatgatagaacgtaagaaaagagaattagtatttatcggatatttacgatgtattaagtattttgttaatttttatatttttttttattttttaaaaatttgtagtattgtggtttttagttaggggtaatttattttttggggaatatttgttaatatttgggggtatatttgtttttataattgggagtgttattggtatttaataggtagagtttaggagtgttgcggaatattttataatgtttagggaaggtttttataagaataatttggtttataatgtttatagtgtttaggttgagaaatcgtgtttaaatggtaggtataataatttttatttttatagattggaatttgatattttgagaagttatttggtatttaattcgaaatttaatatagttttaaagtttatgtttttttattatgtcgttgtagtgagaatagggatggaaatgagggtggtaaaaatgattaagatataaaattagggtatagattggtgtttaatagatatttattgggatatttattaaatagaagaatgaataagaaaaagaatgaatgagggtaggggaataatgaggatgagtgtggttattttattgttattttgatatatttttttgtttttgttttataatttagtagtgagtttgggattatgataatagagaaaattaaatgatggtaggtggtttggagtttttatgtttaattttaagaagtatttagattttagggtttgggtttttaaatggaagtagaagtattagaagattgttggtgtacgttgttttgtattatttttttttaggaggatagagattgaaataggaggttttgagttgagttttggtgattattttttttttttttttagaggtttaggttagttgtggttttagaggaagaagaagggagttgtttttttagtttttaaaatttttgtgaatttgaatatgggttatattagatttattttgggaagttttgaattttttaggagggaaagattgagaggaaagagggtggaaagggaggagtttgtgataaaatagaatattttttttttatttttttttttagattttagaatttgtttgttttttagggtagaattcgttaagttttgagagaaggttgtgattgttgtgttttgggcgttagttcgttttagggagtgatgggaattttgttatttttatttgtttttgttattgagagtgattgggttgattgtaagtttttttagttttggggttatatgtttttgtggatagttgtgttatttttgggtgagttagggtttttaggagggagagaggaacgggaattttagttggggataattttgggtaaggatgaggggtggtatgggaagatcgttaggatatttaggggagggaaggtaggttggtgaagatgaaaatttgatgattttgttggttttggaaagttatttaatgtggtagagtttagggtttttttagtgttttttatttaattttattgaatatttagatttttgatgttttgttgttttttatattagaattcgttttgagaaaagtttagtaatttatatttgaatgataaatgaatggttagagtgtttgttttttttgaaatttatgttttataaaagattaaattttaggtaggagggttagtgttgtttcgggtaaggggtagggaggaagttgtaagatgtatttttgggaggaggtggtagtggttattttttgtgtttttgaaattattttgtgtagtagaagtttattgtttttatgtgtaagaatatttttttaggtagaagtatagggagatttgggttatttagggaaaagggattttgagaatataaaaatttgggtaagtttggagttatttgttgtgggattagagaaattatgtatgttgtttttgattatatagattatgatggggaagtattgtatttgattagtaagagagatagggtttttggttaaaatggagggtttttttttaattatgtttttagttgttggataggggacgacgattgattttgttgagtggtttgaaaagtttaggggaggttaagtaggggagatttattgttaggattatttttttaagtttagtttttggggtttttatttttatattttagaggaaagtatattgttatttagttaagttgtgtgatgtgattattagtgaaacgtgattagttttgggggttttcggtttttggttgttaatgtaggatgatattgggttataggagaaagaggtaaggaagatagagtatttttttatgaataggatggaatggattaaagtagaagagaaagtaaagtgaattattttatttgttatgtggggaagtttaggtttagagaggtgatgtgtttttttattatttgggtaagatttttgggaaagatttttggtatttttttttatttgttttttattaagttattaaagatttattttattttttttatttttattggggttgttatatttacgtttttattatttgataatttaatttttatagtattttttgatggggttttgattgattttgtttttttttttttgtatttatgttgtttattaaggttacggtatttttaggtttagttatggttgtgttagtgtatttaataaatgtttttcgtgttgttttattgtttattgtaaaaattttaattttgttttgtatattgtgttttttattgtattttatatgaatttttttttatagttaggtagtatgtatattgtattttttgtttttattatttttgtttttgttgattttttaaattttatgtgtaggtattgttttaggatttggagatttattagtgaatatgattgatagtttttttgatcggaaatacgaggttaataaatttattgtgaagtaataagtatatcgggtgggaggatatttggtatttattattatttattaattgtggaatggatatataattggtgattttttttttttttttttattttttttttttttttttttcgttttttttttttttttttatttttttttttattatatcgttttttttgttaattttatatatttaggtttttagttattatttttatgttaataatttttaaatttattttttttgtttgtttttgttaagtataattttatatttttattgttggttggatatttttaaaatgattttttagtttaaaaataaagtatatttaaaatgtaatttattattttttttttataaacgtttttttttttttaatatttgtatttgcgtaagcgtagttattttttttttagttatttaatttaaattatttttatagtttattaaatgttaatttttttttgttatttaaattttttttgtatttgtttttttttttttattttttattgttagtataattttgggtttttttattttttatttagatttaattagtgaatgatttttagagtaatggtatattaaattaatatggttattgttttttttgaatttatattttattgagggatataaacggtaagtaaataaataagaaggtataagtataaatggaaaagggttatgaagatgtaaacggggtattgtgataagattagttgtggggaagagaagagagtagtttattttaaataggatgttatgtaaagagttttttgagggggtgatatttaagttgagatttttaatatggtaaggatttagttatttggtgattaaggacgtattttagggtagagggattggtatatagaaaatttttaaatttgaagaatgttaggaaggttagtgttaatgaggtttaatgagtaggtgaaaagggatttgagttgaggttggagaaggaagtacggatttaatttgatagggtttgtaggttatttttattttattttaagattaaagaaaggtaattgaaggtttgtaagttggggagtgatattatttgatttcgtttttttttttttttttaaggaattagtttttttatggaaaatggattgtagggtgattataagaagtgaggggataaattaagatatgggaaaaagttgatggtgatttaaattgagtagtgtttataaagggggtgaagagaagttagtgggtgtaagatttaagttggaagtaggattaataagattttttggtgtggaagggattggattttgggagatagagaggttaaaagatggtttgtaggtttttggtttatgtagttgggtggataacgaagatatatattgatatggggaagacggagagaaatagaatgtgtttatttgttatgataatatgaagttattggtgattttgataagaaaagttttagtggattgttgagggtcgagtttaaattgtagagaattagatagtgaatgagaggagaagaaattaggatagtttatgtaagaaaaataatggagaaatttagttttgaaagggatgagataggttaggtatagtggtttatgtttgtaattttaatatttggagaggtcgaggtgggtggattatttaaggttaggagtttaagattagtttggttaatatggtgaaatattatttttattaaaaatataaaaattagtcggatgtggtggtaatataaaagttagtcgggcgtggtggtgtatgtttgtaattttagttgtttgggaagttgaggtaggagaattgtttgaatttgggaggcggaggtcgtagtgtattgagatggtgtcgttgtattttagtttgggtgaagtaaataataataataataaaaatcgagagaaatggggtagtagttggaattatatgtggtgttaaggaaaagtttttttttgttttttgtttttaatggaagatattgaaataaatttattattgatgggaagatttagttaagagagaaattggtgatgtagaggagaaagtgaataatagaaagggaaatttttgagaggattaaagggaatgggatttagagtatttgttttgagattgattatagataggaggagagatgttttttttagtgaaatgcgaggaaggagaagataggtagagatgtagaaaagattggtagatttagtcgggggacgatgtgagattttttgtgtaattttttttgttttttttgtgaaatatgaggaaaggtattagttaaaaatgagagaggattggaggtagagggtgggatgagaaagtttggggaatgaggaaaagatgagtgttattatttagagtagtagagtaaattttttggaaaaaagtgttataatggtagtttagtgtttttttaaatgcggtgatcgtatttttattgcgttaatagtttgtttttttgtgtggtaattttaataatacgtagttgagtaagtaaaggtatggcgaatataggtgtatttggtagagatagagaaaggtaacgaagttaaggggatttgtaaggaggtaattataatgatgttttattgaatttaagttagatgggggagggtgggaggtaaaggtaaatatgtgtttaaggataggtagtggtaagatggatgttttggggtttttgataaggttaaagattattttggtggttgtatttgagtagagaaagtttatttttaaagaaagaaagtttattgatgatgagtagtttagggaatgaagaggttagttgtttgatgggttatttatatattttggattattatagttattttttttttttttttttttttttttttttgattttatttttttattataattagttttttttttaattaagttttttggtatttgttttgttttaatttatttgatattgtatttttagttttaatttgaaaattttaagtgattttttattgtatattgaattaaggagtgaatttataaaaaaaaatttaaatttatttgaaatttattatgtgttatgtagtatattaaatgttttttttggattattttatttaattttaataattattttatgaggtagatattgttgttattatttttatttataagtaaggaaattgaagtagagaaaagttaagtaatttgtgaaaggttatttagtagtagcggagttagtatttaaatttagtatgtgtttttttttattgttatattatttggtattaggagttttttagagtatgatttttattttgtttttttgttttgttttttattattggaagtgtttgaggagagattagaaattaagtagaagttgggttgtaatttgttgggaatgttgttaagtatttgttgtttttttttatggaatatttttttttttttagttaaaattttattagttttggaaggtttttgatgaatttgaaaggttttattttttttataggatttttttttttatgaattttaattttttttaaatatagagttttgggattttttttttttttgaatttttatagtattttatttaaatttttttaatgttattttttttatattagattatatatgtgtttatttttatcgttagatttttgtttttagtggaagaagggatttaacgttttttttttttaggtgaatttagtatgtattgtagggtagtaggaagttaatgtaggtttgttgattaattttggatgtaaaggaaggaagtgattggtttaagtatatatttcgagatattggagtatcgggattagaatttagttttgtaaattttgaagttaatattttttttatattgttttttttttattttttggttttgattttattttttttcgtatttttgtttttgaaaatatatatgtatttggaagttttttgatttttttttagtttagatgtaagagaaaatttttatttatggatagatggatatatatatatatatatatatatatatatatagagttttgatttatttaaggatttagttttgtttttttatttaataatagtatttataaatttttatttattttagtttatattttgtttttattacggaagttttttttttaatttagtggtatttttttatttttgtatgaagttatagatttagtgtttttttgtagtttttttttttttttattagatatttttaatagtaaaaatttggaagatttaaatgttaagtaaaagagttgttaaataaattataggatagttaaatagtaggatatagtgtagttatttaaaatgataatatgggcggggaacggtggtttatatttgtaattttagaattttgggaggttgaggtgggtagattatttgaggttaggagttttagattagtttggttaatatggtgaaattttttttttattaaaaatataaaatttagttgggtgtggtggcgcgggtttgtaattttagtttttgggaggttgaggtaggtgaattatttgaatttgggaggcggaggttgtagtgagttaagatcgcgttattgtattttagtttgggtgatagagtgagattttgtttttttataaaataaaataaaataaaataaaataaaataaaataaaataaaatgataatatagaaatagatttattttttagaatttgtattgtttagtgaagaattaggttaaagaatagtttttagagtatatttttatttatatttatgtatgtttgtatgtgaatagcgtgtgtttgtgtgtgattatagaaagaaatttaataggatgtatgttaaggtgataatattttgtttttgcgtattttttatttttttgtagtgattatggattatttgtgtaatttttatttttttttaataaaagaataaattttgtttttaggataaattttggtaaaattatttatattgatgtataaattatatgtaaagtttaatagagatttttttttagaggtatatttattttaattagttaagaggggtaagttaaaggaaaatgttataaaataggtggaagagggtgttatatatttttattttatttttgtatgttattgggagtttttagtttttttaaaagtgtagtttatttaggtagttttaggggatatggttacgagggttgtgttgtaggtgaagggcgttttgggtttgggtagtttttgggttaaagtgggtaggtgttagtttagatattttattgtgggttgatttttgttttttgttttatagt

SEQ ID NO: 690 - DNA, 12007 bp, Artificial Sequence
  chemically treated genomic DNA (Homo sapiens)
gttgtaagatagaaagtaaagattagtttatagtggagtgtttgaattgatatttgtttattttggtttagagattgtttaggtttagagcgttttttatttatagtatagttttcgtggttatattttttgggattgtttggatgagttgtatttttaaaaggattgagaatttttagtaatatataaaaatgaaataaaagtatataatatttttttttatttgttttgtggtatttttttttggtttattttttttgattgattaaaataaatatgtttttggaaagaggtttttgttgggttttatatatgatttatgtattagtataaataattttgttagagtttattttgagagtaagatttgtttttttgttgggagggggtagaaattgtataggtaatttatgattattatagaaaaatagaaaatacgtaggagtaaaatattattattttggtatatattttgttggatttttttttgtgattatatatagatatacgttgtttatatatagatatatataagtgtaaatgaggatatattttaaaaattgttttttaatttgattttttattgagtaatgtaagttttagaagatgaatttgtttttatgttgttattttattttattttattttattttattttattttattttattttgtggggggatagggttttattttgttatttaggttggagtgtaataacgcgattttggtttattgtaattttcgttttttaggtttaagtgatttatttgttttagttttttaagagttgggattataggttcgcgttattatatttagttaagttttgtatttttagtagagaaggggttttattatgttggttaggttggtttggaatttttgattttaagtgatttatttattttagttttttaaaattttgggattataggtgtgagttatcgtttttcgtttatgttgttattttaaatggttatattatattttattatttggttgttttgtgatttatttaataatttttttgtttggtatttaggttttttagatttttgttattagaaatatttgataaaaggaagaagagattgtaaaagggtattagatttgtgattttatgtaggggtagggggatgttattgggttaagaaaagagttttcgtagtggaggtaaagtgtgggttagggtagataaagatttgtgggtgttgttattgggtaaagaagtaaagttgggtttttaggtgaattagagttttgtgtgtgtgtgtgtgtgtatgtgtgtgtgtgtttatttgtttatgggtgaaggtttttttttgtatttgggttgagagaaagttaagaagtttttaagtgtatgtatatttttagggataaaagtacggaaggaaatggaattagaattaagaggtaaaaagggagtaatgtggagaaagtgttggttttaaagtttatagaattggattttggtttcgatgttttaatatttcgaaatatatatttggattaattattttttttttttgtatttaaaattaattaataaatttgtattggttttttattgttttgtaatgtatgttgagtttatttaagggaaaagaacgttaagtttttttttttattgaaggtaagaatttaacggtggagataagtatatgtgtaatttgatgtaaaagagatgatattagaggaatttggataaaatgttatggaggtttagagaaagaaaagattttagggttttgtgtttgggagggattggggtttataaggaggggaattttatggagaagatgggattttttaggtttattaaggattttttaggattgataggattttggttgagagggaaaaggtattttatgggaaggagtagtaagtatttggtaatatttttagtaagttgtagtttaatttttatttgatttttggtttttttttaagtatttttaataatgagggataaagtaggaaagtaaagtagaagttatattttggagggtttttagtgttaggtggtgtggtagtgggggaaagtatatattgagtttaaatgttgatttcgttattgttaagtgattttttataaattatttaatttttttttgttttagtttttttgtttgtaaatgaagataatgatagtagtatttattttatagggtggttgttaggattaaatgagataatttagagaaggtatttagtgtgttatatgatatatggtgaattttaaataaatttaagtttttttttataagtttattttttggtttagtatatagtgggaagttatttagaatttttaaattggggttgaaagtgtagtgttaaatagattggaatagggtaaatgttaaagagtttaattaagaaagaaattaattgtgatggaagaatgaggttagagaaaaagaaaaagaaaaaaaaaagagatgattgtagtgatttagaatatgtggataatttattaaataattggtttttttattttttgaattgtttattattagtaaattttttttttttggagatgaattttttttgtttaagtatagttattagaataatttttgattttattaagaattttaaagtatttattttattattgtttatttttgagtatatgtttgtttttattttttatttttttttatttagtttgaatttaatgaggtattattataattatttttttgtaaatttttttaatttcgttgtttttttttatttttattaaatgtatttgtattcgttatgtttttatttgtttagttgcgtgttattgaaattattatataagaaggtaaattgttgacgtagtaaaagtgcgattatcgtatttaaaaggatattgaattgttattgtggtatttttttttaagaaatttgttttgttattttgagtagtgatatttattttttttttattttttaagtttttttattttattttttgtttttagtttttttttatttttagttgatgtttttttttatattttatagagaaaataaaagaggttatatagaagattttatatcgtttttcgattaaatttattagttttttttgtatttttatttgtttttttttttttcgtattttattggagaaagtatttttttttttgtttatggttagttttaaagtaagtattttggattttattttttttaatttttttaaagatttttttttttgttatttatttttttttttgtattattagttttttttttagttggatttttttattaatggtaaatttattttagtattttttattaaaaataaaaaataaaaaaaaatttttttttgatattatatataattttagttattgttttatttttttcggtttttgttgttgttgttgtttgttttatttaggttggagtgtagcggtattattttagtgtattacgattttcgttttttagatttaagtaatttttttgttttagttttttaagtagttgggattataggtatgtattattacgttcggttaatttttgtattattattatattcggttaatttttgtatttttagtagagatggtgttttattatgttggttaagttggttttgaatttttgattttaagtgatttatttatttcggtttttttaagtgttgggattataggtatgagttattgtgtttggtttgttttattttttttaaaattaaatttttttattgttttttttatataggttgttttgattttttttttttttatttattgtttaattttttgtaatttggattcggtttttagtagtttattaaaattttttttgttaaaattattaatggttttatgttgttatagtaagtggatatattttgttttttttcgttttttttatgttaatatgtattttcgttatttatttagttatataggttagaaatttgtaagttattttttaatttttttgttttttaaaatttagttttttttatattaggaagttttgttgattttgtttttaatttagattttgtatttattaatttttttttattttttttatagatattatttagtttaagttattattagtttttttttatattttaatttgtttttttattttttatggttattttataatttattttttataaagaagttagttttttaaaaaaaaaaaaaaaaacgaaattagatgatattattttttaatttataagtttttagttgtttttttttggttttaaaataaaatggaaatggtttgtaagttttattaaattgggttcgtgtttttttttttagttttagtttagatttttttttatttatttattgagttttattaatattggtttttttggtattttttaaatttggggattttttgtatgttaatttttttattttgaaatgcgtttttgattattaaatggttgaatttttattatgttgaaagttttagtttaaatgttatttttttagaaaattttttatataatattttgtttaaagtgggttgttttttttttttttttataattaattttattatagtatttcgtttatatttttatagtttttttttatttgtatttatgtttttttgtttgtttatttatcgtttatattttttagtagaatataaatttaaagagagtagtagttatattaatttgatgtgttattgttttggaaattatttattggttgaatttaggtgggagataagagagtttaaagttgtattgataataggaggtgaagaagaggaaatagatgtagaagaaatttaagtggtagagagaagttggtatttaatagattgtgggggtgatttaagttggataattaggaaaagggtggttgcgtttacgtaaatataaatgttaggaggaagagaacgtttgtaaggaggagatgataagttgtattttgaatatgttttgtttttgagttggagaattattttagaggtgtttaattagtagtggaaatataaaattatatttgatagaagtaagtaagagaaataggtttaggagttattgatatagaagtggtagttaaaaatttgagtatgtaggattggtaagggggacggtgtagtgggagagagagtaaaaaagaagaggaagagcgagagaaaaaaaaggaaaagatgaggaaaggagagagaagttattaattatgtatttattttatagttaataaatagtagtaaatattaaatatttttttattcggtgtatttattgttttataataagtttattgatttcgtattttcggttaggaaggttgttagttatgtttattgataagtttttaagttttagaatagtgtttgtatatagaatttggagagttagtaggagtaaaggtggtaaaaatagaaagtgtagtgtatatattgtttggttgtagaagaagatttatgtggggtgtaatggagaatatagtgtgtagggtagaattagagtttttgtagtgggtaatggagtagtacggaaggtatttattaaatgtattgatatagttatagttggatttgaagatgtcgtggttttggtgggtagtatggatgtaggggaggggagataggattaattaagattttattagagggtgttataaaaattgagttattaagtgatgaagacgtaaatgtggtagttttaataagaatggaaaaaatggggtaaatttttgatgatttagtaaaaggtaaatgggaaaaaatattaaagattttttttaggagttttgtttaggtggtagagaagtatattatttttttaggtttgaatttttttatatgataaatgaggtagtttattttatttttttttttattttaatttattttattttatttatgggggaatattttgttttttttattttttttttttgtagtttagtattattttgtattgatagttaagagtcgagggtttttagagttgattacgttttattagtaattatattatataatttggttgagtggtaatatgtttttttttagaatgtgagggtggaagttttaggaattgagtttggagagatagttttggtagtaagttttttttatttggttttttttaggttttttaaattatttagtaaaattagtcgtcgttttttatttaatagttgagaatatggttagaaaagagttttttattttggttaaagattttgttttttttgttgattagatgtagtatttttttattatggtttgtgtggttaaaagtagtatgtatgatttttttggttttataatagatgattttagatttatttaggtttttgtatttttagagttttttttttttggataatttagatttttttgtgtttttgtttaggggaatatttttatatatgaagataataggtttttgttatataaagtggttttaggggtatagagaatggttattgttatttttttttaaaaatgtattttataattttttttttattttttattcgaggtagtattggtttttttgtttaagatttggttttttgtgaagtataaattttaaagaaggtaaatattttggttatttatttattatttaagtataggttattagattttttttagagcgggttttgatgtggaaagtaatagaatattaagagtttgggtgtttagtaagattgggtgaaagatattgaaaaaattttgaattttgttatattggatgattttttaaagttagtagagttattaggtttttatttttattagtttgtttttttttttttgggtgttttgacggtttttttatgttattttttatttttgtttagggttatttttaattgaggttttcgttttttttttttttttgggggttttgatttatttaggaatagtatagttgtttatagaagtatatgattttaaggttggggggatttgtagttagtttagttatttttagtggtaaggataggtaagaatgataggatttttattattttttggagcgagttggcgtttagagtatagtagttatagtttttttttaaagtttggcggattttattttagagggtaaataaattttggagtttgaaaggggaagtgaaaaagaaatgttttgttttattataggtttttttttttttattttttttttttttagttttttttttttagaagatttagagttttttagaataaatttggtgtagtttatgtttaaatttatagaaattttagaaattagggaaataattttttttttttttttttgaggttatagttggtttgggtttttgggagaaagagggaaatggttattaaaatttagtttagaattttttgttttagtttttatttttttgagaaagggtgatgtaggatagcgtgtattagtaattttttagtatttttatttttatttggagatttaggttttggaatttggatgttttttgaaattgagtatggggattttaggttatttattattatttaattttttttattgttataattttagatttattgttgagttgtggaataaggataaggaggtatgttaggatggtaatagaatgattatatttatttttattatttttttgtttttatttatttttttttttatttatttttttatttaatgaatattttaataagtatttattgagtattaatttgtgttttggttttgtattttggttatttttgttatttttatttttatttttgtttttattgtaacggtatggtgaaagagtatgggttttggagttgtgttaggtttcgggttgaatgttaggtggttttttagagtgttaggttttaatttgtaaaagtgaagattattgtgtttattatttaagtacggttttttagtttgagtattatggatattgtgggttaaattatttttgtgaggattttttttgagtattgtaggatgtttcgtagtatttttgggttttatttgttagatgttagtggtatttttagttgtgaaaataaatatgtttttagatattagtaagtgttttttaggggatgaattgtttttggttgagaattatagtattataggtttttggaaagtaaaagagaatatgagggttagtaaagtgtttggtatatcgtgggtgttcggtgaatgttagttttttttttttgcgttttgttattatttttattattatttgtttatttttaatatttgtaaaatacgagtttttttggaattttttttggggtttttttttggggatttttttttaaatgtttttttaggaagtaggttgtaatattttaatatttaaggaaatgatattgtaaaattttgttattatattttgtggtttttagaaattttcgatagttttatttattttgacgcgtgtttttattattgttttcgttttatttttagatttatttttagtttttatttaatttttaggttaaaaattagttttttttttaattggtaatgtgataataatgagttggtattaatattttataaatattattagaaataaaggtatataatatataggtaatatattaagaaattaaaattaatagttattatgtaagtatgtgaatttttattgtaaaattaagggtatttgagataggtggtaattaatttagaagtttattttgttaaggttaaggatatgtttggaagaaaataatatagaattatagaaatagtatgtggtttgtgattttttttaaagatgaatttgagggttttaatatttagaggaaaagtaggttggaggggaaagaggaagagtatggtaatttacgtgttgtaagggaaaagtagtaggtaggggaatagtcgattatgtattgttttgttttcggtaaattggtattttatgtaagataaggtagaaacgagtaatttgtggagtttttttttttttttttttttttttttttttttttttttgtttttttttttttttttttttttttttttttttttttttttttttttttttttttttttttttttttttttttttttttttttttttttttttttttttttttttttttttttttttttttttttttttttttttttttttttatttgttagagtttttttttttttttattttattttattttatttttttttttgttagagttttattttgtcgtttaggcgggagtgtagaggtgtgatttcggtttattgtaattttcgtttttcgggtttaagcgatttttttgttttttttttttaagtagttggaattataagtatttgttattacgttttgttaattttttttttttttttttttttttttttttttgtatttttagtagaattgaggttttgttatgttggatagtttggttttgaatttttgattttaagtgatttatttattttggttttataaagcgttgggattataggtatgagttaatatatttggttatttacggagatttttaattttttttttgtagttatttgtttaggatttaacggaaagttagtattttgtacgatttagtttttagtttaatttgtttttttttttggtatagtgtattggaattttgagtttttattttttttttatattattattatggaggaggtattagatttatattatttttaatttttaataattttagaagataagtattattatttttatttgtatatgaagaatttagatttagagaagttaaaatgatttgtttaaagttatatggttaataagtggtggagttagaatatgaaattaagtttgtttgacgttaaagatttaggttttttataatattaaatgagttttataaatagtatgtagggattatttatatgttttgtatgagtaattagtatatagaattaatgagtggtttttaggtttaggaatagttaggtagggttagttgtttttggttgtaagtagttttatttgtttataattttatttgtgtggttttttttgtgttacgatttaaaaatgattaggaagttttatatagtgtatatgttatttttttgaattgttttaggatttaaattttattattagatatttgattgagataaaagaattagataatattttttagatgatttattaaaggagatagatatagagttaggtagggtatttttaaggatattaaattaaaatagaaatgagttttttttttttattacggttgggaaagggaaagtataaaatataaggagatatttttaaaataaaatggttaaaatagaggggtatattatttattaaaattgaaatatgttagttagaaaggaaaatttttgggcggggtttagtggtttatatttgtaattttagtattgtgggaggtttaggtgggtagattatttgaagttaggagtttaagagtagtttggttaatatggtgaaattttgtttttataaaaaataaaaattagttgggcgtggtggcgtatgtttttagttttagttaattgggaggttgaggtataagaatcgtttgaattcgggaggtagaagtcgtagtgagttgagattatgttattgtattttagtttgggtaatagagtaagatttttttttaaggaagaaaagaaaggagaattttttgaaagggacgattttatataaaatgtgtattttggtaaggggaaaagtatgaataatttaaaaattatgagaatttataatgaagatgtttggagatagatttagattaagagttttattttgttttttattagttgtgtagttttggatattttatttattttttttttttttttttgatagagttttgttttgttatttaggatggagtgtagtggtacgattttagtttattgtaatttttattttttgggtttaagcgattttttagtttttgtttttcgagtagttgggattataggtatgtgttattacgtttagttaattttgtatttttagtagaaacggggttttattatgttggttaggttggttttgaatttttgattttaagtgatttgtttatttcggttttttagagcgttgggattataggtgtgagttatcgtgtttggtttatttatgttttgtaagttttgttgttttatttgtgaaatggagattatattagtatttattttataatatgaagattaaatgagaaaatttataaataatgttaaatatagaatttgttatataaatttagttttaattattattattattaaaaggttagaagaatttagtttttgtttttagttgggattagtgtttatagatttattttgggaaggtagattaatgttataaatttaaatggttttaattttatatatttttagtttttagttttttgatttagaatgtatttttttttttttgttttgtttggttgaattttgttttttttttttttaatattttgattataggtttagtgaatttttgtggttgtttttattaattttttttatagttttttttttatagttatttttttataagttgagatagttaggtattatagttagttgttaattttaaaggagagggaagtttggtagagaaggtaagtattaggaaaataaataaaaaggatgattgattgatggaggttttggttggagaggttttagttaggtttaagtattagttatatttttttagggaatttaggtttttgtgttaaagtattattatttttaataatttattagaaatgtaaatattcggttaagagtggtggtttatatttgtaattcgagtattttgggaggttaaagtgggtggattattttagttagggaggagggagagagtaatatttttaagttttacggtttgttttggggaagagggattttggtttttatgatttgttttaggggagaaggaagggtaaaggatagaagggtaagagaatgttagagagattttgtttttgaggttttttaattttttttagtttaaag

SEQ ID NO: 691 - DNA, 5739 bp, Artificial Sequence
  chemically treated genomic DNA (Homo sapiens)
ttttatagtttttgaggttgtaagtttaagattaaggtgttgatagggttggttttttttaattttttttttaaaaattttattttagatttaggggtatgcgtgtaggtttgttatataggtaaatttttattacgggggtttgttgtatatattattttattatttatgtattaagtttagttatttaatagttatttttttcgattttttttttttttttattttttatttttaagtaggttttagtgtgtttgttgttttttttttgagtttatagggttggttttttttgaggtttttttttttggtttgtaggtgtttattttttttttgtatgggtttgtgttttaattaataaggatattagttatattggattagagtttatttaatgattttattttaatttaattatttttttaaaggttttatatttatatatagttatattttgaggtatagggggttttatatgtggattttaatatatgaattgggagagatataatttagtttttaatagtgttttaaagtggggaaaaggaagatttggattttcgggtttttatagtagaaagtaattattgttttttattaagtatttatagtggggtttttttagaaagatgatatgttaataagaaggggaggaggaagtgattttggatagttagatgatatgtgtattatttttttataatggagattttgaagaggagaagtatttgattaaatatttttttatttttatttcgtttttaattaaaagttgttaaatttttgttttttagttttagtttttgaaattgtttaggaaaaggttattaatagttttttgattgttatattttaattaaatttttgtttgaatttttttttataatattaatattgttattgttgattattttttttttgaagatttgtttttattaaatttttttgtttttttttttttagttttttttatataaatttttttgttagttattttttttgtgtacgttttaaaaatgtttgtatgttaagtttttgttattgattttttttttttttttttttttttttaatttttttttttttttttttattgtttttttttaatttttttttaatatttttatagttttagagattttatttttattttattttaatttaggatttttggatggatttaaatagagttttttaaattaaaggaaatataatgtgtatatttgtatttttttttgggagaaggtttaaaggtttttattagaggtttgaaattttaatcgtgttggtgttttttaaattgtgttttttgttaagatttgttttttgagttttagggttatgtgttttattgtttattggaaatttttatttgaaatttttatagttattttaaatttaataatattaaaagttgaaattattgttttttttttttaaagtttgtttatttttttattttttttttgtttatgaaagttattgttattttttttattatttaaattagaaattcgagtattatttagatttttttttttttattattttttagttaattatttattaagttttgtttattttttttttttaattttttttttggatgtttttattgtatatttattttttaaatagagtggtttttgttttaattagattgttgaaataattttttaatttttttttttattttttattttttttttttttaatttattttttggattgttgttagagtattttttataaaatataaaatagattttgtgattttttagtttaaagtttttttattagtttttattattttttagaataaaatatgtattgtttattttgatatataaaatttttcgtgataaatattaattgagtgtttagtatgtgtttgtttttgtgttaaatgttgagggtataggggtaaataaggtgaatagtttttttgttttttaagattttttagtttataaatgtaatgagtttatagaggagaagtataagtttttaaaggagttggggtggggttgggggttagaatttaatttagaaaattgaggaaggttttaattttttattttgtatttataatagtaattagtaggtgtggtattaaatatggaattaataattttatttgtattattttatttaagttatgagtgttattattgttagttttattttatagataaggaaattgagggttagaaggttaaataagtggtagagttgggattttttttagatttttgtgagatttagatattttaatttttttggaatttgtgttttttttttgtagtatttattatatttgtggaattatatttaattatatttgtggaattatagttagttttgtaaatatgatagtttattttattttaagtttttgtttatgttgttttttttgtttggaatgtttattttttttaaaaatttttttgttgaatattttgcgatttaattaaagtgtttttttttttatgtatattttttttttagatagaattagttattgttttttttgtgtatatatagtattttataaatattgttatagtttttttagtattttaaatatttatttgatgttttttttttaagaaattgtaagttttagaggatgataattaattgaattttatagttagaaatttttgttgtgtttggttttttaatgagaaaaggagagaagaggaggggaaggaagaaaaagggaaggagaagaaagaaaagtaaatatgaagataaatattttaatatatgatattttaagattatttatttttttgtaaaaattttgtttttttttttttttttttaagagttagggttttattttgtcgtttaggttagagtgtagtgttatgaatataatttattgtagtttttaatttcggggtttaagtaatttttttgttttagttttttgggtagttgggattataggtatgtattattatatttggttattattattattattatattagtagagatggggtttttttatgttgtttaggttggttttaaatttttggttttaagtaatttttttattttatattggttttttaaagtgttgggattataataagttattataggttaaaattttgtattttatttattattgtaaaattaatttttagaaatttaataatatttaatttgagaattgtttaataattatttaatgaaaattttttgaaagttttttattttgttgtagtttttttttttttttttgtgttttttttttttttttttatttagtttatttttttggtagttaagaatttttttttttattggagagttatagattaaagaggagttaaataagaaaataagattttaaagaaggaaaataaagtgaaggttttgtattagaagttacgtggtagaaagttatttggatatttgaaaagaagaaagaattgagggatattcgttttttgttttagagattatttttagttttgaaggttttgtttttgttttaggttttttagataagtattcgaagtgttatagtaaggaattttaagtttttagatatttgtttggattttgtaaggcgtagatgagttatttgagaaggagaattggaatggttgtttgggtttatttttattgtttaatttaagggtttgtggagaaggggttgttgtaagattttgtgtgtggcggggggaggggtgggtacgtggatggtaatgggaggattaattaattttatttaggagttaaatgaaatatataaataaaaaataaaatttgagtagtggtttttaggttattttggagtagaaagagtatttatttatagtaaaggttggcgggtatttgtgttagtttttgtttttattttatttttaataagtattaggtgtttatacgggtttgttgttcgttttttgggtttttttaagttaggtgagatttgttttagatgtttacgaatttattgggggagtggtattattaagtagagttatttgattttttgtttgggatttggattattgtgagagtaattaacgtggggttacgggggagaatttggagagaagagaagaggttaataatttttttattttttggttattttttttattttttttggtaaggagttttggagtttcggtttttaggttgatagattagtttagatttagtggttcggaggggtttgagttaaattcgtaggatttgggtaatacgaggaaggtaaagagtttttgttttcgtttttttttatttttattttttttgtgatttttttagtttttcgttggtgatttgtttttttagggtttatttttttattttatttgggttttttttaatttggaaatttaatgattaaattatattaaaaagttagtagtttttgtggattatatattttaggagtatatagattttgaattttgaattttgaaagaaattttgcgtggagataatattgaggtagagatattgttagtggtttgaagatttgaaaggattattttttgtgtgtaggtagggttttagttggagatagatgggtttgggcgaggtaggagagtgataagttttgaggtgaaatgaaggaagtttttagagaatgttttttttattttgaattttatttttagggttttattgttttatttttggtgttgggtggatttaaatttaggagatggggtaagtattttgggatggttgagggtatattttggtagattttgtgtgtgtttttagatgtttagttatagatttttgagggagtaaagggggtagatttatttattttgtttttaggtttttttttttttggttttgttttatggtggggtttttttgttagattttagattgagaagttagatgaagttttaagaaaaggaaattggtgggtgatagagatgggtggaggggttggggaaaggttgtttatttttttttgtttagtcggtttggtttttttagggtttcggatatttttggtgatttgtttattttagtgtggtattatgtggtagttgttttttttaattgttttgttatttttaggtaagttagggtttttttggttgagggagaagtttgagatgttttgggtttagtagagatttttttttaggttacgaatgagatttttacgaagggatgggattttttattatatttatagttgtggattgagtttttaggataagttaagatggggttagaaatgaggagaatgttggttttaattggggtatatttatgagtgaggttagttattttatttttttgggttttagaattattttgtggaattaaagagtttcgattagatggtttttagggtttgttttttttagtttgatattttagggtttttttttatgatttttaatttttatttttttttgtggggatatgggttgaggttttttttgtagtttggtttagggaaatttaatttgtatttttaatttgtgagtttgtatagggagtaaggggtaagggagtagtgttgaaaatagggatttgtgttgatagtggcgtaagaggtatgaatagtggagattagagagtaggtagtaaggtttttattagaaatattttgatttttgggaaaattgggtttttggggtagaggagggtaggggagttttaaatttattttatgttttaattattttgatttttgtttttatttaatatttgatttatttttttttttgtagt

SEQ ID NO: 692 - DNA, 5739 bp, Artificial Sequence
  chemically treated genomic DNA (Homo sapiens)
attgtaagaaaaaagataaattaaatattgagtaggggtagagattagagtgattagaatatagagtgagtttaaaatttttttgtttttttttgttttaggagtttaatttttttaagaattaggatgtttttggtggaaattttgttatttgttttttggtttttattgtttatgttttttgcgttattgttaatataaatttttatttttaatattgtttttttattttttgttttttgtgtaaatttataaattaagggtataggttgaatttttttgaattaagttatagaaagagttttaatttatatttttataagaaagggtagaagttgaaaattatagaggagaattttggaatgttaaattgaaagagatagattttagggattatttagtcgaagttttttggttttatagagtgattttgggatttagaggggtgaagtgattggttttatttatgagtatgttttaattggaattagtattttttttatttttagttttattttggtttgttttaggagtttaatttatagttatagatgtggtgaggggttttattttttcgtgggagttttattcgtagtttgaaaaggggtttttgttgaatttaaggtattttaaattttttttttaattagggagattttgatttatttagaagtagtagagtagttgggaggagtagttgttatatgatgttatattggagtggataagttattaaagatattcggagttttaaagggattaaatcgattagataggaggaagtaaatagtttttttttagtttttttatttatttttgttatttattaattttttttttttgaaattttatttgattttttagtttgaagtttggtaagggagttttattatagaataggattaggaaggaaagagtttggaggtaaggtgggtgggtttgttttttttatttttttaaaggtttgtggttgagtatttgaggatatatatagaatttgttagagtgtgtttttagttattttaggatgtttgttttattttttggatttggatttatttagtattaagaatgggatagtgagattttggggatgagatttaaggtgggaggagtattttttgagggttttttttattttattttagaatttgttatttttttgtttcgtttagatttatttatttttagttgaggttttgtttgtatatagaaagtggtttttttaaatttttagattattagtagtgtttttgttttaatattatttttacgtagaattttttttaaaatttaaaatttaaaatttatatgtttttgggatatgtaatttataggagttattgattttttagtgtgatttgattattagatttttaggttagaagaaatttaggtagggtagagaaatgggttttggaagaataagttattagcgaaaggttgaaaagattatagaaaaggtgggggtggggaggggcgaggataggaattttttatttttttcgtgttatttaggttttgcggatttagtttaggttttttcgggttattggatttgggttggtttgttagtttaggagtcggggttttagggttttttattagaaaaggtggagggggtggttaggaagtgggagggttgttaatttttttttttttttttagattttttttcgtaattttacgttggttatttttataatggtttaggttttaggtagaaaattagatgattttgtttgatagtgttatttttttagtggattcgtggatatttgggataggttttatttggtttagaaaagtttaggaggcgagtagtaggttcgtgtgggtatttgatatttgttaggggtggagtggaggtaggggttgatataggtgttcgttaatttttgttataaatgaatgttttttttattttagaatgatttaaaaattattatttaggttttgttttttatttgtgtgttttatttggtttttgggtggagttaattgatttttttattgttatttacgtatttattttttttttcgttatatatagagttttgtagtagttttttttttataggtttttggattggataatggaaatgaatttaggtagttattttagtttttttttttaagtgatttatttacgttttgtaaaatttagataagtatttggaaatttaaagttttttgttgtagtatttcggatgtttatttgggaaatttaaagtagaaataaagtttttagggttaagaatggtttttgaggtaaaaagcggatattttttaatttttttttttttttagatatttaggtggttttttgttacgtgatttttgatgtaaggtttttattttgttttttttttttgaggttttatttttttatttgatttttttttggtttgtggttttttaatggagggaggaatttttagttgttaaaagggtgggttagataggaagaagaggagagagtataggaggagagaaagggattgtaataggatgggaagtttttagggggtttttattaagtggttgttgaataatttttaaattgagtgttgttggatttttaagggttaattttatagtaatggataaaatgtaaaattttggtttatggtggtttattgtaattttagtattttggaaggttaatgtgaggtggaagaattgtttgaggttaggaatttgagattagtttaggtaatatagaaagattttatttttattaatatagtaataataataatagttagatgtggtggtgtatgtttgtagttttagttatttaggaggttgaggtaggaggattgtttgagtttcggagttagaggttatagtgagttatgtttatggtattgtattttagtttgggcgatagagtgagattttgatttttgggggggaaaaaaaaaaagtaaaatttttataaaagggtagatggttttgggatattatatattgaagtgtttatttttatgtttgtttttttttttttttttttttttttttttttttttttttttttttttttttttttttattggaaggttaggtatagtagaagtttttgattatggaatttagttgattgttattttttaggatttatagttttttagggggagaatattagataagtatttgaagtgttagagggattgtgatagtatttatgaaatgttgtgtatgtataaagaagatagtggttaattttatttgagggaggagtgtatatggaagagagaatattttaattagatcgtaaaatatttagtaggaagatttttgagagaaataggtattttaggtaagaggagtagtatgagtaaagatttggagtgaagtagattgttatgtttgtagagttggttgtagttttataagtgtagttggatgtagttttataagtgtagtgagtattataaaggagaagtataggttttaaaaggattaagatgtttgggttttataggaatttggaggaaattttaattttgttatttatttaattttttagtttttagtttttttatttgtaaagtgaggttaataataatggtatttatggtttaaatgagataatgtagataaaattgttggttttatatttggtattatatttgttgattattattgtaaatgtaagatgggaggttgagattttttttaattttttaaattaggttttgatttttaattttattttaatttttttaggagtttgtgttttttttttgtaaatttattgtatttgtggattgaaaggttttggagagtagggaagttgtttattttgtttatttttgtatttttaatatttagtataagggtaggtatatattaggtatttaattagtatttattacgaagagttttgtgtgttaggatgaatagtatatattttattttaaaaggtaatgggaattaataaaaaggttttagattggggaattataagatttgttttatattttatgaaaagtattttgatagtagtttaaggaatgagttagaggggagagagatggaaggtggagggaaaagttggaagattattttaatagtttagttgagataagagttattttgtttaaaaagtggatatgtaatggaagtatttaggagagaagttaggaaggaaggatggataagatttggtgagtgattggttgaggggtgatgaagggggagaggtttgggtgatgttcggatttttaatttgggtgataaggaggatggtagtagtttttatggataaaagaaaaatgggaagatgagtaggttttgggagggagagataatgattttagtttttgatgttattgagtttgaggtagttgtgaaggttttaggtgaagatttttagtaggtagtgagatatatggttttggaatttagaagataggttttgataaaagatataatttaggaggtattaatacggttgaggttttaaatttttgataaaaatttttgggtttttttttaagaaaggatgtaaatatatatattatgttttttttaatttaagaagttttatttgaatttatttagagattttaggttaagataaagtaaggataagatttttgaaattgtaagagtattgagagagaattaaagggaaatagtgagggaaaggaaggagggattgagagggagaggagaagaggagagagttaatgatagaaatttgatatgtaaatatttttgaagcgtgtataggaaaaatagttgataaaggagtttgtataggaggggttgaagaggagggaataaggaagtttagtgggaatagatttttaaggaaggagtagttaatagtaatagtattaatgttgtagaaaagaatttaaataagagtttgattgaaatatggtaattaaggaattattaatgatttttttttgagtaattttaggggttggggttgagaaatagaagtttgatagtttttggttgaagacggagtaggaatgaaaaagtgtttagttaagtgttttttttttttagaatttttattatgaaggaatagtgtatatattatttggttgtttaggattattttttttttttttttttattagtatattatttttttggagaagttttattgtgagtatttaatagaaagtagtgattgttttttattatggaaattcgagggtttagattttttttttttttattttggggtattattaaggattaaattgtgttttttttagtttatatgttgaagtttatatgtggaattttttatattttaggatgtgattatatgtggatatagagtttttaaagaggtaattaagttaaaataaaattattaggtgggttttagtttaatatgattgatgtttttgttagttgggatatagatttatatagggagaagatggatatttataagttaaggagagaggttttagaagaaattaattttatggatttaaaggaagaataatagatatattggggtttatttgagggtggagggtaggaagagggagaggatcggaaaaaataattattgagtaattaggtttagtatatgggtgatgaaataatgtgtgtaataaattttcgtgataggagtttatttatgtagtaaatttgtacgtatatttttaaatttaaaataaaatttttaaaaaaaaaattaaaagaaattaattttgttaatattttgattttggatttgtagttttaagaattgtaaga

SEQ ID NO: 693 - DNA, 6503 bp, Artificial Sequence
  chemically treated genomic DNA (Homo sapiens)
gtgagggtatatttttaatgattcgtatagtagtttgtgattgattttgtgttatttgttagaaggattttttttggggtttgggtagttaggttttttgttagattatatttttttttggttgtagttatattttttttttttataataaattgttgtattttatagtgtgagagtttttgttttgttgatttatggggttagaatttttcgggggtgggtatggtttagggggaaggaattttttttgtttattttgattagttttattttgattagttttattggttggtttttttttttgtatttttttaaggtttattttaggttgtagatttagtacgtgaagtaatagttaggttaggggttgtttaattttttagaagtttgagttgtaatagggaagtgaattagtaggtatttaatatttttaaattttttagagatagttgggttatagtttgtggtgggagtaatataggacgatggtgatttttatgtgttttatttattttatttaaatagtttatttaagtttgtttttttaagtgaaatttaatatttatttattagagtgtataaattaaatttgtattatttaatgaagttaaaatttatttttagtttttcgtgttttttttaggtttaagggtttttttttttaagggagcggtcgttttattggtttttgttaagggagcggttattttattggtatggtttgggtttttttttttacgttgttatcgagtatgtatttttttatattgttgtttagttttgtttatttttaaattttgtatagatgtaaatgaatagttcgtatgttttagtgttggcgttttggatgtttcgtgtgtttgcggattttaataaagtttttgcgtgaagttggaattcgattattttatgggtttataggatgttttagtatgaacgaattttagttgacggttttattttgttgcggatggacgtttgggttgttttcggcgtggggttggatatttttatacgtgttttttttttagttgggtatatttttttgttgagtagaattgagttgaatatcgttggttatggaatatgttggtcgtagggaattgttgggaatattgttagtttttcgaagtgtttgtattaaggtttttgatatttttttattaaaattttgtagagttggttgtttagaaaaattttagtgtttgtagttattttatgagatttaagtttttattttttggattagttatgaagttgagtatgtttttatatttttattatttattaaatattattttttataagcgtttgttgaagttatttttttattttttataatatcgttgatttatagaaattttttattttggatataagttttttgttatttttgtgtgttgaaatttttttttttttattttggttcgtttttttttttttacggtggtgtattttgaaaaagaaataatattatttttatgattaatttttttatttgttttttatggtttgtggttttttattttatttaaaataattgtaaggttattggagattttataatatgatttaaaattgttgtttttttttttatatttgggtttattttttttttgatgtggattttttttttatttgataaaagttaagtgtaattttttgtttttttatatgattttttagtagtttgtgttatttattgaaagtttatttttttattattgttttttagagttattatgttataaatttagggttcgtatgtgtttggatttgtttttgtattttttatttatttttttaggtttgttgtgtacgtttaagttagttttatattgtttttattattatcgtttgataatgattgttggtgttattttaagtaatttatttttgtttttttttgtttaagaatagtatggttattagttttttgtttttatataaattttatttatttatttatttatttgtttatttatttagatagagttttattttgttgtttaggttggagtgtagtggtgtaatttcggtttattgtaatttttatttttcgggtttaagtaatttttttattttagttttttgagtagttgggattataggtatgtattattatattttgttaaatatatatattatatattttttgagatggaattttattttgtcgtttaggttggagtatagtggttcgattttggtttattgtaattttcgttttttgggtttaagtaatttttttgttttagttttttaagtagttgggtttataggtgtttattattatgtttagttaatttttgtatttttagtagagatagggttttattatgttggttaggttggttttgaatttttgattttaagtaatttatttgttttagttttttaaagtgatgggattataggtgtgagttattgtattcggttttttatataaattttaaatttattatgttaattgttatagaaaatggtagtttaattgataatatagtggatatttagataaattaagagaagatgaatgttttttttatatttggtattttaatttatatatatagaatatttttttaattattttaatttttttttaggtttttttgtttttatttgatagttttgtatatagaagattagtatggatgttgttagatttatttatagttatttgaatttggtgttgttgatgtaaattttttaaattttatttttaaattttttgaggttagtttttagaagtataattgatttttgttaaattttttattttgttagtttatttgtagaaattttagaattttttatatttttaattatgttttttgaaaataataattttgtgtttgtttttttaatttttttatggttttgtttttttgtttattgtattggatagtgatatgtaatataatgttgattatagtggtgatgataagtatttttatttgtttttagtttttgaggatggttttttattttttttgttaattatgttgtaatttttgtatttatagtttttaaagatttttttttatattttgttgtttttgttggtttttatatatattgttttttatttttatgagtttggttatcgttgattgtgttttaatattttatttgaaaaaaataaaatattttgtagaaataatgatttgggatgatgttatttttttttagagaagatttttgttttttttagtaaggagtttgggggtatgagtaataattttaggagttgagattttttttttgggatatttagatgttttaaaattagtttgtagtttttgtgaatgttggttgttgtttatttattttattgttagggtgtagtttttttgaaagttaattttaaatttatatttttggtaggtcgtaggttttagtttttgatttttagttttgtaagatggtgaaattattgtttaattttttattttttttttggagattggtaaatttttgtgtaaaaagaggtttttattattagttttatttttttaagatttttgtggtttttgagagtttggtaaagtaattttttattatatagttagtttgacggtgttttcgagtaaatttttttttaaaggttttgtttgtttgtttttaataggatgtttttaaatatttaaattgttattgttaggaattaaatgatttttgttgatttaatgttaagatattttaatttgttagaattttgtatttttttatatttttgggaatattgatttgatatttgaaggtggtgttgattttttatttgaaataaatttattgatgttgtaaggaagaggaggtttttttatatttagggggtagttggtaaatggaattgaggggtatagatttgttggttttttttttgttttgatttaattttaggtgagtgttgtttttgaattggattttttttaagaaaggaggtcgtattattgatatttagatttttttcgtttgggttagtagtttagggatattaagcggtgtttgaggtaatgaagttttttgtcgttgttttttaataggttggagttaatatatataaatatatatagtcgagagtcgttgtggtgtttagagagtttggatataaggttttgtgttttttggattttttatttttgggtcgtttttttattttttttttatttggggagtttttgagtttggaaatttagtttatatacgttggtttagagaagttgtaaattataaaataatatttttttttgttttttagttttgttattatttgattttcgttagtgattatttttatacgttttaaaaatttcgtataaagtgtttatagcgtggtttggttaagtatgatttatagtacgagatgcggagtaggaatatggttttagggatttgggggaataagaggtatttttatttttaggtgaaatgagtaattttagtgatttataaggcgttagatagaattgagtttaatgtttggtttttattagtggagtgattttaatttttttagttgtaatttttaaataatttattttatcgaatggggttggtgtaagatgatatgatggaaatagtatttgggatataataagtgtttaatattttttttttttttatttatgataagtgtttgatgacggataaattttgaattttttgggaatagatgaggtaaggaagcgtttttagtaaaattttttttattttttaaggttaaggttaaggttttcgagtattgtttggggatagttggggaatggaaagggggtgtgggggttgtgttttttttaagttataagtaaagtcgatgttttttagtagaggagttttaggagttttttggattgggagtagggtgtttttgttgggggaagagagtttaatggggtgggtattttgttggagtttagtggaaggaaatattttttgagatgattttatattttttgttggtgtaattaagtagtttataggaagtgggtgttttttagggagttgagaaattgtggtataaggcgagagttggttttttttgttttgttagagttgggggattttttagagttaaaggttagagagtatggagttgagtggagttattatggttcgggggttcgttgttatgttagttttgtttttgtatattaagaatttgtttgtttaggttgcggatatatgtttaggtgagatagatttgggttttttggtttttaaaagttggtaataattttatttattgatattcgggtgttttaggtaaaattttttatgtatatttttttgtgaagatgtttaatagatttgttttatttttaggtaaggatatggaggtttagggtagttgaggtattgtttagggttatggagggataggggagggatgttattaggtttgtttgtttcgaaagtttaggatttgtttattggagttttataggtgggtttggaatttgttattgagaaggaagaaaatattgttgattttatttttttacgggtttattagggaggtattttaagattttttaatacggtggttgttatacggatttggggggtttgttaaaaaggtagatttttggtttttttttaagagagtcggaattagttgatagggataagggtttgaacggtggtaaggtgttttttttattgatttaggagtaggtggttttgtgacgtttagtaagagattgtttttaaggacggtttggtgtttttggttgataatatatttatgaaggaaatataaatagtaaattatagtttgttttagtggaaggaggattggaaatatagaaaggaaatattttaaaaatggtagtgttatgttttcggtgagagtattgtttcgttttatggtttttaagagcgtttttagtagggcgtgtagattttgtaatgaataaaatgaaaaatatttttttaaagaagtaaataattttggtttggttgtagttgtgttatatttggttttgtgtttttggattttatattgtttttttttagaggatttagaaagttttttttagtttagtaattttataattatatttttaaggtttgggagggaaaatgttttgttagttttaattttttaagttttttagaaatattgattgttattagttattgaaagtgttcgttgtttattaagttttttttaaatgttataaattataataagagatttaaaatgtatattttttaattaaattttggtcgtaattttgttattattttcgtttggtagtttagggtataaagtttagaggagttaagttatttgttgtaggatatatagtattgaggagatggggtttttttaggtcggggtggtttttaaagttagagttttgttttttattatattttcgttttattagtgtttgaggggtgaggatagattaaggttttagtagagtagaaaattttattttttagttattgttgggttaggtattgagtgggtatttgtgtttttttgtaga

SEQ ID NO: 694 - DNA, 6503 bp, Artificial Sequence
  chemically treated genomic DNA (Homo sapiens)
tttgtagagaaatataggtgtttatttagtgtttggtttaatagtggttgggaagtgaggttttttgttttgttggggttttggtttgtttttattttttaggtattggtgaggcggagatgtgatggggggtagagttttggttttggaggttatttcgatttaggggagttttatttttttagtgttgtgtgttttgtagtaagtaatttaatttttttgagttttgtgttttgggttgttaagcggggataataataaggttgcggttaggatttggttaaagaatgtgtattttaaattttttattgtaatttatggtatttagaaagagtttaataaatagcgggtatttttaataattaatgataattaatatttttaagaaatttggggaattggggttgataaagtatttttttttttagattttgggaatgtggttgtagaattattgggttggaaggggttttttaggttttttggagaggggtagtgtggggtttaaggatatagagttaggtgtggtatagttgtagttaaattaaagttgtttatttttttgaaaaaatattttttattttgtttattataaaatttatacgttttgttaagggcgtttttagagattatggaacggagtagtgtttttatcggagatatggtattgttatttttggggtattttttttttgtgtttttagttttttttttattagagtaggttgtaatttattatttatgttttttttataaatatgttattagttaggggtattaggtcgtttttaggagtagttttttgttgagcgttatagaattatttgtttttgaattagtgagggaaatattttattatcgtttaaatttttgtttttattaattgatttcgatttttttggaggagagttagaaatttgtttttttaataaattttttaagttcgtgtggtagttatcgtattagagggttttagagtgtttttttggtaagttcgtaagaagataaagttaatagtattttttttttttttagtgatagattttagatttatttatgaagttttaatgggtaaattttgggttttcgaggtagatagatttggtgatattttttttttatttttttatgattttgggtaatgttttagttgttttgagtttttatgtttttgtttgaggataaaatagatttgttgggtatttttataggaagatgtgtataaaaggttttgtttgggatattcgagtgttagtgagtggggttgttattagtttttagggattagaaaatttaggtttgttttatttgaatatgtgttcgtagtttgggtaggtaggtttttgatatgtaggaataagattagtatgatagcgagttttcgggttatggtggttttatttagttttatgttttttggtttttgattttgaagagttttttagttttaatagggtagaggaaattagttttcgttttgtgttatagttttttaattttttgggggatatttattttttatgggttgtttagttgtattaataggaggtatgaggttattttaaaggatgtttttttttattaggttttagtaagatgtttattttattgggttttttttttttagtaaagatattttgtttttagtttagagagtttttgagatttttttgttggaaagtatcggttttgtttgtggtttaaggagaatatagtttttatattttttttttattttttagttgtttttaagtaatattcggaaattttgattttaattttgggggataaggaaggttttgttgaagacgtttttttgttttatttgtttttagaaaatttagggtttgttcgttattaggtatttattatggatggagaggaaaaaaatgttgagtatttgttatgttttaaatattatttttattatattattttgtattagttttattcggtggagtaaattatttgaaagttatagttggagaaattgaagttattttattagtaagagttaggtattggatttaattttgtttaacgttttgtagattattgggattgtttattttatttgaaggtggggatgttttttgtttttttaaatttttgaggttatgtttttatttcgtatttcgtgttgtgaattatgtttagttaggttacgttgtggatattttgtgcgggatttttagaacgtatagaaatagttattaacgagagttagatggtagtaggattaaggagtagggagaggtgttgttttgtggtttgtaatttttttgagttagcgtgtgtagattgggtttttaaatttaagggttttttaggtgggagagaagtggaggggcggtttaggggtgggggatttaggagatataggattttgtgtttaggttttttgggtattataacgattttcgattgtgtgtgtttgtgtgtgttggttttagtttgttgagagataacggtaggaggttttattgttttagatatcgtttagtgtttttgagttattggtttaggcgggagaggtttgggtgttagtggtgcggtttttttttttggagaggatttaatttaggagtagtatttatttgggattgggttagaatagggagaaagttagtaggtttgtgttttttaattttatttgttagttgttttttgggtgtgaggggatttttttttttttgtaatattaataggtttattttaggtgagaagttaatattatttttagatattaagttaatgtttttaagagtatgaaagaatgtaagattttggtaagttaaaatattttaatattggattaataaaagttatttgatttttggtaatggtagtttaggtatttgggggtattttattaaggataaatagataaaatttttaaaaagagatttgttcgaaggtatcgttaagttagttatgtagtaaaggattattttgttaagtttttaggagttatagaaattttagagaagtgaaattagtagtggggatttttttttgtatagggatttgttaatttttaaaagagaggtgagaagttgggtagtgattttattattttgtagagttgaaggttaaagattggggtttacggtttgttaaaggtatgggtttggggttggtttttagaagggttgtattttagtaataggatgagtgagtaataattaatatttataagggttgtaaattggttttgagatatttaagtgttttaggaaaggaattttaatttttggaattattgtttatgtttttaggttttttgttgaaagaaataaaaattttttttgaaggagaatgatattattttaggttattatttttgtaaagtgttttattttttttaaatgaaatgttaaaatataattaacgataattaggtttatgggaataaaagataatgtgtataaggattaatagaaataatagaatatagaaagaggtttttggaagttgtggatatagaagttataatataattaataggaaaaatggaaaattatttttagagattgagaataaataaggatgtttgttattattattgtggttaatattgtattgtatgttattgtttagtgtagtaggtaagagaataaaattataaaaagattggaaaggtagatataaagttgttatttttagaagatatgattgaggatgtagaaaattttagagtttttatagataaattagtagaataaaaagtttagtaaaaattaattgtgtttttaaaaattagttttaaagaatttaaaaatgaaatttaaaaaatttgtattagtaatattaaatttaaatggttgtgaataagtttaataatatttatgttggttttttgtgtataaaattattaaataggaatagaaagatttaaaagaagattaaaataattagaaggatattttatatgtgtggattagaatattaaatataggaaaaatatttatttttttttaatttatttaaatatttattgtattattaattaaattattattttttgtgataattgatatggtgaatttaaaatttatataaagggtcgggtgtagtggtttatatttgtaattttattattttaggaggttgagataggtagattatttgaggttaggaatttaagattagtttggttaatatggtaaaattttgtttttattaaaaatataaaaattagttaggtatgatggtgggtatttgtaaatttagttatttaggaggttgagataggagaattgtttgaatttaggaggcggaggttgtagtgagttaagatcgagttattgtattttagtttggacgatagagtgagattttattttaaaaaatatataatatatatatttagtagggtgtggtggtatatgtttgtagttttagttatttaggaggttgaggtgggagaattgtttgaattcgggaggtggaggttgtagtgagtcgagattgtattattgtattttagtttgggtaatagagtgaaattttgtttaaataaataaataaataaataaataaataaataaaatttatataaaggtaagaggttgatagttatgttatttttgagtaagaaaaaataagggtgagttgtttgaagtgatattagtagttattattaagcgatagtgatggagatagtgtggggttggtttaggcgtatatagtaaatttagggaagtgagtagggagtgtagaagtaaatttaggtatatacggattttagatttatgatatggtggttttaaagagtaatagtgaaagaataaatttttaatgagtggtataaattattggagagttatatggaaaaataagaagttatatttgatttttattagatgaaaaaaaaatttatattaggagaagggtagatttaaatgtgagagggaaaatagtagttttagattatattataagatttttaatagttttgtagttattttaaataagatggaaaattataaattataaaggataagtggaaaaattgattatgaaaatagtattattttttttttaaaatatattatcgtgggagggaaaagacgagttagggtgagggaagagaggttttaatatatagaagtgataaaaggtttgtatttagaataaagggtttttgtaaattaacgatgttgtagaaagtgggaaagtgattttaataaacgtttataaaagataatatttaatagatgatggaagtatgaaaatatgtttaattttataattaatttaagaaatgaaaatttaaattttatgagatgattgtagatattaaaatttttttaaatagttaattttgtaaggttttggtgaagaagtgttagaaattttggtataagtatttcggaaaattggtagtatttttaataattttttacgattagtatattttataattagcgatgtttagtttagttttatttaatagagaggtgtgtttagttggaaagaagatacgtgtgaaaatgtttagttttacgtcggaaataatttaaacgtttattcgtagtagaatggggtcgttagttgaggttcgtttatattggagtattttgtagatttataaaatgatcggattttagttttacgtaaaagttttgttgaaattcgtaagtatacggagtatttagggcgttagtattaaggtatgcgaattgtttatttgtatttgtatagagtttgaaagtgggtaaaattgaatagtagtgtgaaggaatgtatgttcggtggtaacgtggagaaaaaggtttagattatgttagtgagatgatcgtttttttagtaggggttagtgagacgatcgtttttttaggagggggagtttttaggtttggaaggggtacggggggttggagatgggttttggttttattgggtgatgtaggtttagtttatgtattttggtgaatgggtgttaaattttatttaaaagagtaagtttaaataaattatttaagtaaaataaatagaatatataagggttattatcgttttgtattgtttttattataagttatagtttagttgtttttgggaggtttggggatgttgaatgtttgttggtttatttttttgttgtagtttaggtttttgggaggttgagtaatttttagtttggttgttgttttacgtgttgggtttgtagtttgagatgagttttggaaggatatagagggagaggttagttagtgaggttggttagagtggggttggttagagtggatagagggaattttttttttttggattatgtttattttcgaggggttttgattttatgggttagtaaggtagaaatttttatattgtaaaatgtaatagtttattatgaagagaagaagtgtggttgtaattaaaagaaaatataatttagtaaaaagtttggttgtttaagttttaggaagggtttttttggtagatgatataggattagttataggttgttgtgcggattattggggatatgtttttat

SEQ ID NO: 695 - DNA, 11296 bp, Artificial Sequence
  chemically treated genomic DNA (Homo sapiens)
gttaagtttgtaatgagataattttaggagttattgttttttaggttttgttttaggtatttagaagttagagagaattattagaaggaggttgtttaaatgtttgaagagttttttttatatattttgtaggatgtagatttatgtgatgacggtgatgagatttggaattagtaagtttagaattagtaataagttatttgtaagtttgatatgtttttatggatatatatataagtttttttatttttttaggtagttttttaaatttttattttggtttggtatattatattagtgtttttgtttgtggtgttgggcgttattgtaattaaagatttggtggacgatgtggtgaggattttttatataacgttttatttattgttttgagttgatttaagtttcgtgttttttttttttattgagatgtttaaaatagtatttttttatttttttttttaaggttcggtataaaatggataaggaaattaataataggacgtgtgaagttattaaggatggtaggtattgtgtttaattagtaattgagttttaaggatgtaatgtataattttgtttagaaatatatttagagataattattataatgtagaaggttattagtatattaattgtttatttttttcgagatagagtttcgttttgtcgtttaggttggagtgtagtagcgttatttcggtttattgtaatttttattttttaggtttaagtaatttttttgttttagttttcgagtagatgggattataggcgtgtattattatgtttagttaattttgtatttttagtagagatggggttttattatgttggttaggttggttttaaatttttgattttaagttattttttttgattttttaaagtgttgggattataggtgtaagttattatgtttggttttaaattatttttttaatgagtatgtatttttgttgtaataaatttaataaggatagtgataaaaatagataaaaagatgattattttgagtattaaattttataggaaatatttattaaaatttttaatatattaatatttttaaaagttttaaattataatattgttttaaagatttttatatatataaatgatatatttagtggacgtaatgaatttgttataaataataaatttaattttattggaggtagtcgtttaattattatgtgtttatttgttatttatttatggttaaaaatgatttggagatttaaaatattttttaaatatatgtttatgttttagtttttttaatgaatttagtatataatttttaattttagtattaaaaaaaaaatttggtttattttttaattaacgaaattgtagatgttttatattttagtatttttgaaattttaaaatagaaatttgtatgtaagttcgaaatgataaatggataggttagtatttttttagtagggttattggaaggtaattttgaatattgaaatattggaggtaattttgttagatttttttattcgatgttttagttttttttgaggaggttttttgtgttttattttgttaatgtttaagtttttataggtgtgattttattgtaggggttgtttaggttatggttttgttagatatgtattttagatttttaaatttaaggtaatttagagtttttttttattagtgtaggtaggtatggtataggttaaatatatgggttggttaggtacggtggtttacgtttgtaattttagtaatttgggaggttgaggtaggtagattatgaggttaggagatggagattattttggttaatatagtgaaattttgtttttattaaaaatatagaaaattagttaggtatggtggtaacgtgtttatagttttagttattcgggagggttgaggtaggagaattatttgaatttagaaggtggaggttgtagtgagtcgagatttcgttacggtattttatttcggtgatagatcgagattttattttaaaaaaaaaaaaaaaaaaaagaaagaaagaaaagttgaaataaattaattaattttagtttgattattattcgatattttaatgtttaaaagttaaataatggaaaattgttttttagaatttattttacggtgggacggttatttaaagtttattgtgaattttatttttaaaaaggtaatggtaaaggttagaggaaaattttaaataattatttatgttttgtatttttttttagaaatatatttattagtagaaaaattttttgaaattttaaaaatgtggatgttatttatgagggttgttattacgtagaaattattaataaatttttttttttatgagaggttttcgaaaaaaataattttatatataggtttagggtttattaagaatatgaattaagttcgggtatagtggtttatgattgttattaattttagtattttgggaggttgaggcgggtggattatttgaggttaggagttggagattagtttggttaatatggtgaaatttcgtgtttatttaaaatataaaaattagtcgggcgtgttgtacgcgttagtaatttcggttatttaggaggttgaggtaagaaaattatttgaatttaggaggcggaggttgtagtgagttgagatcgtgttattgtattttagtttgggtaatagggtgagattttttttaaaaaaaataaaaattacgtattttaattaattaatgaaaaaataaaaaataaaaaaagaagttagtaaaaatgaaagtgtaagatgcgaataaaagaaatgaaatgatgttgatttattaaaatatttaataaagtatgttttgttagttttataattatttttggatagaaatttaatttacgttagttattgattttgtattggtgagatttggtatttttatgttttgttattaattattagcgtttgtttgggagggattagaagtttttttatttttatttagtaggagggtttagtattttggatggaggggatgattttttttagggttttttagaggggataagaagagtttttatagtttagacgtttaattttttcggttattttattttttggttttgtttatatgtttgttagtatagtattgcgaggtgtgtagttttttaatttagtttttttagaagaaatgggtttaggtcgcgtatggtgatttacgtttgtaattttagtattttgggaggtcgaggtgggtggattatttgaggttagaagttcgagattagtttggttaatatggtaaaattttgtatttattggaaatataaaataaataaataataataataataataaaaatgggtttagattgtaggtagagaagtatgttatttatgaagattatttttttatagggtaatttaagaagatttataatttttttatgagggtagagaatagttatatatataaggaaggtgggttgatatttggagtaggttttattgtgttttttttaggatattcgtttggatatgaagattatgtaggtaatatgaaaggttatttatttaatttgatattttgtattgggtttataattattaggaggattaattttaataagaaataaattaattttattagtagtatatatttaagttatagaaaattgggttttagttgaatttagattttattttttttgaatgttttatatggtttgttttttttgtttaaatgtgtataaggtttttgttcgaatgtgtgagattttgatttatttgttttaaattgtattagtttttttttttattttattttattttttttattttgttttattttttttttgttttgagagggaaaaagaagaggggaggtcgtggaagggttttattatttaaagtattatatgttgtgattattttttgtgttttttttaattttatgtaagttttcgtttattttttttattattgtttttttagtgtatatagtaggtgtttaatatttgtttaatgaatatcgatgtttgagatttttttgtattaagggttggttttttattttataatgtattgaatatatataggtagggtgggttgacggaggtgtaggaatgaaatgcgcgtttgttttttttagtgattttagtgtgcgattttgggggcgggacgggcggttaaattgggaaggtgcgcggatatgatatagataaattttattattatcgttttttttaagaaatgtatttgttaggttggtttttattttttttaatgttttttagtgagttttatttgttaaattttgttatatagagagggtgtagagaaattgaataatttttttttttattttgaaaataaagtaaaataaaataggatttgtatatttgtattgtgattaggtaggtaaattggagaattgaggtaaaagtatttttatatttaaataatagtaatggaaacgtcgaaaaaagttatttgttgagttatggttgaggattttgatttcgttagtttggtagatgtaaacggtacgtaattaggagtttagtaggttttgtagtgatttgcgatggtggtggggagcgggtttttagtttagttttcgggtttatttttacgtagggagcggcgtttagttggggcgggtttttcgcgaggggcgtgtttttgtttggtttcgttcgtttcggttcggtagcgaatgaagcgggcgcgtcgggagggcgcgaggttagggggttggggacgcgcgtggggatcgttattcggttcggttattgttgggcggatatttgggcgcgtcgtcgcgggaggagttcggattcgggtcgaggttgtttaggtaatgcgtttattcggcgtaaatatggttgcggttttgcgcgtcgcgggcgttttgtttcgcgattcgcgtaagtgggtttgtcgcggcggtcgttagggttaggatttttgagaaggcgtgggtagagcggtaagtgggtttgtcgcggcggtcgttagggttaggatttttgagaaggcgtgggtagagcgggtagttggcgtttgggttttcgcgttcgggggattcggggagcggttttgggggtgttgcgagtaatcgggcgaggggcgtcgcggagaagggagggttgagggtagtatttagggttcgggaggtcgcggggagggcgttcggatttaggaggcgtaggtttaagttttatcggtcggttgggtggtttggagtagtggttggaattttttagagttttggttattgttatttgtaataattaggttgttgagaagattacgcgagggaaggtatgttatgggtttgttatagaggatagtaaggaaggtatttttattattattattatggatatttgttttgtagttttttttttgttgaggaaagtttatggtttttggtttttttgtgtttatttttttttagtagcgggatttttcgtgggtagtttgggttagcgttttttagagatatttggggaatttgtaagatttaggaatagttttttacgtttttgatgtaaatcgtgaataggttgtgattataggatgagttgatgggattgtggattttatatatttggttgggatatagtttttaattgtgatattttgaataaggtatttaatttcgttagagttttggtaaatgtatattgaaattttaattttttttttaaggtttgtttgaatatgagtattttgtttggtatatagtagtatataggtatttttaagatgtttagttatttatgtagaaggttgttacgaataagatgtttatttaatgtattcgaacggtgattggatatagatcggatatatttttttaagacgttcgttagtttgatatttatttggagtggagggaattttttttgaatttttatattttattagacgtgtttttgttaggaaaatattaaggatttagtgtataatgaggttagtttattaagggcgttgggggataaagggtattgttttttaagaagaggtagtatagtgttagtcgtggggttgaaagaagtattgaattaatttttttttttattgattttttttgtggtaaataaagtttgataggttttagatttgaggtcgtggaataatatgtgaaattttaaattatttgtagtttaggttaaaagtggaaagatttagaaacgttagtagaagtagatttggagttttatttgtgttatagattttgatttgaaggtatagttataatattttattattttggttgataggaaaagattaatttttgtgtgagaaaatattgaggattattttcgaaaatgagttttgaaagtaaaagtggaaaagtaaagttttatattttatgtatttagtatattatagaattaataagaagttttcgggggtgggttatatattatttgtttgtttagttatttatatgaattatttttttttttggtgtttttttttttttaaattttaaacgttttgttttttttgtttttttaagagatggagtgttgttttgtcgtttaggttggtgtacggtggtgttattatagtttattgtagttttgaaattttgggattaagtgattttttcgttttagtttttttggtagttgggattataggtatgatttagtgtgtttggttttttaaatatttttttttattgagtatatattgttttatgtaattagaaaaataattttaggataataaaagagttgtagggtttatataagagatattagaatattttggttttatattagtaattaattaatattttgaagtatttattatgtttattaatagttataatatagaattttattttttttgttaattttaaaaacggtgtatattttataagtatttttgaagtaatttttattttttatgtgatagaaaagtgttattatagattttaatatttgtgtatttcgttttttatttttttttgtttcgtttataaggatttaaaatattaatttggttttgaagaattagttgatatttaagaatttttttttttgttttttttttttttttatttttttttgtaataatatgaagttataatttaggaattttttaagttataggtatatttttgaatgattatttattggattgtttaggaattatgaagtttgttttttgagagtttttttttttttttttgagatcgagttttattttgttgtttaggttggttttgaatttttgagtttaagtgagttttttgttttagttttttaagtagttgggattataggtgtttattattgtaggagttatgaagttttgttttgttttttttttttttgagacggagtcgttttttgtcgataggttggagtgtagtggtatgatttcggtttattgtaattttcgttttttaggtttaagggattattttgttttagttttttaagtagttgggattataggtaggtgttattatattcggttaatttttttgtgtttttagtagagatgggttttattgtgttagttaggatgatttttattttttgatttgtgatttgttcgtttcggttttttaaagtgttaggattataggcgtgttaagttgtgttcggtgaagtttcgtttttttatgttattttttgttttgttgtttatttgtcggtttgattatttttattgtttgtaggttttttttttttttttttaattaaataaaatagagatagggtttttttatatggtttaggttagttttaaatttttgggtttaagtagttttttcgtttcggttttttaaagtgttggaattataggcgtgagttttatgttcggtttgtttgtaggttttttaaaggtagattagttatttatgtaaggaggaggggtagaattatttggttttagtttataaatgggtaagtttatattattggatattttttatttttttgtttagttatatgtagtgtgtaaggtattgtttttggggttggatatatttttttttttttatttttatagtagttttgtagaagtagttttattattattttgtagatgagaaaagtgagattcgtagtattttagtgagtggttaggttagttatatagttttttggtttcgtgtgggatttttgtttagatttttttggttttcgaatacgtattttttacgttacgtaatgttgttcgtgttattagattttttttagttgtgagttgagttttttttagagttttagttggttttttgaatgtttatttaaaatttttttagtttggacgaatgttaattgtttggtaggagacgttttttatttttttagaatttttagattattaggggagaggagtgttttggatgagtttttgaagggtgagtgtattaacgaatttgagtggaaagggttttttggtagcgatattatttttttttttgagaattcggtgaattatggagaaaataattttgtaagtaggatatggtaatagttaagtagtttgaaaagttattagtttttaaatttattaggaaatttttatttattagttggaaaatttagtttttttttatcgttttttttttttttttttttttgagatggagttttattttgttatttaggttggagtgtagtggtgtgatttcgttttattgtaagttttattttttaggtttatgttatttttttgttttagtttggaattatagggtattcgttattacgtttggttaatttttttttttttgtatttttagtagagatggggttttatcgtgttagttaggatggttttgattttttgatttcgtgatttattcgtttcggttttttaaagtgttgggattataggtatgaattatcgcgttcggttttttttttttttttaattttttaaattttgtgtagaaacgagggttttgttatgttgtttaggttgtttttaaatgtttgggtttaagcgatttttttatttttgttttttaaagtgttgggattataggtgtgagttattatatttggtatttttttttttttttaggtttgaaggaggaaatgttattttattataggttgagtattttttattttgaatgtttgggattagaggtgttttggatagattttttttaggttttggaatatatttatttatagattgagtattttaaatttgaaaatttaaaatttaaaatgttttaatgagtattttttttgagtgttatgttagtgtttaaaaagttttaggttttggagtattttggattttggatttttatatttgggatgttaaatttgtattagtagttaaattgtggaatgttaaggttttatttttatgttttatggaattcgatataattttatttataaggaattagggttattgtagtatgattaggaatttggttaaattttacgatgaagtttagaattaaatttatgtaaaaaaggagatgtgagttggtttgagttttggaattgaatgtttttttttttaaaatattaatttaaattagatggaattgaatttttttatggaaattttgtatttttattttgagttggtaaagattatttagtataagttgatatgattggttgtgttaggaatgtgtataatttgggtggttggaaatttaatggtttggagatataatttttttatattttatagatatgttaggtgataaaattagagtaggtatagttttcgttttttagaaattgataattgaaattaatattagtattaattatatggtggatattgtagaacgttttatttttttgttttattttttttaagaatttttgtagtaaggtgttattttatagtggggaaatttaggtttaggaagatttggttttttaggttatattgttagtaagtggtagagttgaatttagagttagagttgtttaatttatagtttgaatttttttttaggtatttttgttttttaggaggaggagggtagaaggagattgatcgtaagttggtttttaatcggttggtttgagaatggggaagaggttattggtatagtattaggtattatagtaattatcgttttatatggttatttttagtattttttatatggttttagttttattttattggttgtttaaggattagtattttttatatgatagttgagtatggtatatgatttttttaatttaggtgggttttttagatttattgttattttttgtggggtttaggataagggtatatttgaaggtatatatatggtatgtgggatatagtaagttaataaattgggaaatatgttttgtttttttatgttgataatagattttgtatataatttggaaggatgagtttttgaattttttgagtttttgtataagtgtagaggtttttggagagttgtttttgattgatatgtttttttgtttttttttttgtcgtcggttttttttggttttgtggggagttttatagatagtttggatggattttttggtttttatgtttagttttatttttgtttttgtaaatagttatttattttttggttattatttaggttaagatttgatttattgatggtataattttttttaggaggatggatttgaaaaaatgtttgtatagattttgggagtgggtgtggagtttgggggatagggaattttggggcgttgggagtttggtttggtacgtgggatgtggatttttggggtggtatgtttttttggtggtagagattgtatatttcgtggggtggggtgtagtgggaggagttagaataggttttgggaagtagaggttttttgttaaggtttaagggtagtattgggtttttacgtagagtgtttttcgaagaaggtttggaggtagaaaggagaattgtagttatttggaaattggtttattcgttatttcgaaatcggcggttttttattttttttgtagttttttttttttttataggagtagtacgttattgttagttatgttggtttcgtgtaggggtttttgtgagggattgtattaaaatttgtagtcgaggtggggagaggaggtgtgtgtagtttttaaaatgtttttttgtaggtttttatcggttattttaggggagcgattttttattttatttttttggagagggtttaagtttttttatttgtttgtagagaaatgttaggaaaattatttttgttatgggatttttttaaattttaaagttaggaattatgttttgaggatttttttagaagaaattattttttagttagattttatgcgtattttaattttgttatagt

SEQ ID NO: 696 - DNA, 11296 bp, Artificial Sequence
  chemically treated genomic DNA (Homo sapiens)
attgtgataaaattaaagtgcgtatgaaatttagttagaaagtaattttttttgaagaggtttttagagtataatttttgattttaaaatttaaagagattttatggtagaaatgatttttttagtatttttttgtaggtaggtaaaggaatttaagttttttttaaggggatggggtggaggatcgtttttttaggatggtcgatgagagtttgtagagaagtattttagaaattatatatattttttttttttatttcggttgtagattttgatataattttttataagaatttttgtacgagattaatatgattgatagtagcgtgttgtttttgtggaaggagaaggggttgtagaaaaagtgaaaagtcgtcgatttcggagtggcgagtgggttagtttttaaatagttgtagtttttttttttgtttttaagtttttttcggaaagtattttgcgtgagaatttagtattgtttttgaattttgataaggggtttttgttttttagggtttgttttggttttttttattgtattttattttacggggtatgtagtttttattattaaggagatatgttattttaggagtttatattttacgtgttagattaggtttttagcgttttaggattttttgttttttaagttttatatttatttttagggtttgtgtaggtatttttttagatttatttttttgagggaggttgtgttattagtggattaagttttgatttgaatggtggttaagggatagatagttgtttgtaggggtaagagtggaattgggtatgaagattagagagtttatttaggttgtttgtgaggttttttataaggttagaaagagtcggcggtaagaagagaagtaggaaagtatgttagttagaggtaattttttaaaggtttttatatttgtgtaggaatttagagagtttaagagtttatttttttaggttgtgtataaggtttattgttaatataggaggatagaatatattttttagtttgttagtttgttatattttatatattatatatgtgtttttaagtatatttttgttttgggttttataggaggtggtagtgggtttgaagaatttatttgaattgaggagattatgtgttatatttagttgttatatgaagagtattggtttttaaatagttagtgaaatgaaattgaagttatataggaagtattgaagatggttatgtgagacggtggttattgtggtgtttggtgttatgttaatgattttttttttatttttaaattagtcggttagaaattagtttgcgattagtttttttttgtttttttttttttaagaggtaaaggtgtttgaggaggaatttaggttgtgggttaagtagttttgattttgaatttagttttgttatttattagtaatgtgatttggggggttaggtttttttgagtttgagtttttttattgtaaaatgatattttgttatagggatttttgaaaggagtagagtagaggagtgaagcgttttgtagtgtttattatgtgattagtattggtgttagttttaattgttagtttttagaggacgggaattatatttgttttgattttattatttagtatgtttgtaaaatataagagaattatatttttaggttattagatttttaattatttagattgtatatatttttagtatagttaattatgttagtttatgttgaataatttttattaatttaaagtggaagtgtaagatttttataaagaagtttaattttatttggtttgagttggtgttttaaaaaaaaaaatatttaattttaaggtttaaattaatttatatttttttttttatataagtttaattttgaattttatcgtgggatttaattaggtttttaattatgttgtaatggttttaattttttatgagtgagattgtatcggattttatggggtatgagaatgaaattttggtattttatagtttgattgttggtataagtttagtattttaaatgtgaaaatttaaaatttaaaatgttttaaaatttgaaattttttgagtattgatatgatatttaaagaaaatgtttattggagtattttgaattttagatttttagatttggaatgtttaatttgtaagtaagtatattttaaaatttaaaaaaaatttgtttaaaatatttttggttttaagtatttaggataaggggtatttaatttgtaataaaatgatatttttttttttaaatttaaaaaaaggaaggagtgttaggtgtggtggtttatatttgtaattttagtattttgggaggtagaggtgggaggatcgtttgagtttagatatttgggggtagtttgggtaatatagtaagattttcgtttttatataaaatttaaggagttaaaaaaaaaagaaaggtcgggcgcggtggtttatgtttgtaattttagtattttgggaggtcgaggcgggtggattacgaggttaggagattaagattattttggttaatacggtggaattttatttttattaaaaatataaaaaaaaaaaaattagttaggcgtggtggcgggtgttttgtagttttaggttgagataggagaatgatatgaatttgggaggtggagtttgtagtgagacgagattatattattgtattttagtttgggtgatagagtgagattttattttaaaaaaaaaaagaagaaggaagcggtggggagggattagattttttaattagtagatgaggattttttaataaatttgggagttagtagttttttaagttgtttaattattattatgttttatttataaaattattttttttatggtttatcggatttttagagaggagaatgatgtcgttgttaagggattttttttatttaggttcgttaatatatttattttttaaggatttatttaaaatattttttttttttaatgatttgaagattttagaaaaatgaaaagcgttttttattaaataattagtattcgtttaggttaagggagttttaagtaaatatttaaagggttaattgagattttggaaaagatttagtttatagttgaagagaatttgatggtacgggtagtattgcgtggcgtagagagtacgtgttcggaaattagagagatttgagtagaaattttatacgggattaagaggttgtatggttggtttggttatttattgagatgttgcgagttttattttttttatttgtaaaatagtgataaggttatttttgtagggttgttgtgaagataagaggggaaaaatatgtttagttttaagagtaatgttttgtatattgtatgtggttgagtaaaggggtgaagaatatttaatagtatagatttgtttatttatgaattaagattaagtaattttgttttttttttttatatggataattgatttatttttagaaggtttataaataggtcgggtatggggtttacgtttgtaattttagtattttgggaggtcgaggcgggagaattgtttgggtttaggagtttgagattagtttaggttatgtggagagattttatttttattttgtttaattaaaaagaaaaaaagaaggtttataaataataaaaatgattaaatcgatagataagtagtaaaatagaagatgatataagaaaacgaaattttatcgggtatagtttggtacgtttgtaattttagtattttgggaggtcgaggcgggtagattataggttaggagatagagattattttggttaatatagtgaaatttatttttattaaaaatataaaaaaattagtcgggtgtggtggtatttgtttgtagttttagttatttgggaggttgaggtaggataattttttgaatttgggaggcggaggttgtagtgagtcgagattatgttattgtattttagtttgtcgatagaagacggtttcgttttaaaaaaaaaaaaaataaaataaaattttataatttttgtagtggtggatatttgtagttttaattatttggaagattgaggtaggaggtttatttgagtttaggagtttaagattagtttaggtaatagagtgagattcggttttaaaaaaaaaaaaaaaaatttttaaaaaataaattttataatttttggataatttaataggtgattatttagaagtatatttatgatttaagaagtttttaagttatgattttatgttgttgtaaaaagaaataaagaaaaaggaaaaatagaaaaaaaagtttttaagtattaattggttttttaaaattaaattaatattttggatttttgtgggcgaggtagaagagggtggggggcgagatatataagtattgaaatttataatggtatttttttattatataggagatgaggattattttaaaagtatttataaaatatgtatcgtttttaaaattaataaaagaaataaggttttatattataattattaataaatatagtgggtgttttaaaatattggttagttgttgatatggagttaaaatgttttaatgttttttatgtaaattttataatttttttattattttagaattgtttttttaattatataagataatatatgtttagtgaaaaaaaatgtttggggggttaggtatattagattatgtttgtaattttagttattagggaggttgaggcgggaggattatttgattttaggattttaaggttgtagtgaattatgatggtattatcgtatattagtttgagcgatagagtaatattttattttttaaaaaaataaaagaaataaaacgtttaaagtttggaaagaaaaaggtattaagaaaaaaaataatttatatagatagttaaatagatagataatatatggtttattttcggaagttttttattaattttgtaatatgttaaatatataaagtataaaattttgtttttttatttttatttttagaatttattttcggaaataatttttagtgtttttttatatagaagttgatttttttttattaattaaaatgatgaagtattataattatgtttttaaattaaagtttgtaatataaataagattttaaatttatttttgttagcgtttttgaatttttttatttttaatttagattataaataatttaaagttttatatattgttttacgattttaaatttaggatttgttagattttatttgttataggaaaggttagtgaaagaaaagattagtttaatattttttttagttttacgattggtattgtgttgtttttttttaaaaaataatgttttttgttttttagcgtttttagtgagttagttttattgtatattgggtttttagtatttttttaataaaggtacgtttaatgagatatggaggtttagaggggattttttttattttaagtaggtgttagattgacgaacgttttagaaaaatatgttcggtttgtgtttagttatcgttcggatgtattgaataagtattttattcgtggtagttttttgtatgaatggttagatattttgaggatgtttgtgtattattgtgtgttaggtaaggtgtttatgtttaagtaagttttaaaaaaaaaattaggattttaatgtatatttattaaagttttggcgaggttaggtgttttgtttaaggtgttatagttggaaattgtgttttagttaggtgtgtgagatttatagttttattagtttattttgtggttataatttatttacggtttgtattagaaacgtgggaggttgtttttgggttttataagttttttagatatttttagaaaacgttagtttaggttgtttacggggggtttcgttgttaaggagaagtgggtatagagggattaaggattatgggttttttttagtagggagggaattgtagggtagatgtttatggtggtgatgatgaagatgttttttttattattttttatggtaggtttataatatattttttttcgcgtaatttttttaatagtttggttattgtaggtgataataattaaggttttgggaaattttagttattgttttaagttatttagtcgatcgatgggatttgaatttgcgttttttggattcgggcgtttttttcgcggtttttcgagttttgagtgttgtttttagttttttttttttcgcgacgtttttcgttcggttgttcgtagtatttttaaggtcgtttttcgaatttttcgggcgcgagggtttaggcgttagttgttcgttttgtttacgtttttttagggattttggttttggcggtcgtcgcgatagatttatttatcgttttgtttacgtttttttagggattttggttttggcggtcgtcgcgatagatttatttacgcggatcgcggagtaggacgttcgcggcgcgtagggtcgtagttatgtttgcgtcgagtgaacgtattgtttgggtagtttcggttcgagttcgggtttttttcgcggcggcgcgtttaggtgttcgtttagtagtggtcgagtcgggtagcgatttttacgcgcgtttttagttttttgatttcgcgttttttcggcgcgttcgttttattcgttgtcgggtcggggcgggcgaggttaggtagagatacgtttttcgcggagagttcgttttagttgggcgtcgttttttgcgtgaaaatgggttcgggggttgagttagaagttcgttttttattattatcgtaggttattgtaaaatttgttggatttttagttgcgtgtcgtttgtatttgttaaattagcgaagttaggatttttagttatgatttagtaaataatttttttcgacgtttttattattattatttagatataaggatgtttttgttttagttttttagtttgtttgtttagttataatataagtgtgtagattttgttttgttttgttttatttttagaatagaaaaagggattatttagtttttttgtattttttttgtgtagtagaatttgataggtgaaatttattgaagagtattaggaaaagtgaaggttagtttggtaagtgtattttttggagggagcggtagtgatgaggtttgtttgtattatattcgcgtatttttttagtttagtcgttcgtttcgtttttaaggtcgtatattgagattattgggaggaataggcgcgtattttatttttatattttcgttagtttattttgtttatatatgtttagtgtattgtggagtaggaaattagtttttggtatagaaaggttttaggtatcggtatttattgaataaatattgagtatttattatgtgtattgggaaaatagtagtgaaaagagtagacgggggtttatatggggttaggggagatatagaaaataattataatatgtaatattttgaatgatggagtttttttacggttttttttttttttttttttttttaggataaaagaagaatgaagtaaggtaaaagagatggggtagggtgggggaagggattaatgtaatttgaagtaggtgggttagagttttatatattcgagtaaaggttttatatatatttgagtaaagggggtaagttatatggaatatttagggaagatggagtttagatttagttgaaatttagttttttgtagtttaaatatgtgttattgatggaattagtttattttttattaaagttggtttttttgatggttataagtttaatgtaaaatgttaaattaaatggatagttttttatattatttatatgatttttatatttaagcggatgttttgagaaaagtatagtaaaatttgttttaggtattaatttattttttttatatgtgtggttattttttatttttataaaaaaattatgagtttttttaagttgttttgtaaagaggtgatttttatggataatatatttttttatttatagtttgaatttatttttgttgttgttgttgttatttgtttgttttgtatttttagtagatatagagttttgttatgttggttagattggtttcgaatttttgattttaagtggtttatttatttcggttttttaaagtgttgggattataggcgtgagttattatgcgcggtttgagtttattttttttaaagaaattaaattgaaaggttgtatatttcgtaatgttgtgttggtagatatgtagataaggttagagaataaaatggtcgggggggttagacgtttgagttatgaaggttttttttgttttttttgggaggttttggagaaagttattttttttatttagggtgttgggtttttttgttgggtagagataagggggtttttggttttttttaggtaaacgttgatgattagtgataaggtataaaggtgttaagttttattagtataaaattaatggttggcgtgggttaaatttttgtttagaaatgattatggaattagtaagatatattttattaaatattttaatgaattagtattattttattttttttattcgtattttgtatttttatttttattgatttttttttttattttttatttttttattaattaattaaaatacgtggtttttgttttttttagagggagttttattttgttgtttaggttggagtgtaatggtacgattttagtttattgtaattttcgttttttgggtttaagtgatttttttgttttagttttttgagtaatcgggattattggcgcgtgtaatacgttcggttaatttttgtattttgagtagatacggggttttattatgttggttagattggtttttaatttttgattttaagtgatttattcgttttaattttttaaggtgttgggattgataataattatgagttattgtgttcggatttggtttatatttttgatgggttttgaatttatatatagagttatttttttcgaggattttttataaaaaaaaaggtttgttaatagtttttacgtgatgatagtttttatgagtagtatttatatttttaaaattttaaagggtttttttattagtagatgtgtttttagagaaagatataaggtataggtgattgtttaggatttttttttagtttttgttattatttttttggggatgaggtttatagtagattttgagtgatcgttttatcgtgaagtgaattttagaagataattttttattatttaatttttaaatattaagatatcggatagtgattaaattaaggttggttggtttgttttaattttttttttttttttttttttttttttttttttgaaatggagtttcggtttgttatcggggtggagtgtcgtggcgagatttcggtttattgtaatttttattttttgggtttaagtgatttttttgttttagttttttcgagtagttggaattataggtacgttgttattatgtttggttaattttttgtgtttttagtagagatagagttttattgtgttagttaggatggtttttattttttgattttatgatttatttgttttagttttttaaattgttgggattataggcgtgagttatcgtgtttggttaatttatatgtttagtttgtattatatttatttatattggtaaagaggagttttgggttgttttgaatttggaagtttagggtgtatgtttggtagggttatggtttgagtagtttttgtagtggggttatatttataggaatttgagtattagtagggtagagtatagggggtttttttagaggaaattggaatatcggatagaagaatttaatagaattgtttttaatattttagtatttagaattgttttttagtagttttgttaagaaggtgttggtttatttatttgttatttcggatttatatgtaaatttttattttaaaattttagaaatattgaaatgtaaaatatttataatttcgttaattgaaagataagttaaattttttttttaatgttggagttaagaattgtatattaaatttattaggggaattggggtataaatatatatttaaaaagtattttaaatttttaagttatttttggttataaatgaatggtagataaatatatagtgattagacgattgtttttagtgaaattaagtttattatttatagtaggtttattacgtttattgggtatattatttgtatatgtgaaaatttttaaaataatattatagtttaaaatttttaaaagtgttgatatgttaaaaattttaatgaatattttttatggaatttagtatttaaaatagttatttttttatttatttttattattatttttattagatttattataataggggtatatatttattaaaaagataatttaaggttaggtatggtggtttatatttgtaattttaatattttgggagattaaggaggataatttgaggttaggagtttgagattagtttggttaatatggtgaaattttatttttattaaaagtataaaattagttgagtatggtggtgtacgtttgtaattttatttattcggaggttgaggtaggaaaattgtttgaatttgggaggtggaagttgtagtgagtcgagataacgttattgtattttagtttgggcgatagagcgagattttatttcgaaaaaaataaatagttaatgtattaatagttttttatattgtaataattatttttgaatgtgtttttaggtagagttatgtattatatttttgaaatttagttattaattagatatagtatttgttatttttaatgattttatacgttttattgttgatttttttatttattttatgtcgagttttgagaaggaagatggggaaatgttgttttaaatattttaatagagaaggaaggtacgagatttaagttaatttaaagtaatgagtagaacgttgtatgagaaatttttattatatcgtttattaggtttttgattgtagtgacgtttagtattataagtaggggtattagtgtggtgtattaagttagggtagagatttgaggaattgtttaaaagaataaaagggtttatgtgtgtgtttatgaaggtatattaagtttataggtaatttattgttaattttaagtttgttaattttaagttttattatcgttattatataagtttatattttgtagagtatataggaaaggttttttaagtatttggataatttttttttagtggttttttttagtttttggatatttggaatagagtttagagggtagtggtttttgaaattattttattgtaaatttaat

SEQ ID NO: 697 - DNA, 5377 bp, Artificial Sequence
  chemically treated genomic DNA (Homo sapiens)
gggggtgttcgttggtttttttgggttaggttgattattatggtgtttttttgtatagagatatcgggaaacggttcgaggtgcggaagatcgtgatcgcgtgtttgggcgagtttaattatattattcggttggagtacgtttaggcgcggtttattttgttttataatcgtcgtggcgatttggttatttatttggttagttttatgggtattcgttttattttgttggtagttaggtgtttgttttgtttttgttcgttttgtttagcgtcgtcgttttttatagttcgcgtgtttgtttttgttcgtttatacggtttagggggtattgagtgttatttagtggggtatttttggtattttgggagggataattttgttttgtgggattgttttatgttgtaggaatttttggtttgtaattatttaatgttagtagtgtgttttattttgtgcggtgtttgtgtatttttttagaattttttagttgagtacgtttggtttattgagaaatagttaagttagtaggtatttttggttttatggggttggtttgcgtgggggaagggtgtgtggtttatgtgttgtgggttagatgtttttggtttggggtttcgtagaggttttagggttgtgtgtatttttttttttaggttatatgattatttcgtagatgggtttaatgattgggtttttatgataatttatttttgggatgaggatttttttggcgagtgggttttagagattgaaaatattagcgaagttaataattatggtattgggggtatttgaggggtaggggtacgaggtggagggttggtaggatttcgagtattgggtgtggtgttagtattgttttaatttttgtttttttttcgttttggaatagggacgttgattaagtttattttcgtattttatggtatcgtttttgaggggttgttcgtatttttagaaagtagtggttgtaagatttttacgtttagttaggtttgtgtgggttagtagtgggtgttgttgggttttgggggtttgagtttgggggtaaggcgggtgtttgttttgaagtttagttttaatagaaaaaagttttaagagatttagggtttttggggtttttgggatgattatagttttggggttggaggattttggggatgtggtgatttggtttggggttgttgtggttttggggttatagtttgtttagttgatatatatttgtttttttttttacgtcggtagtgtgcgaggaaggtttttttttgtattagaagagttgtgtttagtattgttttttagggttcgttttttaagttttcgatacgtattatagtatcgagaatgacgtggagattattcgggttagcgtttgcgttttttgttacgttttatgtgttatatgttaggggtcggttttgatagattgttttagttgttttagttacgtttttttggattttgtggagtagatttgttttcggtaaagttagagtagtcgagagttttcgttatagtagtagttatttcggttgttttcggaggtggaggcggggtaacggttgcgggtagggttgttgtttttatatttgtttgaggtggtggtcggttttagttgcgtttttatcgtgttggttttcgttattgtttttttggttttgtagttgcgttttggttttagttttcggggggtgaaggtgtatattatggatcgtggttttattttttataaggggttgttttttgaagtttggtaggaggagtgttcgtttgatttagaagaggacgagggtcggggcgagaggatcgtttttattaaagattagagcgttttttgatgagtttattgtttatttttttaagttaattttttttttgggtattttttaatttattaaagtatttttttattttgggattgggtttggattttagttgggaggtaagaggggtggagattgttttttattttattttcgggtttatttggttatttgaggtgggtttaggattagttggggcgtggggagggtcgtattttatttttagtattttttttatgtggagaaaggagtgaaatttttagggtagtttgtttcggtttcggttttagttagagtttttgcggagtgaagaggggtagtttttgtttgttgggatttttgatttaggtcgtagtttttgtttttttttgtttttttaaagtaataatggttttatttaggtagtcgggggttggtttaggagatatttgagggaggaggttatttttttaagggtttttgtattttttattttgttttttagttttggtgagttttggcggtagtagttattataggaagggattaaggtaaggtaggtgtttttaggtgtgtacgtggtatgtggtttgtggtttgtgttttatgatttatttttgtgtttcgtgtttttattattattggttattaggttggcgtagttaaggtcgaagttttggttgaattttgtgttggtgttttgattatcgtttttttttttgtattcgtttttttcgttagggtttaagtttttgttttttgagttcgggttgtttgggttgttggtatttatagatttggagtttttgggtgggtggtggggaggggcgttggtttagtcggtttttttggttttttattcgatgttgtttttttttgtggggattttaggggttgtttgaggatatatttttattttgtgattattttattttagatgttgatgatttgtttttgtatttttaatgggggtagtagttggattatttacgtttttatatttatcgttcgttttgtttttttttggttgttttggttttgaggtgtgggggttgtagtatgttgttgaggagtgaggaatagttgagttttaagttttgaagaggcgggttagttaggcgggtttaaggaaagggggttttagtgggaggggtaggttgatatttgtgttttaagtggggttcgttatgtcgggggtttataggttattggttttttaagtgttagaggtgggtaggtggtggtattgagtttttttaatattgtgttttggtggagaaagtattgatttgttatgttttttttaaatttttttttttgacgtgttttttgtattttttttattaggataattagtttttttttatttgggagttttttttttttttttattttagttatttttggtatttagttatttgtttaggggtgttttttttttttttatttttttgttttcgtggttagttcggttggttttgtaagatgttgggttggtgtatagtgattttttttttgtaatttaaataggtttagtattgttggttttatttaatggatatgagataatgttagaggttttaaagtgattaaacgtgtagattatgtaaattaggtttagtttttagtgtggtatcgttgtttttgtatcgtagttgaggatagggggttagttaggtttatatagtggtttgtttgtttggatgtgggtttaagttagaaggttaaagttttttaaggggcgggaggatgcgttagtttttagtggaggagttggtgtttttggggtggggttggtgatttttggtttttaggagttgagtattaaatttttaaagttttggtttttagtagtgtgaagaattgggtttattgtgtttttttgggttgaagtgatttggtcgttataggttatagggttgaggtttaaggtggagggaggtttgattgaattaagatgattttttgtggggagtttgagttttaaatggaaaattttacgtttgttcgttttttaatttttgttttttgatttttttaggttttttttgggataggaagtttttgtttgggggtaggaggatggggataaaattattaggatttgtattcgagaagtagtttttgttcgggatatttatttggaaattttatttaaatggaagttggcgtttgagtttttttttagggaatttcgtgaggtggggagggttgggattagggtttttttttttttttttgcggtggttttggtttggtgttaggattgcgcgtttttttttagtattcgcggatattttgggtttttttgggtttagtatttgtttggggtttcgttttgggtttttttttttgatttttattttgcgttttttttcggtgttttcggggcgttgtcgggttttggggtttgcggggcgcgggcggtttttggttgggttattttttttcggtttttttttttttttcgttttcgtggtcgtgcggtcggttagaggttgcggtttagcgcggagtaggggggttggtaggcgtcggggcggtcgggtcggtttcgttcgtttttttttttttataggttcgtttcggggtttgggttaattgaaatcgcgggaggaggaagcgcggaattaggaattggtcggggttcgtatcgggtttgagtcggttcgaggtcgttttaggagtagttgttcgtgcgggtatttttagtttcggggtttggaggagcggtgggagttgggggcgcggtaggtaggggtagagtaggcgtttcgagggttagagatttatttaggtgggggtaggggtcgcggaagggcggggatggtcgtaggggtagggtttaggttgtgggcgtttgaggttttagttggggtaggtttggtttgtcgaggatttgggtaagggtgtttttgtaaggggtggtgggtggaagggtttggggagggaggttttaggttggtttttgttttcgaacgtgcggaggagattttgacgttaaggaagtaatgagggttagtttttaggttaggttgttgttgggtatttatggttgcgtgtgagcgaggtaggattttatttttttttcgtttgtagtttattttgattttatagtttttagttttttcgttttatgttttcgtttttagttgttgttttgtttttagggatggttttttttttgtttttagaatagtattatgggttttttttttgagttgtgtagtttttagggttacggggttttgtagtaaatgtaggaggtcgagtttcgtttattggagggtatgagaaagtggatggtttagcgggttaagagtgatagggagtatgtaggattgttttattatatgtttttgtaggatagtgggggttagagtcgggttattagttttgatagttttattagttaggtgggtttttatgggattttggtgggtgttggttgtatttgttttttttttttttttttgggggttttttggggtagtggttggagatttggtaggttaaggtttgggagttattgtgtttttttttttgttttttttatttgtgttatatagt

SEQ ID NO: 698 - DNA, 5377 bp, Artificial Sequence
  chemically treated genomic DNA (Homo sapiens)
attatatagtatagatgggggaggtagggaggggggtataatggtttttaagttttggtttgttagatttttagttattgttttagagggtttttaggagaggaaggagaaggtagatatagttagtatttattagagttttatagagatttatttgattgatggggttgttagggttgatggttcggttttggtttttattgttttgtagggatatgtggtgaagtagttttgtatattttttgttatttttgattcgttgggttatttatttttttatgttttttagtagacgaagttcggttttttgtatttgttgtaggatttcgtggttttgggggttgtatagtttagaagagaagtttatagtgttgttttggggatagaaaaggggttatttttggaggtaaggtagtagttggagacggaggtatgggacgaggaggttggggattgtagggttaggatggattgtagacggggaggaggtggggttttgtttcgtttatacgtagttatgggtatttagtagtagtttggtttggggattggtttttattgtttttttagcgttagggtttttttcgtacgttcgggaataggagttaatttggagtttttttttttaggtttttttatttattattttttatagggatatttttgtttaggttttcgataggttaagtttgttttagttgaagttttaggcgtttatagtttgagttttgtttttgcggttattttcgttttttcgcggtttttatttttatttgggtgggtttttggttttcggaacgtttgttttgtttttgtttgtcgcgtttttagtttttatcgtttttttaggtttcggggttagaggtattcgtacgggtagttgtttttgggacggtttcggatcgatttaggttcggtgcggatttcggttagtttttgatttcgcgtttttttttttcgcggttttagttggtttaggtttcggggcgggtttgtggaggggaaggggcgggcgggatcggttcgatcgtttcgacgtttgttagtttttttgtttcgcgttgggtcgtagtttttagtcggtcgtacggttacggaaacggaagggaggagggggtcgggaaagaatggtttagttaagagtcgttcgcgtttcgtaggttttagggttcggtagcgtttcgggaatatcgggaaggggcgtaaggtgggggttaggagggggagtttagggcgaggttttaggtagatgttgggtttagggaagtttagggtgttcgcgggtattgaggggaggcgcgtagttttagtattaggttagggttatcgtagaagagaaagagggaattttggttttagttttttttattttacggaattttttaaggagaggtttaggcgttagtttttatttgaataaaatttttaagtaaatatttcgaatagagattgtttttcggatatagattttagtggttttgtttttatttttttatttttaggtaggggttttttgttttaagggagatttggggaaattaaggggtaggggttggggagcggataggcgtggagttttttatttgggatttaggttttttataagaagttattttgatttagttaggtttttttttattttaggttttagttttatagtttgtggcgattagattattttagtttaggaagatataataggtttagttttttatattgttggaaattaggattttgggagtttagtgtttagtttttgaggattaggggttattagttttattttaggggtattagtttttttattaggggttggcgtattttttcgttttttggaggattttggttttttgatttgggtttatatttaggtaggtaggttattgtgtaggtttaattggttttttatttttagttgcgatgtaggagtaacggtattatattggagattgggtttggtttgtatagtttgtacgtttaattattttaaaatttttaatattattttatgtttattaaatagaattagtaatgttgggtttgtttaaattataagaaaaaaattattgtgtattaatttagtattttataaaattagtcgggttggttacgagggtagggggatgggagaggagggggtatttttgggtagatggttgggtattaggaatggttagggtagaaaagaaaaggggatttttagatgggaggggattgattgttttaatgggaggggtgtaaaaggtacgttagaagaggaggtttgaggggggtatgataggttagtgttttttttattagggtatagtgttgggggggtttagtgttattatttgtttatttttggtatttggagagttagtgatttatgaattttcggtatggcgagttttatttgaaatatagatgttagtttgttttttttattgggattttttttttttgagttcgtttggttggttcgtttttttaggatttggggtttaattattttttattttttagtaatatgttgtagtttttatattttagggttagggtagttagggaggagtagggcggacggtgggtgtgagaacgtgggtagtttagttgttatttttattaaaaatataaaaataaattattagtatttaaagtgaaataattataaagtgaaaatatatttttaaatagtttttgaagtttttataggggaaagtagtatcgggtgggaggttagagaggtcggttgggttagcgtttttttttattatttatttaggggttttaggtttgtgagtgttaatagtttaggtagttcgggtttagaaaatagggatttgggttttgacgggagaggcgggtgtaagagaggggacggtggttaggatattagtatagggtttagttagagtttcggttttggttgcgttagtttggtggttagtggtggtggaggtacggagtataggggtgggttatgggatataggttataggttatatgttacgtgtatatttggaggtatttgttttgttttggtttttttttatgatggttgttgtcgttaagatttattagagttgggggatagggtggagggtgtagaagtttttggagaggtggtttttttttttagatattttttaggttagttttcgattgtttggatgggattattattgttttagagggatagggaagggtaagagttgcggtttgggttaggaattttaataagtaagggttgtttttttttatttcgtaggaattttggttggggtcggggtcggggtaagttgttttaaaggttttatttttttttttatatggaaggggtgttgagggtggggtacggttttttttacgttttagttggttttgggtttattttaggtggttaggtgggttcgagggtaggatgggaagtagtttttattttttttgttttttagttggggtttaaatttagttttaagataaaaaaatattttggtgaattaaaaagtgtttaaggaggggattggtttgagggggtgggtagtgggtttattagagggcgttttggtttttgataaaggcggttttttcgtttcggttttcgtttttttttgagttagacgggtattttttttgttaggttttagggggtagttttttgtaggagatgaggttacggtttatggtgtatatttttatttttcgaaaattaaagttagagcgtagttgtaggattaggaagatagtgacgaagattagtacgatgaaggcgtagttgaggtcggttattattttaggtaggtgtgagggtagtagttttgttcgtagtcgttgtttcgtttttattttcgggggtagtcgaggtggttgttgttgtggcggggattttcggttgttttggttttgtcgggagtaagtttgttttatagggtttaaggaggcgtggttggggtagttgaggtagtttgttagggtcggtttttggtatgtggtatatgaggcgtggtagggggcgtagacgttggttcggatggtttttacgttattttcggtgttatagtgcgtatcgaggatttggggggcgaattttggagggtagtgttggatatagtttttttggtgtagggagaagtttttttcgtatattgtcggcgtgggagagagggtaagtgtgtgttagttaaatagattgtagttttaggattatagtagttttaagttaagttattatatttttaggattttttagttttaggattgtggttattttaagagttttaggggttttaggttttttgagatttttttttgttagagttgggttttaggataggtattcgttttatttttagatttaggtttttaaagtttaatagtatttattattgatttatataggtttgattggacgtgagggttttgtagttattgttttttggaggtacgggtagttttttaggggcggtgttatagagtacgagggtgaatttggttagcgtttttgttttagagcggggaggaggtaagagttaagatagtgttggtattatatttagtgttcgagattttgttagttttttatttcgtatttttattttttaagtgtttttagtattatagttgttggtttcgttggtgtttttaatttttaggatttattcgttagagggatttttattttaggaatgagttgttatgaaggtttagttattaaatttatttgcggagtagttatgtggtttggggaggggagtgtatatagttttgaggtttttgcgggattttaagttagggatatttaatttatagtatatgggttatatattttttttttacgtagattaattttatggggttagaagtgtttgttggtttggttgttttttagtgagttagacgtgtttaattgggggattttagaaaggtatataggtatcgtataaggtggggtatattattgatattaaatggttgtaagttagggatttttgtaatatgggatagttttataggataaaattgttttttttaaaatgttaagagtgttttattgagtagtatttagtgttttttgggtcgtgtgagcgagtaaaggtaagtacgcgggttgtgagaggcggcggcgttgggtagggcgggtagggatagagtaagtatttggttgttagtagggtggagcgggtgtttatggggttgattaggtggatggttaggtcgttacggcgattataggatagggtgagtcgcgtttgagcgtgttttagtcgagtgatgtggttgggttcgtttaggtacgcggttacggtttttcgtatttcgagtcgtttttcgatgtttttgtgtaggagagtattatgatggttagtttggtttagagggattagcgggtattttt

SEQ ID NO: 699 - DNA, 16602 bp, Artificial Sequence
  chemically treated genomic DNA (Homo sapiens)
tatatggtttagaatttagaagaaaagttattttttttttttttgagatagagtttcgttttgtcgtttaggttggggtgtaacggcgtaattttggtttattgtaattgtcgttttttaggtttatgttatttttttgttttagtttttcgagtagttgggattataggtatgtattattagatttggttaatttttgtatttttagtagagatgggtttttgttatgttggttagattggttttgaacgtttgattttaggtgatttatttatttcggttttttaaagtgttaggattgtaggtatgagttattatatttggtttgaaaggttatttttaaaatgaaattgttttataattagaggtaaatgggatttatattggaggaagtttagagataaggagaaataaaattcggtttatttaagattgataatataaatgattatttgtgtagttaagtggtaattattggtatataattattgttttttgtattaaatgaagtatataatttaggaagtgtttggaaaaaataaatgaaagaaaaaaattattattttttagttgtattttaaggaaggggaatttggtgatggttgagtgttaatagagaggtgagggataaagatatttatattgggaagagttaaattgttttatattagaagtggatttagaagggagtggagtgaggagttagagtgagaggttgggtggagagaggagtgagtggagagataggaagagatagagggatagagagtaagagagttagaggtggatatagaaggatttagaggtttatggataagaaagtaaggtttggaagagatagtgaggatggagagagattgtattatgtaaggtaaattttgtaattttttttgtgaaattgatataaataaaattatatatatgtggtattatatttattttttgtttgttgttgtattatgtgaaaagaattaatcgaagttttattatatgggatggaggggatatttgggatgatttgattttaaatatagtttatatggtatttgcgaaattttttttgggatttttggaggtatttttaatattagttgaaattagggataatggttggtttatgtggtggtagagtgggaaaaatgtattagaaatattaaaatgttaggagtagagaaaatagatggaggtttttaatacgagtttttattttaaagttataaggataaattattgtaattggtgttttgatttatgatggaattattttttatgagagtagtttcgtatagttgttataggtattgatggatggttagtgtagggaaggtagggtagttgttggttttttatgatgtttacgaagttgttggggtgggttttttttggagaaggtggagatgtatggagttttgttttatagatggtatgggggtaaaaggagaggttgttggtggagattagttaatttttgggttataaataaatatatgaatgataagttaatggtggtagatgtatatgttaggtaatgggtaaaaattttattttttataaaaagattagtgtggataaagttattaaatttttttatggtgattaagggtaaattggggttttttgtttttagattttttttgcgatttagttttatcgtttattagttgttgtttttgggtaggttattgaatatttgtaagttttggttttattaaaaatgatgataatattagtgtttattttaagggattatggtgagattatttgagataatttgtagtttaaaatacgttaatgatgagggtgatgatttttattttaagattatttgataattaatatgtattgatgattatatttattatttatatttataaagtatagtttttaggtcgggcgtggtggtttacgtttgtaattttagtattttgggaggtcgaggtaggcggattacgaggttatgagtttaagattagtttggttaatatggtgaaattttatttttattaaaaatataaaaattagtttggtgtggtggcgtatttttgtaattttagttatttgggaggttaaggtaggagaattgtttgaattgggattcgggaggttaaggttgtagtgagttgagatcgtgttattgtattttattttgggttatagagatttcgttttaggagaaaaaaaaaaaagtgtagtttatacgttagttttttggtttttttttggtttttttttttttagtttttagagttattagtattttttttttttaaatggtggggtaagtatatgttttaattaattttaatgtttattggttttgttttttaattttttgaggtgtaagtgatgtatttttatattaataatataagtttgtatgtagtggttatatataatgttaaaggtatattatatataatatggtggtttttgtgttttattttatattagaaaatagttaggatgaaaatagtttgcgtgtaagggatagatttattttttttgtgttatatgaagttatgtggaaagttgtagaatgggtaggaattaggtatagtttttataatgatttgttttataatattttttttgatatggtatttgttttttaaaaattttatttatttttattttgtgtttttttttttggttttagttttgttttttttagtaaatttagaagttttttttaatatattaattttttattttttttgttgtgtttttgaaaggttttttgtgtttttggttgtaggtttcgaacgtttaggttatttgtgttatttgtttcgcggtattttattaacgtaacgtgagggtggagggtagaattttggttttggttttttagtttttgtgggttttagttagattttaggtgttattttagtgtaattttggtgtttaatttgaggatgtgtgtggattagaaggagggattaaaatatgatttttttttttatggttagatgattaaatttgaagttttaaaaaatgtagtttggtttaaagttgtgtttaattgggaagagagaaaaatgttttggaaattttttttaggtttgggattatttttttttaattattagttattttataggttcgcggattgcgggtattatttgggtaggttgtgtttatttattattcgggaattttgtgttttggagttgttttttttttttttaaagtgtattttgtgtttttgttggaagaatcgattataggtttgtttaattttttatagttttgaaagcgttataagtagtagttgttgagttatggttgaaggggaaattattatttttatagttttgatcgagaagtttaatttgtttttagggaattataagaagtttaaatttttttattgtagtaacgggggttattttttgaggattttttcggatggtatagtggatgggataagggataggagcgattagtatagtaagtttatttttatggtattttttttttttttttgatattttttgtagttaaggtgggaggaaggtgtatatttaagtataggtatttgtttttttaaggttttatttaggtatgatatatttagaggtggagttatataaatgcgtaaaatgtttgggtttagaaaatagggatttgtgggggttattatttatttaaacgtgttttattttaagttttttaaagtattttttgttgatttaatagaacgggttgtcggtgtttaattgttgtatgtttttttaggtttttgtaattagtgaaagatttggtttcgaaggttagttaggggtttgtacgttttatgatgggatgaattagataggtatggtggtaaattttgtatagagatgtgggtttcgttttaagttaattgatttttttggttatgtttttattgggtttgatttgtgaaattttagtttataatcgtagttttatatattataaattatgtagttttttttttgcgtattacgtagatgtggttgtggtaattagtagtggtaaagttattttttagattttatagaaattggagagtaggagcgattagcgttaaatgttgaatattttttttaggattttttggtagttcggtttttagaggtgttgataaatgaaggtatgattttagagaaaagaatttttttgattatttaagtataaaaaaattttttttttttgttttggtatttttggtattggtgtgtatgtttgatattaggtgtttaggttttatcgtgatgttatttgagattttttgagttttattgtagtattagaggttataaagaagtttaaagttagatttagtttttgtttagagggttagtaattttaagagttaaatttgttataaattaagagaaggaaaattaggagatatagaagaagataggtaggaaggaagtttttgtaggattggttttaaaatgtaatgtaaaatatttattttgatatgatggtttatatattaggtggttttaattatttatggattatgtattagaggttgtaggttttaagaataaatgattatttcgttggtgtttacgttgtatttttagatgtataggtaatggggatggacgttggcgtttatacgaggtgacgttgtttttttttttttatttattgtatagattttggagatgaggagtaggaaggttgaggttggggtttgtagttgtagaattagtttttttgggttttgttttgatggtttatttttaaatgggtttgttgaatgttttatatttagtgaaaaataggtgttagaatgaggtaaaaaaaaaagattttagtttgttaaatagtatatataagtaatatttattgtaaattagtaaatttagattgtagtttattgtgttaggtatgatatataatttacgtgatttgttttatataatacgaataagttttaatttttttgggttttaagtgtttttaatacgttttaattaattttttgaaaaagtagggaatgtttttcggtttttagaatttaagaggaaagataaattttatgatatgttttttggggttaagttagtttttttggaaattttgatttttggagtaaaaaaaggttttaatattggaatttttgtagtaatggaaaatggtttaattgttgttattttattattagtataatagattgtattttgggtgtgtaatattggtataatttttggagtttatagtggatttggtcgtttgatttaagatgttaggagtttttagaaagtagtataacgtagttttgggagtgtaggtgaggatttttgtatttaaggaatgttagattattttttaagtgaatttgggtaattgtattttttatttttattttttttatttgtataaaaagaatattaatattttttgttttataggttttttgggagggttaaatgagataatatagtgagagtttttggtatagtggttggtatagaggaatagtatagtacgtgttggtttatattgtagttattattattaagttttttatataattagtttagtatatggtaatatagggtcgtattgaaggattttttagatttttttttttaatagtattgttatttaggaaagttaaggggttagatgtaggtttagatttagtatttttttgttaatattcggagttgttgtgtgggtttattatttgtttattttggaattaagaataaggattaagaggatagagattagagtaagtggggtgggtggttagaagtttattcgtgtatttgttagtattggaattggatattttattgaagagttagtaggttcgagtttaagtttattttgtttttttttatttggagtagttttggataattaacgtttttgttattatgtattttttttgtttgtaaattttgcgaaagaagttttaagttttttagttttgggacgtttttagtttttttttgattagaaattgaagtgtttttagtgtttttagataatttttaggaaaattatttagtttcgttgagatttaatttttttatttgtggaatgggaatggtagtattgtttagtgtgttttataagggcgaaatttttatttattagggttttgtaggtgagaggagttttgggtacggatgtattttttgaatgtggttttgttgtttttttttgtttagtggtggtattgttagagtttttttgagttttaagggttatttagaaatagaattgtttcggttaggtatgagacggatgttttttgattaaatgtgatttatacggtttggtaaggagatatttttgattttttgattattagtttgagtataattagagattgaagtgatagagttatacgttaagattttttttagaaagagcgtttttaaaagttaatcgaaaaatttaaataaattatataagatagaatcgtatgtttttgagttttataaggtagaaataattttttttacggtttttttttgtttttaagttattgattatttttgggtaaatgtattttttttttatttttaggagaatgagtttttaagtatttaattttttttatagtggtataattttagggtagatgtttgtgtgtgggttgttttaatagagatttgagtaaaatgtttttattggtggatttttagtttgtagagaaggtggttttggtttgttttatttttattttttagatcgttgttgtaggtaattattaatatggattgtgaatattggttacgttgttatgttaggaaggttaggtagaattagttagggagtgttgtatagattttagggttgatgggtatagtttgtgagaaggtttatgttgttttttaagttttagtttagggggatatataagtggtgttattatgagagggggaggttttggaagaagattaggtttaggggaagatggttagttttattttggatataagtattgaggagtgttttacgtattatgtagttgtttttagggttataattttttatttatttgtgcgattatttaatggtttttttttttattggatttttagaggataaggattttgttttttattgtttaatattataaattttgtgtttagtatattgtttgttatttggtaaaatgtttagtaaatattaatttgataagtgattgaattgtattggtggtagttaaatttaaagttaataatatatttaataaatatttatgagttttgatatgtgttaggtattatgttgaatttttttatttttatttaattataattttgagaagttattaattattattattttaagaatattgtagttgataggcgtgattagtttttaattgggagggtttggtattaattatattttttgtttttaggattaaggttttttttgtattttataattattcgatattaatattatgatagtggtttcgttttataaattgatttaataaatatatttgtgttatggattagatgggtgtaggtcgggttttaatattgttgtttattagttgtattattttgggatagttattttttaatgtgttttagtttttttgttttaaaaataagaatgataatagtatttatttataggaacgtaggagttttaatgtgataatgtttgtaagagtgtttagtatattgttaggtatataagtgtttaaaaaaaatggtattgattattattttttcgggatttttgagttttttttatttaattagttgattttttaagtttgttagattaagtgaatgttatgtttgttcgtagaattgagggtgattttttgttttagtttttttgggattatttgggttgaagtttttgaggtttgatatagaggtataatgtgtttagatataggtgtagtaagtttcgttttattttatttttttggtagggtaagtttgttttgtgattgattttgatttttttggggagtttttttttaggtgaagggggattatgatttattttttaatgggattaataattgtaataataattagagaataatttttttataagtattttaaatttttagttgtttgttatatttataattttttagttttttaagtacgtaagagattacgtggggagtagaattatcggtattatttattgtataaatggaaatgtttttaagtaaagtgcgtgttaattaaatatttataaattaagttatattttaaaggcgttagtagagtttattggttaaaataattttattttgtagttttttttaaagggtagatttttttttatgaaatgttttttgttttgttgttttaggggagtttagatttttattttttggttgggattatttagtatttagtagttaaggtattttattttttattaatatagattcgaagttaaaatagttttttaaatgattacgatggggagagttggattttattgttagaagttagagagaaggggaggtttttaggtaggaatgtatttcgcgatagggtttttttatttcggttatatgtgatgggaaggattttttgtttttttttttataatttttatttgattatatagaggatttttatatataaattttaaaatatatatatatatatatataatatattatatatattatatatatatgatatatatgtgtatatatattatatatatatgatatatatgtgtgtgtatatatatatatgttatttagtttttggattgtattaaaattttttagataatttttttagattttaaagaagtagatattttttaagataaggtttttttttttatatatatttatatatatgtgtgtgtgtgtatatatatatatatatatatatatatatatatatatagatgtgtatatatatttatatatatgtatatgtatatatatatattttttattattggaattatttttttttaaattcgatttttttttttttttgtttttttttaatgttttattaatttcggtttgtggttatattttaattataaatgttattgatataaaataatcgtattaatttttgaatgaggttgattttattttgggtaaatacggtaaaggacgggaagtttttaatttagaataaattaggtatataattttttttggtttttttttggagagtagaggcggaaagtaggtttagaggttatagatagatatgttatagaagtagaatttttttttttaggtattttttttattgaatgtattagttgtggttttatcgttatatttgtttgggatgggataggaagatgttaggatagtttggggtttagaaatagggtgtaagattttaaagttgattttttttggtattggtaggattataattttttttttttttttttatttttggaaagtaagggattgttatttttattgtgaataaattattgttaagatttaatggaaggttttggggagtagaggagaaaattaaagttataaatttagttttttagataaaaggtgtgaatagtgagttgcgggttagtatagttatgtaaaagttttgggtttttttttatgtaggttttttaggtatgtagggattcgtgaagtagtttaaataatgagtatgggataaggaagattatgatttataaaggtgagtttgtatattttagttttattgatatgtagttttgataaataggttgtttttaaattaatattttttaatttatttttagtaaaggagtaggattttggattttattgcgggtatatatagttataaatttattaagtaaatatttttagtttttttttcgtatatttttataatgttttatttgagtttgaatttttttaagaaatttttatcgttagagtatttttttaaaagttgttttttatttttttagttaaattaattgttaatgtttttattttagaaggggaaaatgaagtattttatagattatggacgtattttgttttttaaaaagtatttgtttttttatttttgggatatttgagagatattgatttttttgtttatagatagtaatttttagattttcgtatgggataaagaagagtgtttgttttttatttgttttgtgcgttaatttggtcggggggtattgaaaaagggagtggatagagaagttagagttttagaggtgttttatttattcgttttgtttttttattttttttgggtttttgtttgtttttaagaagatttattttttataagtgtttatgttttggtttagatgtaatatggatttaaatttaagttgggttataaaatattttaggggttacgaggaataaaaagtgggagttttggttagttttaagtgttttattgattatgaatggagttttaatatattagttattattttaaaatgtatgaaggagaattaggggagattatagtaaatttttgatgaaaattttgtaaaatatataaaataatatgtatagtttatgtatatatagtaaaatagaaaattatgtattagatatagattaaatattagtaaatattaggaattttattatttagagttttttagtgttattagttggttgtttttattttagaattgtttataaagaaatagagttaggatgaaggaaatatttttttaattttttttttagttttagttttttttattttttttaaagtagttatttgtatgaatttggttagtatttggtgtatagttttatattttattatagatgtatttatgagttatatacgtattgtgtttttttttttttttttttttgagatggaatttcgttttgtcgttaggttggagtgtagtggtacgatttcggtttattgtaatttttttttttcgggtttaagtaattttttcgttttagtttttcgagtagttgggattataggcgtttattaatatatttggttaattttttttttttgtatttttagtagagacggggttttattttgttggttaggttggttttgattttttgatttcgtgatttatttgtttcggttttttgaatgtattgtgttttttaatatgatttttattaaggatttattatatttttttattgtaatttagttttttttattgtatgttatattttatttttttttgaaaggggattaaaaaaaaaaattatatatatatatatatatatatatatatatatatatatagagagagaaagaatgttgtagattttgtgtttttgtttgtttttagtttaaaaataattgtagtttttgttattgtgttgttgtattatttttaggtttatttgtttgtatttttaattatgtagaagttttaagtgtagggattatggttggcgttgagcgtaagttttagtatttagtaatgaatatgtgttgattgaatggttttttgttttttaattttgagttgttattcgaggaaaaagttgttgttgtgtggttagtttttttttttttttttaaggttttatttttttatgttttttttttttttgtttgtttttagtagtagttgtaagaggatgtaggtttggaaaattggaatgaagttatattagagagttggatattaagttagttatacgagtcgtttagtttgggtgttgtttttttttgttagttttatttgtagaaggatatatgtttaggaaatttagttagaaagaaatttagtgaaaatgagttatgaaatttggatattttggagaaataatatttatagaggaaatttttgagacgaatttttatcggtataataaatttggtgtcgggatttatggttgagggttgaagttatgtgttaagtaggtttttggtttttgtttatttttatgaggtttttttatggttatgatggaattttatagatggtaaagttaattttatttagttttatggttagataagtgggtgttattgaaggtagtaaaatagaaatgtataggaaatgaaaagttttttaaaaattttttttgattggttgggtacggtggtttatgtttgtaatttcggtattttgggaggtcgaggggggtggatcgtttgaagttaggagtttaagattattttggttaatatgatgaaattttgtttttattaaaaatataaaaaaaaaaaaaaaaaaattagttaggtatgatggtgcgtgtttgtaattttagttatttgggaagttgagataggagaatcgtttgaattgggaggtggaggttgtagtgagttgagattatattatagtattttagtttgggtaatagagtgagattttattttaaaagaaagaaaaaagaaataaataaataaaaaaaatttttttgattatttaaaaagattttttttttggggtttttgtcgtatttataatgtgtttgattaaatatttatatatatgggcgataggttgaaaagagttttaggtaattaattttattttattttatggttatagatgggattttggatggttatttattattttgtttatgtgtgattttgaatataagagggtttaagtaggagagtatcgttggatttggattaatttatttttataattggagtttaagagattgtgtgaaagataggaaaaagtaggatatttggagtattcgatttggggtttggttatgattttttttttttttagaagtataatattgcgtaaaatatatttttattaaattttagttttttattaaaggatagagtaagtattatttttttttagggaatatttcgaggagaaaaggttataaaagtatagaggaaatagttatacgagtattggttattttttatgtattagtttttataataatttttattatagataaggaaatagaggtaaatattttgttcgatgattatatagttaataggtagttaagtagaatttgagtttatgtagttgtgttttggagtttatattttttaattttatattgtttatattaagatagaaattagtatggtgtttggtatattgtaggtgattaataaaagttagtttttttttttgattttttttaaatatataggattatgttgagaaattgatataaaagtatatgtgaaggttttttgaaaattataaagtttgataattatttaaaaaaaaattagttttattgagataatatatatattatataatttatttatttaagttgtataatgtaatggatttttttataatttaatagagttgtgtaattaatattataatttattttagaatattttttaaaagaagttttatgttttttaattataatttttttatttttatttattttggttttggatattttgaatttatttgttgtttttatggatttgtttattttggatattttatttaaatggaaatataaaatatatggttttttgtgatgttttttttttatttagtattgtttttagatttatttgtgttgtggtatgttttagaattttgtttttttttattgttaaagaatattttattggtattttatgtatttatttgttttatagattgttagattgagaaataattttatggagattgagcgtaaatattttttattttattgaaaaagagattgtgtttaagaggttatgtagtttagttaagattatttagtttagagtttagttttgagttttataattttttacgtggttttattttattgttttttttagagagttattggagatataatttaaagtgtatagtttattgataatgggttaggagaattatttttgttaatattagtttaatattatttatttattaaataatgtagattgttttttgtgtgtagggtattgtaggaggtgttgaggattttagagggaataggataagatttttgtttttttttttagagtgtatatttttttgaggaggtagaaatagattagtagttttttagataataaaattattgtatgttgtattaagtgttatgaaagaaataaggggtagaggaggaggaggatgtgggggagggtggtattggtagggagaatggggtggggatgaaaggattttgtgcgtagagtgttatatattttggggagggttttttttaggatatttaggttgaggtttggaggagaaggattttgtgaatatttggaggaagaatgttttagagagaaggttatagtatgtgtaaagattttaggaaaatagggaaagtttgaagtttaataggagtagaaagagcgagtaagtggtgtgattgaaggttcgagagagtagggtttagtttatagtggaggtttataggtttgtttttttacggttatatttttagagttaattatttttaggaggattcgtgagaaagtgtattagtggtttttagtttttttttgtgaattaaataaattttagttgttattggaagttagaggaagttttgagtttttatagtaaagatttttaaggaagggagaattgtattttaggtaaaggtgatgaaattatgaattattttgggggtgaattaggagataaggaaggtaaagagaaataagaaaatataggtatattaatagagaaatggttaaataattatggtatagttatataatggaatataatttaattagtaagaagaaagaagtttattttttttattttgatgtagaaagatttataattagttgttaagtaaaaaaaaaagtaaggtgtagaattgtgtgtttagtatattattattagtatgagatagtatgttttttgtaatatacgtatataagttttttagaaaggatatatatataaggtgtttaggaggggtttttttgtttttgtatttttttaggagatgtgtattttagaacgaagttttttattattttttttgttgtttgggaaaatggaagtatattttttatttaaagaaattaaattaaaaatgaaaataggttaggcgtagtggtttatatttgtaattttagtattttgggaggttgaggtaggtagagtataaggttaggaattcgagattagtttggttaatatggtgaaattttatttttattaaaaatattaaaattagtcgggtatggtggtgtatgtttgtaattttagttattggggaggatgaggtaggagaattgtttgaattcgggaggtagagtttgtagtgagtcgagatcgcgttattgtattttagtttgggtaatagaataagatttcgttttaaaagaaaaaaaaaaaaagaaaagaatataaagaaaaggtaatgaggggtcgagatttattaattaaagttttgtgtgttttagttttttttgttttttggtttttgttaagatgaattttagagatgtttttttatttttttagggaattaattattgggtagttattggtttttggtttagattttatttttagttgtaatgatggttgtgacggtttagtgattaaataaattatttcgaagagtttagaattaattttaatttttaaatgtgaattattaaagtattttttttaagagggtattttagggtgaataaataagttaataattattaaatggatattggattttaattaagtgtttagtattttgggagtgttaattagtgtgaatgaggagagtgtgattttgtaatttatagttttttttttttatttttaggttttttaatttggacgttgttgatttttgggttggaaaattttttgttgttgggggttgttttgtgtattgtaggatgttagtagtatttttggtttttatttattagatgttagtagtattcgttttttttagttgtgataatagaaattgtttttagagattgttaaatgttttttttggagtaaaattatttttagttgagaattattgtttttattattgtatttttaggtaacggttttattttttttttattagaagttggtgattttttttttgtttttattttaggtgggttgttatagaggttgagggattgacggaaattttattgtgagggagtttatcgagttttatatgtggtaattagttttaattttttgggaattttttttgttttagggaaaatagtaattttagattttataaaataacgatttgcggataggaattttttttatgattagaaggtttagataattaaaaggtaattttgtgtaggttgataatgaaagtagaatatatgtaggttggttagattttattttatggtattttaagattgtagggatgagggagttcgggggagtgagtgttatttttttttgtgattatttttttataagtgatagaaagaaaggagcgaggtatcgtgaaggtgtatttagggttattttgtaattaatagggtggataggtaggtgagtcggtcgttgtttttttttttttttttaaggacgtaatttttaatggatagttttttttggaaggtaaagaaaaagggattgtatttttatgttttgattaatttgaggtttatttttgagggtttcgtgaaatgaatgagtagaattttttatggttaattgttttggttgtcgggttttatcggtaaaagcgtagtgtttatttatttttgttcgtgttatttttattttagt

SEQ ID NO: 700 - DNA, 16602 bp, Artificial Sequence
  chemically treated genomic DNA (Homo sapiens)
attggaataaaaataatacgagtaaaagtaaataaatattacgtttttgtcgataggattcggtagttaggatagttggttatggaaaattttgtttatttattttacggagtttttagggatgagttttagattaattaaaatatagaaatatagtttttttttttttgttttttaaagaaagttgtttattgggaattacgtttttgggaaaggaaggagagataacggtcggtttatttatttgtttattttgttggttataaaatgattttgagtgtatttttacggtgtttcgtttttttttttttgttatttgtaggaaaataattataggaggaaatggtatttattttttcgggtttttttatttttgtaattttgggatgttatagagtaggatttggttagtttgtatgtgttttgtttttattattaatttgtatagggttgttttttaattgtttgggttttttagttatgggagagatttttgttcgtagatcgttattttataaaatttgagattgttgttttttttgagatagaagaggtttttagggagttaggattggttgttatatatgaaattcggtgaatttttttataatgaagttttcgttaattttttagtttttatggtaatttatttggggtagaggtagaggggagattattagtttttgatggggggagaatgaagtcgttatttggaaatgtagtgatgagaatagtggtttttaattgggggtgattttgttttaaaggggatatttggtaatttttgaagatagtttttgttgttatagttagggggggcgggtgttattggtatttagtgggtagaggttagagatgttgttaatattttataatgtatagggtagtttttaatagtaaagaattttttagtttaaaagttagtagcgtttaggttgagaaatttggagatggagggaaaggattatgagttatagagttatattttttttatttatattgattgatatttttaaggtgttggatatttaattggaatttaatgtttatttgataattattaatttgtttatttattttagggtgtttttttgagaaaggtgttttgataatttatatttgggaattggaattaattttagatttttcgggataatttatttggttattagatcgttataattattattataattaggagtgaaatttagattaggaattagtggttgtttaatagttagttttttaggaggatgagggggtatttttgaggtttattttggtagaggttaaggggtaggagaggttggaatatatagagttttggttggtagatttcgattttttattgttttttttttgtgttttttttttttttttttttttttttgagacggagttttgttttgttgtttaggttgaagtgtagtggcgcgatttcggtttattgtaagttttgtttttcgggtttaagtaatttttttgttttattttttttagtagttgggattataggtatgtattattatgttcggttaattttggtatttttagtagagatggggttttattatgttggttaggttggtttcgaatttttgattttatgttttgtttgttttagttttttaaagtgttgggattataggtgtgagttattgcgtttggtttgtttttatttttaatttaatttttttgaataggaaatatatttttatttttttaaatagtagaggagatagtgaaaagtttcgttttggagtgtatattttttggggggatgtagaaataaggaaattttttttagatattttgtgtgtgtattttttttagagagtttgtgtgcgtatattgtaaaagatatattattttatattaatggtaatgtattgagtatatagttttgtattttgtttttttttttgtttaataattaattgtagatttttttatattaggatggaaagagtaaatttttttttttttgttgattgaattgtgttttattatgtagttatattataattgtttaattatttttttgttaatatgtttgtatttttttatttttttttgttttttttattttttgatttatttttaggatgatttatagttttattatttttatttaagatgtaatttttttttttttggaagtttttgttatagagatttaggattttttttagtttttagtggtaattggagtttatttaatttataggaaggaattggaagttattgatgtatttttttacgggtttttttaggaatggttagttttgagagtgtagtcgtgagggaataggtttatgggtttttattgtaagttgggttttgttttttcgagtttttagttatattatttgttcgttttttttgtttttattaaattttaaattttttttgtttttttgggatttttgtatatgttatagttttttttttgggatattttttttttagatatttataaggttttttttttttaggttttagtttaaatattttaaaagaggttttttttagagtgtgtgatattttgcgtatagggtttttttatttttattttattttttttgttaatattatttttttttatatttttttttttttttgttttttgttttttttatggtatttagtataatatgtaatgattttattatttagggagttattgatttatttttgtttttttaggaaagtgtatattttgagaggaagggtagagattttgttttgttttttttggggtttttagtattttttatagtgttttgtatatagggggtagtttatattatttggtgaatgaatggtgttgggttaatattggtagagatgatttttttggtttattattaataagttgtgtattttgaattatgtttttaataattttttgaggggggtagtaagatgggattacgtggagagttgtaaggtttaaggttgggttttgagttgagtgattttggttaggttgtatagttttttagatatagttttttttttagtaaaatgaggggtatttgcgtttagtttttataaagttattttttagtttaatagtttatggagtaagtagatatatggaatgttaatagaatattttttggtaataaaaaggaatagagttttgaggtatgttataatatagatgagtttggaaatagtgttgagtgggaagaaagtattataaaggattatgtgttttatgtttttatttaaatgaaatgtttagaataggtaaatttataaagatagtaagtagatttagggtatttagggttagggtgggtggagatgggggaattatggttaaaaggtatggggttttttttggaaaatattttaaaatggattgtggtgttggttgtataattttgttaagttgtaagaaaatttattgtattgtataatttaaataggtgaattgtatggtatgtgtgttattttaataaagttggtttttttttaaatggttattagattttatggtttttagagaatttttatatatatttttgtgttaattttttagtataattttatatgtttaagagagattaaaggaaggggttaatttttattgattatttataatgtgttaggtattatgttagtttttattttgatataaatagtataaaattaaagagtgtgggttttagaatataattgtatgaatttaagttttgtttggttgtttattagttgtgtgattatcgggtaaagtatttgtttttgtttttttatttatagtgggagttgttgtaagggttaatgtatggaaagtggttagtattcgtatgattgttttttttgtgtttttgtggtttttttttttcgaagtgttttttggaggaaggtggtgtttgttttgttttttggtgaagagttgaagtttggtgagagtgtgttttacgtaatgttatatttttaagaaggggaaaaattatgattagattttaggtcgagtattttaagtattttatttttttttgttttttatataattttttgggttttaattatgggaatggattgatttaaatttagcgatatttttttgtttggatttttttgtgtttaagattatatatggataagatggtgggtggttatttaggattttatttgtagttatggaatggagtgaggttagttgtttgggattttttttaatttatcgtttatatatgtagatatttagttaaatatattataggtgcgatagaaattttaaaggggaggtttttttaggtaattaaggaagttttttttgtttgtttgtttttttttttttttttttgagatggagttttattttgttgtttaggttggagtgttgtggtgtgattttagtttattgtaatttttattttttagtttaagcgatttttttgttttagttttttaggtagttgggattataggtacgtattattatgtttggttagtttttttttttttttttttgtatttttagtagagatagggttttattatgttggttaggatggttttaaatttttgattttaggcgatttatttttttcggttttttaaaatgtcgggattataggtatgagttatcgtgtttagttaattaaagaagatttttaaaaagttttttattttttatgtatttttgttttgttgtttttaatagtatttatttgtttggttatggggttgaatagggttggttttgttatttgtggagttttattatggttatgaagaggttttatagaggtaaataagagttagaggtttgtttagtatatgattttagtttttagttatgagtttcgatattaggtttgttgtgtcggtgagagttcgttttaaaagttttttttgtaaatattatttttttaggatgtttaagttttatagtttatttttattagatttttttttggttaagttttttaaatatatatttttttgtaagtagggttggtaggaaggagtaatatttaggttgagcggttcgtgtagttggtttggtgtttagttttttagtgtgattttattttagttttttagatttatatttttttgtagttgttgttgaggataggtaaggaaggagagagtatgagaaagtggggttttggaaagagagggaggggttggttatatagtagtagtttttttttcgggtagtagtttagggttgggggatagaaaattatttagttaatatatatttattattaggtgttgggatttacgtttagcgttagttatggtttttgtatttggggtttttgtatgattagggatatagataaatgaatttgggagtgatatagtaatataataataaaagttgtaattgtttttgagttaaaagtaaataaaagtataaaatttgtaatattttttttttttttgtgtgtgtgtgtgtgtgtgtgtgtgtgtgtgtgtatgtagtttttttttttaatttttttttaaagaaaggtagaatataatatatagtgaaaaaaattaaattgtaatgggagaatatagtaaatttttgatgaaaattatattaaaaaatataatgtatttaggaggtcgaggtaggtagattacgaggttagaagattaagattagtttggttaatagggtgaaatttcgtttttattaaaaatataaaaaaaaaaaattagttagatgtgttggtgggcgtttgtaattttagttattcgggaggttgaggcgagagaattgtttgaattcgggagaaggaggttgtagtgagtcgagatcgtgttattgtattttagtttggcggtagagcgagattttattttaagaaaagaaaagaaaaagaatataatacgtgtgtagtttatgaatatatttatagtaaaatataaaattgtgtattagatattgattagatttatataagtagttgttttgggaaggataagaggaattaagattgggagaggaattgaggaaatgttttttttattttaattttatttttttataaatagttttgaggtaagaatagttagttggtgatattggaggattttgagtgataggatttttagtgtttgttggtgtttagtttatatttagtgtatagttttttattttattatgtatgtatgaattatgtatattgttttgtgtattttataaaatttttattagggatttgttatgattttttttgatttttttttatatattttaggatggtagttgatgtgttaaagttttatttatagttaatgggatatttagagttggttaagatttttattttttgtttttcgtgatttttgagatgttttatgatttagtttaggtttgagtttatgttgtatttagattagagtataggtatttataaaaggtgggtttttttgggggtagatagggatttaggagaaatggggaggtaggacgggtggatgaggtatttttaaagttttaatttttttgtttatttttttttttaatatttttcgattaggttagcgtatagagtaaatgaagagtaagtatttttttttattttatacggggatttaggagttgttatttatgaataggaaggttagtgttttttaagtattttagggatgaaggggtaagtattttttgaaaaataagatacgtttatggtttgtagggtattttattttttttttttgaaatggggatattaataattaatttagttgaagaaatggaaagtaatttttaaaaaggtattttaacgatagaaattttttggagaaatttaaatttagataaagtattgtaaaaatgtacgggaagagggttggaagtgtttatttggtggatttgtgattgtatgtgttcgtaatagaatttagagttttgtttttttattaagaatgagttaagaagtgttggtttgaaaatagtttatttgttagaattatatgttaatgaaattgaaatgtgtaaatttatttttgtgggttatggttttttttgttttatgtttattatttaaattgttttacgagtttttgtatatttgggaaatttatataaaggggagtttagagtttttgtatggttgtgttagttcgtaatttattgtttatattttttgtttgaggaattaagtttgtagttttggtttttttttttgttttttaaagttttttattaggttttagtagtagtttgtttatagtaagaatagtaattttttattttttaaaggtagaaaaaaggaaaaagggttatgattttgttagtgttaagagaagttaattttgaggttttgtattttgtttttgagttttaagttattttagtatttttttgttttattttaggtaaatgtaacgataagattataattggtgtatttaatgaggaaaatgtttggagagagaggttttgtttttgtagtatgtttgtttgtggtttttaagtttgtttttcgtttttgttttttaaagagaggttaagagagattatgtgtttggtttattttgggttggagatttttcgttttttgtcgtgtttatttaaagtgaggttagttttatttagaaattggtgcggttgttttatgttagtgatatttataattaaaatgtagttataagtcgggattggtaaaatattagagaaagatagagaaggggaaaaatcgaatttgggggaaaataattttagtggtaaaaaatatatatatatgtatatatatatatataaatatatatatatatttatatatatatatatatatatatatatatatatatatatatatatatatatatatgtaaatatatatgaaaaaaaaaattttattttaaaaggtgtttgtttttttaaggtttgaaaaagttgtttggaaaattttgatatagtttagagattgaatgatatatatatatatatatatatatatatattatatatatatagtatatatatatatatatattatatatatatagtatatgtgatatattatgtgtgtgtgtgtgtgtattttaaagtttatgtataaaaattttttatgtaattagatgagggttgtggggaggagggtaaggagttttttttattatatatgatcgaggtgagagaattttgtcgcggagtatatttttgtttggagatttttttttttttttgatttttggtagtggggtttagttttttttatcgtggttatttgaaaaattgttttgatttcgggtttatgttggtggggaataaagtgttttaattgttaggtgttgagtgattttaattagaaaatagaagtttggatttttttaaagtaatagggtaggaggtattttatgaagaggaatttgttttttagaaagggttgtaaggtaggattgttttgattagtgaattttgttagcgtttttaggatgtggtttgatttataaatatttgattggtacgtattttgtttaagaatatttttatttgtgtagtgagtggtgtcggtaattttgttttttacgtagttttttgcgtgtttggggagttgaggagttgtgggtgtggtaggtagttgaaggtttggaatgtttgtgaggaaattattttttaattattgttgtagttattaattttattgagggataagttatggtttttttttatttgagaggaaattttttagaaagattagagttaattatagagtagatttgttttgttagaggagtgagatggggcggggtttgttgtatttgtgtttgggtatattatgtttttgtgttaggttttaggggttttaatttagatagttttagagaagttgggataaagagttatttttagttttgcgagtaagtatagtatttatttaatttaatagatttgaaaggttagttggttaggtgaggaaggtttaggaatttcggaagaatgatgattaatattattttttttgagtatttatgtgtttagtagtgtgttaaatatttttataaatattattatattaaaatttttacgtttttatgagtgggtgttgttgttatttttgtttttaaaataaggaaattgaggtatattgagaagtaattgttttaggatgatataattggtgaatagtagtgttgggattcgatttatatttatttgatttataatatagatgtgtttattgaattagtttgtggggcggaattattgttatgatgttggtgtcggatggttgtgggatatagaaggagttttaattttggaagtagaagatgtggttggtgttaagtttttttagttaggagttggttacgtttgttaattgtagtgtttttagagtgataataattagtaattttttaaggttgtggttaggtagaagtgaaggagtttagtataatgtttagtatatattagggtttatagatgtttattgaatatattgttgattttgaatttagttgttattaatataatttagttatttattaaattaatgtttattgggtattttattaagtggtaggtaatgtgttagatataaaatttgtagtgttgagtaatgagagataaagtttttgttttttaggagtttagtaggagggaaaattattaaataatcgtataaataaatggagaattataattttgaggatagttgtatggtacgtgagatattttttaatgtttgtgtttaaaatggaattggttatttttttttggatttgatttttttttaggattttttttttttatggtgatattatttatgtgtttttttgagttgaagtttaggggataatatgaatttttttataaattgtgtttattagttttggaatttatgtagtattttttggttgattttgtttggtttttttagtatggtagcgtaattaatgtttatagtttatattggtaattgtttgtagtagcgatttaaggaatggaaatgggataaattaaaattattttttttgtaggttagaagtttattagtagagatattttatttaggtttttattagaatagtttatatataagtatttgttttagggttatattattataaggaaggttaggtatttggaaatttatttttttagaggtaggaagaagatatatttgtttaggaatgattaatgatttggggataaagagaagtcgtgaaaggagttatttttgttttgtagagtttaaaggtatacggttttattttgtgtgatttgtttaaatttttcgattggtttttagaaacgttttttttgaaggaagttttaacgtgtgattttgttattttagtttttaattatgtttaaattagtgattaaggaattaaaaatatttttttgttaggtcgtgtggattatatttagttagggagtattcgttttatgtttggtcgaggtaattttgtttttgaataatttttgaaatttagaagggttttggtagtattattattgggtagaagagggtaatagaattatatttagggagtatattcgtgtttaggattttttttatttgtagaattttagtaaatagaagtttcgtttttgtgaggtatattgggtaatgttgttatttttattttataggtgaggaaattgagttttagcgagattaaatgatttttttgaaaattatttgggaatattagagatattttaatttttagttaggaaaggattggaagcgttttagggttggggggtttgaagtttttttcgtagagtttgtaaatagaaagaatgtataatggtaagaacgttaattgtttagggttgttttaggtagaaaggggtagagtaggtttgaattcgagtttgttgattttttagtggaatatttagttttagtattgataggtatacggatgggtttttggttatttattttatttattttgatttttgtttttttggtttttgtttttagttttagagtaagtaaataataggtttatataataatttcgagtgttggtagagagatgttgaatttaagtttgtatttagttttttgatttttttgggtggtagtattgttaaaaagaggagtttggaaggttttttaatacgattttgtgttattatatgttaggttgattatatggaaagtttgatgatgataattgtaatatgaattaatacgtgttgtgttgtttttttgtgttagttattgtgttaagaatttttattatattattttatttaatttttttaagaaatttgtgaggtaaggaatattagtattttttttgtataaatgagaaaagtgagggtgaaaggtgtagttgtttaagtttatttggaaaataatttggtattttttgaatgtagaaatttttatttgtatttttagggttacgttgtgttgttttttaggggtttttgatattttaagttaggcggttaaatttattgtggattttagaagttgtgttagtgttatatatttagagtgtagtttgttgtgttaatgatggaatggtaatagttaagttattttttattgttatagaaattttagtattggagtttttttttattttagaagttaaggtttttagaagagttagtttaattttaaggaatatattatgaagtttgtttttttttttgggttttgaggatcggagagtattttttatttttttagaaaattggttaagacgtattaggaatatttaaaatttagaggaattaaagtttgttcgtgttgtgtggggtagattacgtgagttgtgtattatgtttgatataatggattataatttaagtttgttaatttgtagtgaatattgtttatgtatgttatttaataaattagagttttttttttttgttttattttgatatttgttttttattgagtataagatatttagtaagtttatttgaagataagttattaaaataaagtttaaaagagttaattttgtagttgtaagttttagttttagtttttttgttttttatttttagggtttgtgtagtgggtggggaggaaggaataacgttatttcgtgtaaacgttagcgtttatttttattatttgtgtatttgagggtatagcgtgagtattagcgaagtggttatttgtttttagagtttgtaatttttggtgtatggtttatgaataattaagattatttgatgtataaattattatgttaaagtgagtgttttgtattgtattttgaagttagttttatagaaattttttttttgtttgtttttttttatgttttttgatttttttttttttgatttgtggtaagtttgatttttgagattgttgattttttaagtagggattggatttgattttaggtttttttgtaatttttgatgttgtagtgggatttagggaattttagataatattacgataggatttggatatttaatattaaatatatatattaatgttagaagtattaaagtagaaggaagagatttttttatatttagatagttaagaagatttttttttttagagttatatttttatttgttaatatttttgagaatcgggttgttaggaagttttggaagagatatttagtatttggcgttagtcgtttttattttttagtttttataaggtttggagaatgattttattattgttggttattatagttatatttgcgtgatacgtagagggaaagttgtataatttatgatgtgtaagattacgattatgaattgggattttataaattaagtttagtggaaatataattaggagagttagttgatttgaaacggagtttatatttttgtgtaggatttattattatgtttgtttggtttattttattatgaagcgtgtaggtttttgattagttttcggggttagattttttattagttatagaaatttgggaaaatatatagtaattgagtatcggtagttcgttttgttgggttagtagagagtgttttaaaaaatttgaaataggatacgtttgggtaagtggtggtttttataagtttttattttttaaatttagatattttacgtatttatgtgattttatttttgaatgtgttatgtttgaatagaattttggagaagtaagtatttgtatttaaatgtgtattttttttttattttgattatagaagatgttagaaagggaaggggggtgttatagagatgggtttattgtgttggtcgtttttgttttttgttttatttattgtgttattcggaaggatttttaggaagtggttttcgttgttatagtagaggagtttgggttttttgtaattttttggaggtagattaaatttttcggttagggttgtgaaggtggtgattttttttttagttatggtttagtagttgttgtttgtggcgtttttaagattgtaagaaattgaataaatttgtagtcggtttttttagtaaaggtataaaatgtattttgaagagaggaaggatagttttagggtatagggttttcgggtagtgagtaagtatagtttgtttaggtgatgttcgtagttcgcgggtttgtgaggtggttggtggttaaggaaggatggttttaggtttgggaggggtttttagggtatttttttttttttttaattggatatagttttggattaaattgtattttttagaattttaaatttaattatttgattatggggaaaagaattatgttttggtttttttttttggtttatatatatttttaaattaaatattaaagttgtattaaaataatatttagggtttggttgaaatttataaaagttgagaggttaggattaaggttttgttttttatttttacgttgcgttggtgaggtatcgcgaagtagatagtatagatggtttggacgttcgggatttgtagttaaaggtataggaggttttttagggatataatagggaaagtaaagggttagtatgttaagggaagtttttggatttgttgggggaaatagaattggaattagggaaaaaggtatagagtgggagtaagtggggtttttaaagggtaaatattatattaaaggaaatgttatgagatagattattatgaaggttatgtttggtttttgtttattttgtagttttttatatagttttatgtggtatagaaaaggtgggtttgttttttgtacgtaggttgtttttattttagttattttttaatgtgagatagaatatagaaattattatattatatataatatatttttaatattatatgtagttattatatataaatttatattattaatgtgaaaatgtattatttatattttaaaggattaaaaaataaaattaatgagtattagaattggttaaaatatatatttgttttattatttaggagaaggaagtgttggtgattttaaaaattgaaaagaaagaggttaaaaagagattaggaaattaacgtgtgaattgtattttttttttttttttttgagacggagtttttgtagtttaggatggagtgtagtagtacgattttagtttattgtaattttggtttttcgggttttagtttaagtaatttttttgttttagttttttaagtagttgagattataggaatgcgttattatattaggttaatttttatatttttagtagagatggggttttattatgttggttaggttggttttgaatttatgatttcgtgattcgtttgtttcggttttttaaagtgttgggattataggcgtaagttattacgttcggtttgggagttgtattttgtaagtgtgagtagtgaatgtgattattaatatatattgattattaagtggttttagaataaaaattattatttttattattaacgtattttgggttataggttattttaagtaattttattataattttttgaagtggatattaatattattattatttttaataaaattaaagtttatagatgtttagtgatttgtttaagggtaatagttagtaagcgatggagttgaatcgtaaaaggagtttgggaatagaaagttttaatttgtttttgattattatgaaaaggtttagtgattttatttatattagtttttttatgaggagtggggtttttatttattgtttgatatgtatatttgttattattaatttgttatttatatatttatttgtgatttaaaggttggttagtttttattaatagtttttttttttgtttttatgttatttgtgaaataggattttatgtatttttattttttttaggagaagtttattttagtagtttcgtgagtattatggaagattagtagttattttgttttttttgtattaattatttattagtgtttgtagtagttgtgcggagttgtttttataggagatggttttattataaattaagatattaattataataatttgtttttatgattttaaaatgagggttcgtgttggaagtttttatttgttttttttgtttttggtattttaatgtttttggtatattttttttattttgttattatatgggttagttattgtttttggttttaattagtgttggaggtgtttttaagaattttaaagagaatttcgtaaatattatataaattatatttaaagttagattattttaaatgttttttttattttatatggtgaaatttcgattaattttttttatataatatagtaatagatagaaaataaatataatattatatatatgtaattttatttatgttaattttatagagaggattgtagagtttattttgtatagtataatttttttttatttttattgttttttttaaattttatttttttatttataagtttttaagtttttttgtgtttatttttggtttttttattttttgtttttttgtttttttttgtttttttatttatttttttttttatttagttttttattttaattttttattttatttttttttggatttatttttaatgtaaagtaatttagttttttttagtgtggatatttttattttttatttttttattagtatttaattattattagattttttttttttaaaatataattaagaggtaatgattttttttttttatttattttttttaagtattttttaagttatgtattttatttggtataggagataataattatatattagtggttgttatttaattgtataaatagttatttgtattgttaattttaggtgggtcgaattttgtttttttttgtttttggattttttttagtgtaggttttatttgtttttgattgtggggtaattttattttaagaatggttttttaggttaggtgtggtggtttatgtttgtaattttagtattttgggaggtcgaggtgggtggattatttgaggttaagcgtttaagattagtttggttaatatggtaaaaatttatttttattaaaaatataaaaattagttaggtttggtggtgtatgtttgtagttttagttattcgggaggttgaggtaggagaatggtatgaatttgggagacgatagttgtagtgagttaagattgcgtcgttgtattttagtttgggcgatagagcgagattttgttttaaaaaaaaaaagaatggttttttttttagattttagattatgtg

SEQ ID NO: 701 - DNA, 14307 bp, Artificial Sequence
  chemically treated genomic DNA (Homo sapiens)
atatgtttgtaattttagttattcgagaggttgagataggagaattatttgaattcgggaggcggaggttgtagtgagttaaaattaggttattgtattttagtttgggtgataaagtgagattttgttttaaataaataaataaataaataaaaaaatttaaaaaaattatatatatatatgtattttttggttgggagtagtggtttatgtttgtaatttaagtattttgggaggttaaggtgggaggattttttgagtttaggagttcgagattagtttaagtaatatagtgagatattgttttaaaaaaaaaaaaaaaattttttttttttttatgtagattttgtatatttttttgttgttaattttgtttttggggattttatgtttttttttttttttttttttattttttttttttttttaaaaaatttattgtaattggggtttttttttttttttattttgttttttaattggttgttgtttatatatatttagtgtaattggttgttgatatatataagtatatatgtttattatttatttttgtgtattttgagaagatattttattaaataatttaaaagtatatgtttgttataatcgagggtagtgttatataatgagggtttgatgtttatgaatttggttttattatttattagtattgtggtaataggtaggttatttaatttttataagttatagtttttttatttataatatgggataaaataatattttataggatagtttttaatattaagaagataaagtataaaagtatttagtagggtgttggaaatatagtaagtagttaataaatggtggttataaaggttttatttttttattatgaaatttaaatttagtttttggggttatattgggaatagattttaatttttttaaattatttttttttattttatgttttttatagtttttaaataaaagtttataagtagattgaagggttgtggggtggggaggaggagaacgaaggaaatagatggaagggtagaggtttagtgatatttttattgtagagaaggaatgaaatgattttgtattgatttgtatttgggggtttagggaaattgaaggaagataagttaatgaagaaagaggggaaggtggattttttttaaagggttattttaaatttgtagaggattttatagttgataggttattttaatttatatgaattagtttttatagtaaagagttgggattcgtgaggagagggttcgtagttatatatggagtaggtagagggttagatgatgtgttttagatttgtagatttttattttagtgtttatttttttttatagtttttttttattttttttgttatttatttttatttgggtttaagtattaaattgattatagaaaagatagatgataaagatgatagaaaatataggaaaggggaagaaaggaaagtacgaggagttaaaacgttttgagaagatagagttttagggagttttgggattaaaattaataatagtatttgttgaatatttttatgggagaaatttatgggggaattatataaggaatagtgtaatgatagcgattatgttttgagggtttattgtgtgttgtttgtttcgtgtgtatttttttttttttttatttttaataatagtttttcgaggtaggagttattaatttaattatattacgtgtttttagaaggtaaggttttagttttttttgtgtattaatatttatgtatttattgaagaagatttgtaaaatatatttatagttttggatataggagtttatggttttgttagagttgtgaaggaattttgaggatgttagttttaacgagtggggtgagtataggaaaaatgtgatgtggttaatgtaaggaaggatattgttttttttattataataagaaaaataattcgattaaattaattaataaaattaagtaagagaaatttgatggtgaagtggcgaggaagtagtaaaagttttttgtagttggagttagggatgcggatgaaaggtggattaagttaattgtaagtgggggaggttgtttaatttgggaaagtgttttattagttatttcgtttttttttttattgttgtaacgttttttaaagcgatagttatacgttgtaggattcggaagcggaaatggtttttgtttattggatgataatttaaatttagatcgaaagaatgtggttggagatagttggtggaaatggttttagttttgtttttattggaaatgtttaatgtttacgtgttgttcgtttttttttttatgaagcgtttttttgtttttttgggtttgtttttgttttttttatcgtttttttttttattaagtaattatttcggcgtattgtatttaattggtcgaggaacgtttttgttgtatttattattgttggttgtttcggagattaatgcgagcgattcgggtggtttatgagaagtgatatttaatatttagttttttgtatttgtcgtcgagtagttaacgttaaagttcgttttgtattatcgcggatgtgattgttgtaaatattacggggtagggtttttatgttttagaaatacgtaagtaagacgtatcgagttagtttcggatatttaatgattttggattgcggtaaagggggggtgggaaaggaagaggggaggattattcgtttttttttttttttttttcgttcgggtcggagtacgttttttttttcggagggtaggggaaggtcgttttaggtcgttggtatttttagcgttttcgaaatttgtaaatttatcgttttttttcgtttttaggcgaagttttttcgttcggagtagggttagttttagttatgtatttttagtttttagttgattattaaggcggattcgattttttttttataattaggttttgattcgtttttttatcgtaggggtttagtttttgttttcgattttgttttttagttgtacgtttcgtagtgtggagttgcgtttaagtttcggtaatttttattattttgattcgagagtcgggtcgtttttaagataatgtgaataaagaggagtagggggagggaaggggggtttcgcgggagggttgtgggcgagtgtgtgtgtgtgtgtgtgtgtgtgtgtgtgtgtgtgtgtgttggggggcgtcgcgtttcgcgttcgtcgttattggggattcgggcgtaggtaggttgtttcgggcgtagagcgcgtcgtttttagtttttttggcgggttcggttcggtagggtttttggcggttttcggaggcgggtttttttgtttttgattttcgttgggcgcgaaggtcgtcggcggttaatagaaattcgagttcgcgtaacggagtttaggtttttacgtgcggtttcgtagggtagagtaggaaggagcggttgtagtttcggggcgtttcgtaagtatttagtgttcggtttttttagtttcgcggcgggtttcggacggtggagtgagatattagaattcgtttttcgttttttcgagtcgatgtacggtttgggatggcgtcgttcgttttaagtagcgtggtttgagggcgagaagacgtttattggagcgtttttttttatttagattttcgaagacgcgcgttcgagtcgaagtcggggatagagaaggttttttggcgtttttttgtcgattgttttgcggtcgtcgggattcgagtagcggggcgggatttaaatatagttttaatttaaagatgtttagtagaacgttttaaataaaatagaaacggtggtcgtatttgcgtgtgtgtgtgtgtgtgtgtgtgtgacgggggagaggagttgattttatttgaaatatagtttgcgtttttgtgtgtgtggtcgaagaatggaagagaaattgttatggttattcgagtttattaaattaatttttttttttttcgatttttttaatttagttatattttataatataacgtaaggttatagagttttagtgaaaattagttttttagttttattttgattttttattaatgtagttagttagttagattgtaggttatcggtttttattttgtaggagaattttgagtttcgggagatttagggtttttttttttcgtttttcgtagtgtattttttatttgtttttttttgtaaagttagggtttttcgattgttttttaggaagttttgcgttttggcgcgtcgtatttcgtttgtcgtagagcggcgcgggtagtaagtcgggcgttaggatcgcggggagttcgggttgcggcggcgttattttaaatttagtttaatgtcgttgtttgcgttattttgcgcgtcggcgggggttgcgtaggaggagcgtttcgttcggttataacgtttcgcgagtcggcgcggtaatatttgttcgcggtagtttgggcggtacgcgagttttcggacgcggtttttttcgttcgtcgttcgttattcgttttaagttaatggatatttgtcgagtttttggagaattttggatattagttttggacgtttaaagtttttttttttttttgttttattattattattattttttggaggggggatcgggaggggagatttgtcgtcgttattaacgtgagatttttttttttttttgaaggatttatgttgatgtttgtagagtcggttagagagtaaaaatagcgtatgtttttttggagttaggattcgtaaattttgacgtagttcgtgtattttaaaaatttttataataacgtttaggtatttaagttgttatggttattttgattttaaattaaatggagaaattacggattttttttttttattacggtcggatgggatgaagatttttttgtttgttaagagttggggatttatttatagagatatatagatatgtttattaatatgttagtgtgtgagtataaagtggtggttttttagattattagtggtttgattttgaatttgtgttagtgaaatagtagattatttttatttatgtatttaatggattgaagaaaagaattttttttttttttttttttttgtaattgtagtaagggaggggagttggatatatttcgtttaatattttttgggttgatattattattattgtttatttttgtgttttaaaagtcgagttttttgatggtttttttaggtgaagttgggaattatttcggtgtgtaggatgcggtatcgtttgggaatgtgttcgtgttgtcggtggatagttcggttttgttaagtgattatttgggttagttcgaagtaggggggttttttaggggattcgtagttacggatttggattatttaaaggggatttttaggcggaggtagttatattgtaggattggattttatttagaaattttttttaatggtattatttagggaattaggaaagattatagtcgatttggtaggtatattattaattttttagtgtttatgagatgatatgttgaaattataattattaagaaggtggtggtcgggtgggggacgtgggaagggtttttttttttttttttttttttttgtatttttgtttttttttttttttgttttgttagtttcgaaaaaaaaatgttttcggaattgtagatttgttgttggtattgatgtaagtatatattgaaaggttttttatttttaatttaaaggggggtataatttataaatataatataagtttttagtttttttgtattagatatacgggtttaggaagttttttttgaatggattgattgtacgagtttaaagttttaattattaattattaagaatttaatgtagttttttgaaggtagtgggtattttgtgtttaaattaaggtttttttttttttttttttttttttagtaagtatattatttgaattgtatattaagtgtattgtttatttttttttgtgagggtttgaaagttttataggcgaaggttgttgacggattgttttgttgggaggattaaagttatattttaggtttcgtgaaaagtaggggtagaggtttgggggaaaatgatttgggaagaggtagggcgtttaggggtttttgtttttttagttattaagtgataatttttgtttttaaatttttatagtgtgtagttttgtgtaggttttttgcgtggttttttggtgtgagtgtgtgcgcgcgtgtaaacgttgcgagcgaattttaaagggtatttcgaggattttattttttagcggagggtatttgtgatttagtattgagggttgtagattcgagggttggtggttttgtttattttatgtttgtatatacgtgtttgtcggggtattttgagtttaacggtacgaagttaattaatatagttttaattgggtggatttttgagttttttttttatttaaaaaaaaaaaaataagcgttagtttgggtaattagattgttggaaggagttaatttttgagtgaatttatttgataatatttaaattaggtcgtaaaaaataaagttttttggtgattttttttttttatgttttagtgttagatgttgaatataatttaaattgtatgtttagtttcgtgcggttgcggatgatgttagaaggtgaggaggatttaggtttgggttggggatggttttagatttacgaggtttaggatttgttttttatgtttatttttgagtttaagtttatagttgagtttagtagtgtgaaattgtttcggtcgtttttattcgttgtttaaaaaaaagttatagttttttgttttgtaattatttagttgaaatataattattttttttttattttagaagtaaaggtagattttggttgttgtaaagagaagattaaattttattaaaagtgtcgtttttatttggtttttttaagggttgttattttgtttagcgttcgatattagaataataggtagtgggcggttttgggtgggcgagcgagcgtgttcggggtcgcggcggttattcgtagggtgtcggggtcgcgtcgatcgaagcgagcggcgtgggcggtcggtttaggtgtgttaggcggtcggagttttagttttttcgcgttcgcggtcggtaggtgttcgttcggtcgttcgggtttcgcggcgtatttagcggttgttcggtcggtttcgcgcggttttaaacgcgttcgcgtttcggtttttttttcgtttggttcgggtgcgttttttagtgttgcggggattacgggggtcggggggcggtaggtaggggttgatatatttttggtcgcgtttagggaattcggttttttattttggtttaagttgagttttttcgttttttttttgtgtgtgagagtgggtttggcggggttgatagtcgtcgttttgggttgtacggtggtttgcggtgtgggaacggttggaggcgcgcgtagcggtaggagagttggtggcggggatagaggacgggttggaggtcggatttttgagtttttttgttttatttcgtgttttttttttgaagtacgtagtcgggttttggagattcgaagggtttcgtggtgttcgggaggtgggtcgggggtttttggtcggagtcgtagggaaaggagtgggggtgggggggataaagggtcgcggaggcgggcggagggggcggcgtgttattgttaatcgtttttcgagagtagagttcgcgagttcgtcgatcgcgatttggttttttcgcgttttcgttttcgtttcggttttataatcgggggagttcggggtgtgcgcgggagcgcggcgggggcgtacggttgtaggggcgtcgcggcgggttcgagtcggttttattgtgtggattagtcgagtttgtttttgagagattttattagaatttcggtgtagtacgattgggttttggtgtgtagagattatgggatattttagttggcgtttttttacgtattttttttttttatgagtattttttttttttgatgtagttatttttaggataggacgtttgttatatgtagtcgagttattagaaatttcgtaattttgttattggagagagcgcggatgtaagggcgggggttacgcgggaggggagggtaggagaggcgtattttagggtgagcggatgaggatagcggcgggttatagtggtttaatagaaatcgttaaataaaaagttagattttttatttttagaggttagagaaaggtgttgttagggaagtggtatttttattttttagacgttttcggtatagtgttgcgggggatgtgggggttgggggggatgtgggggttggggggaggggttaggggtagtgttggatgggaggggagcggaagtttcggtttaggttggggattgggggcgtcgagtcgttagttagttcgtcggtttggcgtcggtcgagggggaagggcgttttggcgtttcgttgtgttatttattttggttgggatggagttgagtgggtggttgtgcgtagtgggggtggggaagtagggtgaggtaggagggttatttaagttttttattcggttgtagtgagaagcgggttttcggggtgatagtagtgtcgcggtttttcgttgttgtcgttgcggtaggttttaatattagtaattttcgtagagcggtggtgcgtgtgtcgggagttttttattttcgtttttttagtttcgttcggaacgaggtcgcggcggcgttaggatatcgcggttcgcgcggggagggcggagggagggtataggcgtcgggagggggcgagggggttgcggtgtttcggttttggtatatttggcgttttcgcgcgtcgtcgcggttttattttcggttttttttttttttcggtagtagtttttttttcgtagttcggtttttttttggggagttcgtttttatatttagtttttttagaaaagagtaattgtaggtggggggtgcggtgggtttatattttgattaaaatagaaggtgtattttttatttgaaattaaatagtagaaggaaacgcgttggaaaaaggatttttgtcgtttttatgtagtcgtaggtgattgtagttgttggtaagtttggtagtgatatagtagtagtagtgtagaggacgtgggggtgggggagttttattgttttagtaggagttgtagaggtgataatttaggtgggattttgaaggagtttttttttttttttttttttttcggattggtggtgtggagataagattgaataaggagaaaaggaattcgtaattgtatttttgtgtagtaggttgggggagcgagatgttttgttttatttgtatatttatatgtttatatatagagtttatttttaaagtattttagttttgttagatggatagaaatgtgagtagaaaattatttggggaaatagtaatgtaaaataataaaaatatgaacgttgggtttgatttgttatttaatttgtttaggaaatttaagtttgttttttttttggttggggttaggtagttttgaaaggtcggtttttattaggattttagatgagtatttaaattggggtttttatttaaattgggttaggtgaaggttttattagaggggagaaatatgatagtatgatttttttaaataggtgtttaaaatttatttttagggttttgaattttaattttgttttatgtatttgattttttaatgttttaggaaaatattgggtgtttaaggagatggttttaggattgttttaggttttggaaaaattagtggagttataatttttatttagttagttattttttatataaattttatgagatgtgtttaggttgttatagattcgaatttatttcggtgtaggatttgagatggttgatttggtagttttggttcgagtttttttgggtgagtaggaagttttgtagggaagaggtttaattattaattttttgtagttttatgttttgtttttttcgatagtttgtttatatttgtgtggtttgaagagtgcggttttgtaatgcgttgggggtttttaagttagagaattatgttatgagggttagagtggagtagttttgattgttttttttttttattgttttgtttggttttggaggtgaggtttagtatagatgggttttagggggcggtgttagttttgggataatggtttatgtgaatagaattggggtagtttattagttttggggatagttattaatagtgagtttggggtaatgaggaaggttcggtgtggtgatttttttgaaatagtttaggtattgatttggttttttatggattatggatgattttatattttattaaatttaatggggttttaatgagtatatttttatttggaattgttgattgttgtggaagagaataaagaaatgatagtagttatcgattttgtgttttttatgttattttattattatttattattgtgggtcgtttgagttaaggatgttaaggttgtgtttgtttaaaatgagcgataggttgttatggtatatatgtgtgtgttatagttttaattttaggtataaatttattattttttttttttttttttttttttttttttttttttttttttgttttttttttttttttttttttttttttttgattattaaatatttagatgtttttgtatagaaggttttttttggttgttattgatttagttttttttgttgtttagttatgtgagtagataatatgtggagtgggttgtatttagggagtgtagttggaagtatttgtttggtattagttttattttagagagagttgaatggatttggttgaggttatagaatttattgtggataagagggtattaggaatgatgaggtttttggtttggttggggtgggattttgttgcggggttgttagatttttttgattttataatagtggaattttttgtatgggggagaatgattgtgatttttacgtttagttggtttgtttgtttttgtattattgaggtgattatataaaaagttgggttgttattttgacgtttttatttttaaggaattgcggagaaatgggtggtggtttgaggtgatgaaattttttttatttggggtttgtaggtagttttttttcgtttggatagttttttggagatttattttaggtatttatttttttgggaagtttttgatttgtttttagaaatttagatgagttgtttatttttggattgtttatattttgaatagtttttttttaattgtatttgttatattgttgttatatttatttgtttacgtgtttttttttttaatagatggtgagtaaaaatttgagggtaataggatttaggttatattcggtttatttttatatatttaataaatggtatggtgtttggtttataataaatttttaataatagttttttgaatgaaaaagtgaacgaatatgaattatagttgttttgttaatgttagaaaaagaaacgagatagatattttgatatttttatttttaaattatatagtaatatttttagaatttagttatatgaaaatggtatagaaattatagaaatattaaaaaaggtaaaattaaatgtaagatgtgtataatagttaaggaaataggttttggagtttagttgtttgggggttaattattaatttttttaaattttaatttttttatttgtatattggggattagaatattgtaatgtttagagttgttttggggattaaatgagagacggttttttatttggtatagattaaatgtttaagaatttttattattataattattattgttgttgttgttattttttttttttgatgttttgtagattagttagtgaaaaggttttgtgaaattatatgtattttattttttgttggatttgatgggtaatattggttaatatttattattagtttttagttatttcgtgtgtagggaaagtagaaagattattatatgtttttttagaagttgtaaatattttttagttttatgattaaatttttttttattgatttggtaaattaaattatttagattttaaaaggggttaaatgttttttgtattttattttacgacgaaaattgaatattaattaatttattatattaattttagggtatgtatgatttatattttggtgtgtttttaggttattaagaagatatttatatatatgtgattgttaataataataaaatgttataattttagttattttgatttagaagaatagtataatgaaataaaatgtattaaaaagggagtgtattttatgaaaaatgaattttatggaaatattgttttatttatatttttatttgtttttgaagtagggaaggttagtaataaattggttttttttgtatgtattttttattatagagttatagattattagatttaaaatataatttgtaattttattttttttgatatattgtttaatattttattaaaataattatattaagtataagataaatttgttatattttgtttttataaaagaattaggaatgtttttttagaagaaatagttttttttttttatattattttgaaatagtttttttttgagttaattttttattagatttatgttgtttatgtttttttttgattgtagtattagtgtattttgtgagagttgtagaattaattgttgaaaaatttatgtaagtgtttttttattagttatatgagattgattatagtatattgttattttaagtttttttttgaatttttaaatgtaagtaaaatttttaatatttgaaagtatttttaaaataagaatttaatatttgatatgtattaatgtaaggtttatataaaatgtagtattttaatttataataaaaaggaaaaaatggttgagtataaataatattagtagtgtttagataggcgcggtagtttacgtttgtaattttagtattttgggaagtcgaggcgggtcgattacgaggttaggagattgagattattttggttaatatagtgaaatttcgtttttattaaaaatataaaaaaaaaaaaaaaaaaaaatttagtttagcgtggtggttgttttagtttgaagttttagttatttaggaggttgaggtaggagaatggtgtgaattcgggaggcggagtttgtagtgagttaagatcgtattattatattttagtttgggtaatagagtaagattttattttaaaaaaaaaaaaaaaaaaaaaattagtagtgttttaaatatattgtgggttaattattttataattatattgtagttatagaaattgaaattgttgttgtgtggttataaaattttggatttatgtttagtttaggtgttatttttagtgaggtaagtaaggggaaagaaggaagtaaaataagattattgtgtcgatttgattttggaatatagtattttatgtttattttaaattaagagtagtatttatttttttagaatattattattttaattgtttaattatttttttgaggtttagataagtatagtaaaaattaatattttgtttaagtaaaaataattgggatgtatgtgggtagttttagttttttagatagagttaaaaaaagttaatataatagagagttggataattttttgtataaattaattaaggttttagttagtattttatttttttattttgagagattattttttaaatagaatatttttttttttttttgttatttaaataggtatttattttttttagttttaaaggttgggaagtttaaaagtaagatatttatatatagatatttaattttatgtttataaagtggaaataggttgttttttttaaaaaagtattttgtttagcgaatggttttatgttttttaaaataagagaattatagatagatgtttaattttatgtttataaagtggatgtaggttgtttttgttttaaattttattttttgaagttaattagattatgtatatattggtttttttgttttattattttttagtatatttatgtagatattaattttttaatttttaaaatgttttgttttttgtgtaagttatgttggtaagtatttttgtgttattatgataagatagaatttagttgaaaattaatttttttatatagtgatttttaaagagaagatatttttttaattagcgtggggttatttaagtggggagttgggtttagtgttttttttaaaattttagggatgttgggattttaaggatatgttttgtgatttgatttgttttttgttttttattttttgtttatagg

SEQ ID NO: 702 - DNA, 14307 bp, Artificial Sequence
  chemically treated genomic DNA (Homo sapiens)
tttgtagataaagggtagaaggtagaggatagattagattatagagtatgtttttagagttttagtatttttggggttttggagaggatattaagtttagttttttatttggataattttacgttagttaaagaagtgttttttttttgaaaattattgtgtaaaagaattgatttttaattaaattttattttattataatgatataaaaatatttattaatatgatttatataaaaaataaaatattttaaaaattaaaaagttagtatttatatagatatgttaagaagtaataggatagaaaaattagtgtgtatataatttaattaattttaaagagtagaatttaagataaagataatttatatttattttgtaaatatgaagttaagtatttgtttgtgatttttttattttgagagatataagattattcgttaaatagaatatttttttagaaaagataatttatttttattttataaatatgaagttaagtatttgtgtgtgagtattttgtttttggattttttagtttttagaattgggagaaataaatatttgtttaagtagtaaaaaaaaaaaaaagtattttgtttagagaatagttttttaaaataagagaatgaagtgttaattaaagttttgattggtttatatagaaaattatttagttttttattgtgttaattttttttaattttatttagaaaattaaaattgtttatatatattttaattatttttgtttaaataaagtattggtttttgttatatttatttaaattttaaagagatagttaagtaattaaaataataatattttgaagagataaatattgtttttgatttaaagtaggtatggaatgttgtattttaaaattaaatcgatataatgattttattttatttttttttttttttttgtttattttattaagaataatatttaagttgggtataaatttagaattttatggttatataatagtagttttaatttttgtaattatagtgtggttataagatgattagtttatagtatatttaggatattgttaattttttttttttttttttttttgagatggagttttattttgttgtttaggttggagtgtagtggtgcgattttggtttattgtaagtttcgtttttcggatttatattatttttttgttttagttttttgagtagttgggattttaggttgggatagttattacgttgggttaaatttttttttttttttttttttgtatttttagtagagacggggttttattgtgttagttaggatggttttaattttttgatttcgtgatcgattcgtttcggttttttaaagtgttgggattataggcgtgagttatcgcgtttgtttggatattgttaatattatttgtatttagttatttttttttttttattgtaaattaaagtgttatattttatgtagattttatattaatgtatattaaatattgagtttttgttttaaaaatatttttaaatattaaaaattttatttatatttaagagtttagaaaaaaatttagggtaataatgtgttatagttagttttatgtgattaataaaaaagtatttatatgaattttttaataattaattttgtaatttttataaaatatattggtattgtaattaaaagaagatatgaatagtataaatttaataaaggattaatttaagaggaaattattttaaggtgatgtaaaaaagaagagttattttttttaaaggggtatttttaatttttttataaggataaaatgtaataaatttattttgtgtttaatgtaattattttaataggatgttaaatagtatattaaaaaaagtgaaattataaattgtgttttgaatttgataatttatgattttatgatggagaatatatgtaaaagaagttagtttattattagttttttttattttaaaagtaaatgggaatataaataaggtaatatttttatgagatttattttttatgagatgtattttttttttgatgtattttattttattgtattatttttttgagttaaaataattaaaattgtggtattttattattattagtagttatatgtatgtgaatatttttttagtaatttgaaagtatattaaaatgtgggttatatatattttgaaattaatgtaatgagttaattaatgtttaattttcgtcgtaagatgaaatgtaggaaatatttggttttttttgaggtttgaatgatttaatttattaggttaataaggaaaggtttaattataaaattaaaaaatatttgtagtttttaagggagtatgtgatgatttttttgttttttttgtatacggagtagttgaggattaataatgaatattagttagtgttgtttattaggtttaataaagaataaggtgtatgtgattttataaaatttttttattggttggtttgtagaatattaagaaaaaaaaataatagtagtagtaatgataattgtaatagtaaaaatttttgagtatttagtttatgttaaatgagaggtcgttttttatttaatttttagaataattttaggtattataatattttaatttttagtgtataaatggggaaattgaggtttaaggaggttaataattagtttttaagtaattggattttaaaatttatttttttaattattatgtatattttatatttggttttattttttttaatgtttttgtgatttttgtattatttttatatagttgagttttgaaagtattattatataatttagaaatgaagatattaagatatttatttcgtttttttttttggtattgataagatagttgtaatttatattcgtttatttttttatttaagaagttattattgagggtttattataagttaagtattatattatttattgagtatataaagatgaatcggatatagtttaggttttattatttttaaatttttgtttattatttgttgggaagaagaatacgtaaatagataaatataataatagtgtggtaaatgtagttgagagggagttgtttagggtatgggtagtttaaagatgggtagtttatttgggtttttgaaggtaagttagaggttttttaagaaaataaatatttgagataagtttttaaaaagttatttaagcgagaaggaattatttatagattttaggtggaaaagattttattattttaaattattatttattttttcgtagttttttaaaaatagagacgttaaaataatagtttagttttttatgtggttattttagtgatgtaaggataagtagattaattgaacgtaggagttatagttatttttttttatgtaaagaattttattgttgtaaggttaggaagatttagtaatttcgtaataggattttattttaattagattagaaattttattatttttggtatttttttgtttataataaattttataattttaattaggtttatttagttttttttggggtggagttggtgttaggtaagtgtttttaattatattttttgagtataatttattttatatgttatttgtttatatgattgggtagtagagggggttggattaataatagttaggagaagttttttgtgtagagatatttgaatgtttaatgattaaggagagagaaagggaaagaaggaaagagtaaagaaaagaaggaaggaagaggggaggaggaagggagggaatgatgagtttgtgtttaaaattagaattgtggtatatatatgtgtattatggtagtttgtcgtttattttgggtagatatagttttgatatttttagtttagacggtttatagtaatgggtagtgatagggtgatatgggaagtatagggtcgatgattgttgttatttttttgtttttttttatagtagttaatagttttaaatgaggatatgtttattgggattttattggatttgatgaggtgtgagattatttatggtttatgagagattaggttaatgtttggattattttaggaaaattattatatcggattttttttattgttttagatttattattagtgattatttttagagttgatgggttgttttagttttgtttatatggattattattttaaagttggtatcgttttttagagtttatttgtgttgggttttatttttaaggttaggtaaggtagtgggagaggaaggtagttagagttgttttattttggtttttatgatatggttttttggtttaagagtttttaacgtattatagaatcgtattttttagattatataaatgtaggtagattgtcgagaggggtagggtatgaggttgtagaaaattaatgattaagttttttttttgtagagttttttgtttatttagagaagttcgaattagggttgttagattaattattttagattttgtatcggggtaagttcggatttgtagtaatttgagtatattttatagagtttatataggaaatgattaattgaatgggagttataattttattaatttttttagaatttgaagtaattttaaaattatttttttaaatatttagtgtttttttgagatattgaagagttagatatatagaatagaattaaagtttaaaattttggaaataagttttaaatatttgtttaaaaaaattatattattatattttttttttttagtaaaatttttatttgatttaatttgaatggaagttttagtttgggtgtttatttgaggttttgatgaagatcggttttttagagttatttaattttagttaaaaagggaatagatttaggttttttaaataagttaaatagtagattaggtttagcgtttatgtttttattattttatattattatttttttaaatgattttttgtttatatttttatttatttagtaaggttggagtgttttaaaagtgagttttatatataggtatatagatatatagatgaaataagatatttcgtttttttagtttattgtatagagatataattgcgagttttttttttttttgtttaattttatttttatattattaattcgagggggaaaaaaaaaaaaaaaggtttttttaaggttttatttaagttgttatttttgtagtttttgttggaatagtaagatttttttatttttacgttttttgtattgttgttgttgtgttattgttaagtttgttagtagttgtagttatttgcggttgtatgggggcggtaaaaattttttttttagcgcgtttttttttgttgtttgattttaggtagaaaatgtattttttattttaattaaggtgtaaatttatcgtattttttatttatagttatttttttttagagaaattgagtgtgaggacgaattttttagaggggagtcgggttgcggaggagaggttgttgtcggaggaggaggagggtcgaaggtgaggtcgcggcggcgcgcgggagcgttaggtgtgttagagtcggggtatcgtagttttttcgttttttttcggcgtttgtgtttttttttcgtttttttcgcgcgagtcgcggtgttttagcgtcgtcgcggtttcgtttcgggcggggttgggaaggcgagggtaggaggttttcggtatacgtattatcgttttgcggaggttgttaatattgggatttgtcgtagcggtagtagcgggagatcgcggtattgttgttatttcgggggttcgttttttattgtaatcggatgaaagatttaaataatttttttgttttattttgtttttttatttttattgcgtatagttatttatttaattttattttagttagagtgagtggtatagcggagcgttagagcgtttttttttttcggtcgacgttaggtcgacgggttagttagcggttcggcgtttttagtttttaatttgggtcggggttttcgttttttttttatttaatattatttttagtttttttttttagtttttatattttttttagtttttatatttttcgtaatattgtatcgagagcgtttaaggagtggagatgttatttttttgataatatttttttttgatttttaggggtgaggggtttagttttttgtttaacggtttttattgagttattgtagttcgtcgttgtttttattcgtttattttagaatgcgttttttttgtttttttttttcgcgtggttttcgtttttgtattcgcgttttttttagtggtagagttacgggatttttaatgattcgattgtatgtggtaaacgttttattttaaaggtgattgtattaaaaaaaaaaaatgtttatggagggaaggggtgcgtgaagaagcgttaattagaatattttataatttttgtatattagggtttagtcgtgttgtatcggagttttaatagggttttttaaagataggttcggttgatttatataataaaatcggttcgggttcgtcgcggcgtttttgtagtcgtgcgttttcgtcgcgttttcgcgtatatttcgggttttttcggttgtgaagtcggagcggaggcgggggcgcgggaaagttagatcgcgatcggcgagttcgcgagttttgttttcggaaagcggttaataatagtacgtcgtttttttcgttcgttttcgcggttttttgttttttttatttttatttttttttttgcggtttcggttaggggttttcgatttatttttcgggtattacggagtttttcgagtttttaaaattcggttgcgtgttttagaagaaggatacggaatgggataggggagtttaggggttcgatttttagttcgttttttgttttcgttattaatttttttgtcgttgcgcgcgtttttagtcgtttttatatcgtaaattatcgtgtagtttagggcggcggttgttagtttcgttagatttatttttatatataaagagaaagcgaaggggtttaatttgggttaaaatgaaaaatcggattttttaaacgcggttagaagtgtgttagtttttgtttgtcgtttttcggttttcgtggttttcgtagtattgaagggcgtattcgagttaggcggaaagggagtcggaacgcgagcgcgtttaggatcgcgcggagtcggtcgggtagtcgttaagtgcgtcgcggggttcgggcggtcgagcgggtatttgtcgatcgcgagcgcgggagggttggagtttcggtcgtttggtatatttaggtcggtcgtttacgtcgttcgtttcggtcggcgcggtttcgatattttgcgggtggtcgtcgcggtttcggatacgttcgttcgtttatttagggtcgtttattgtttgttgttttggtatcgaacgttaggtagggtggtagtttttaaagaggttagatggaaacggtatttttagtaaagtttagttttttttttgtaataattagaatttatttttatttttggggtggggaggggatagttatattttaattgaataattgtaaagtaaagagttataatttttttttaagtagcgagtggagacggtcggagtaattttatattattaggtttagttgtgggtttaggtttaggggtgagtatgaggagtaaattttgggtttcgtggatttgggattatttttagtttaggtttaagttttttttattttttggtattattcgtagtcgtacgaagttaaatatatagtttagattgtgtttaatatttggtattaaagtatgaggaagaaaaattattagaggattttgttttttacgatttagtttaagtgttgttaggtgggtttatttagaagttaattttttttaatagtttagttgtttaaattggcgtttatttttttttttttaagtaaggaaaaaatttaagagtttatttaattgggattgtgttagttgatttcgtgtcgttgggtttagggtgtttcggtaagtacgtgtgtgtaagtataaagtgggtagagttattagttttcgagtttgtagtttttagtgttgagttataaatatttttcgttgaaaaatgaaattttcggaatgttttttaaaattcgttcgtagcgtttgtacgcgcgtatatatttatattagagagttacgtaggagatttatatagggttgtatattatggaaatttaaaagtagaggttattatttgatagttggaaggataaaaatttttgagcgttttgtttttttttaagttatttttttttaagtttttgtttttgttttttacggagtttaaaatatgattttagtttttttaataggataattcgttagtaattttcgtttatggggtttttagatttttataggggagaataaataatgtatttaatatataatttaagtagtatatttattagaggaaagggggaaaggaaaaaaattttaatttgggtataagatatttattgtttttaagaaattgtattaagtttttagtagttaatgattaaagttttaaattcgtgtaattagtttatttaaaagaaattttttaaattcgtgtatttgatgtaaaagaattggaaatttgtattatatttataaattatgtttttttttaaattaaaagtagggggttttttagtgtatatttgtattagtgttagtagtagatttgtaatttcggaggtatttttttttcggagttggtaagatagagagagagagagatagagatatagagaaagaggggaggaggggagaattttttttacgttttttattcggttattatttttttggtagttataattttaatatgttattttatggatattaaagggttaatggtatatttattaaatcggttgtggttttttttggttttttggatagtattattggggaagatttttaagtgaaatttagttttgtagtatagttgttttcgtttgagaattttttttaaatgatttaagttcgtgattgcgggttttttggggagtttttttgtttcggattgatttaggtggttatttaataaaatcgggttgtttatcggtaatacgggtatatttttaaacggtatcgtattttgtatatcgaaatagtttttaattttatttaagggagttattagaggattcggtttttggagtataagaataaataataatgatggtgttaatttaggagatattaggcgaggtatatttaattttttttttttattgtagttgtagagagagagagaaaaaaaaggtttttttttttaatttattaaatgtataaataaaagtaatttgttgttttattggtataggtttaaggttaaattattgatagtttaagaaattattattttatatttatatattgatatattgataaatatatttatgtatttttatagatagatttttagtttttagtaggtaggaaggtttttattttattcgatcgtaataaggaaaaaaaattcgtagtttttttatttggtttgagattagaatgattatagtaatttaaatgtttaggcgttattatagggatttttaagatgtacgggttacgttagaatttacggattttgattttaggaaggtatgcgttgtttttattttttaatcgattttgtagatattagtatgaattttttaaggggaaaaaaaaattttacgttggtggcggcgataaattttttttttcggttttttttttaaaaaatgataataataataaaataaaaagaagaagaaattttaggcgtttaaagttagtatttaggattttttagaggttcggtagatgtttattggtttagaacgggtggcgagcggcgagcgaggagagtcgcgttcgggagttcgcgtgtcgtttaggttgtcgcgaataggtgttgtcgcgtcggttcgcggagcgttgtagtcgggcggagcgttttttttgcgtagttttcgtcggcgcgtagagtggcgtaggtagcggtattgggttgggtttaaggtagcgtcgtcgtagttcgggtttttcgcggttttagcgttcggtttattgttcgcgtcgttttgcggtaggcgaggtgcggcgcgttagagcgtaggattttttgggaggtagtcgaggagttttggttttataaagaaaagtaaatgaaagatgtattgcgagaggcgggaggaagaaattttgagtttttcgagatttaaagtttttttgtagaatagaagtcggtaatttataatttagttggttggttatattgatggagggttagagtgaaattgggaaattagtttttattggggttttgtaattttgcgttgtattatagaatatgattgagttgagagagtcggagggaaggggagttgatttaatggattcggatggttatggtagttttttttttatttttcggttatatatatagaagcgtaaattatgttttaggtaagattaatttttttttttcgttatatatatatatatatatatatacgtagatgcggttatcgtttttgttttgtttggagcgttttgttgggtatttttgggttggggttatgtttaggtttcgtttcgttgttcgggtttcggcggtcgtaaagtagtcggtaggggggcgttagagaattttttttgttttcgatttcgattcgggcgcgcgttttcgggagtttgggtggaggggagcgttttagtaggcgttttttcgtttttaaattacgttgtttaggacgagcggcgttattttaagtcgtgtatcggttcggggaagcgaaaggcgagttttggtgttttattttatcgttcgaagttcgtcgcggagttgggagggtcgggtattggatgtttgcggggcgtttcggggttgtagtcgtttttttttgttttgttttgcggggtcgtacgtggaagtttgagtttcgttgcgcgggttcgggtttttgttagtcgtcggcggttttcgcgtttagcgggagttagggataaagaaattcgttttcgggggtcgttaggggttttgtcgggtcgggttcgttagagagattggaggcggcgcgttttgcgttcgggatagtttgtttgcgttcggatttttagtggcggcgggcgcggagcgcggcgttttttaatatatatatatatatatatatatatatatatatatatatattcgtttatagttttttcgcggggttttttttttttttttttgtttttttttgtttatattgttttagaaacggttcgattttcgggttaagatggtgaaagttgtcgagatttgagcgtagttttatattgcggggcgtgtaattgagaagtaaagtcgaaagtagagattgaatttttgcggtggggaagcgaattaaaatttggttatgggggagaagtcggattcgttttagtagttagttaaaggttggagatgtataattggggttggttttatttcggacgggagggtttcgtttgaagacgaaagggagcgatgaatttgtagatttcgggggcgttggaggtgttagcgatttggagcgatttttttttgtttttcggggaggaaggcgtgtttcggttcgggcgaggaggaaggagagaagagcgagtggttttttttttttttttttttattttttttttgtcgtagtttagggttattgggtgttcggggttggttcggtgcgttttgtttacgtgtttttgaagtatgagagttttgtttcgtggtatttatagtagttatattcgcggtggtatagagcgggttttaacgttaattgttcggcggtagatataagaagttgggtattaagtgttattttttataaattattcgagtcgttcgtattaattttcgaggtagttagtagtgatgggtatagtaggggcgtttttcgattagttgggtatagtgcgtcgggatggttatttagtggggaaaaaagcgatggaagaaatagagataggtttagagagatagggagacgttttataagaagagaaacgagtagtacgtggatattggatatttttagtgaagataagattgggattatttttattagttgtttttaattatattttttcgatttgaatttagattgttatttaatgagtaaagattattttcgttttcgaattttgtagcgtgtgattgtcgttttaaaaagcgttgtagtagtggaagagagggcgaagtagttgatggagtatttttttaggttgagtagttttttttatttgtagttggtttgatttattttttattcgtatttttaattttagttgtaagaagtttttgttgttttttcgttattttattattagattttttttgtttggttttgttggttgatttggtcgggttgttttttttattgtagtaagagaaatagtgtttttttttgtattggttatattatattttttttgtatttattttattcgttagggttgatatttttaaggtttttttatagttttggtaaaattatgaatttttatgtttaggattatgagtatgttttataagttttttttagtgagtatatagatgttagtatataaagaagattgaggttttgttttttagagatacgtggtgtaattgggttaataatttttgtttcgaaagattgttgttaggagtaaaaggaaaaaaaaatgtatacgaaataagtagtatataatagatttttaagatatagtcgttattattatattattttttatatagtttttttatggattttttttatgggggtatttagtaaatattgttattgattttaattttaaagttttttgaggttttgtttttttaaaacgttttaatttttcgtattttttttttttttttttttttgtgttttttattatttttgttatttgttttttttgtggttagtttagtatttaggtttaaatgggaataaatgataagagaagtaaaagagggttatgaagaggaatgagtattggaatgggagtttgtagatttgaaatatattatttgattttttgtttattttatgtgtggttacgggttttttttttacgggttttagttttttgttgtgaagattggtttatgtaggttaaagtggtttgttagttataaagttttttgtaaatttgaagtggttttttggaaaaagtttatttttttttttttttttattagtttgtttttttttagtttttttggatttttagatgtaaattagtatagagttattttattttttttttgtagtaaaggtgttattgggtttttgtttttttatttgtttttttcgttttttttttttttattttataattttttaatttatttatgggtttttgtttaggagttgtaaggagtatgggatggaggggaatggtttgggaaggttgaagtttatttttagtgtgattttaggaattaggtttgagttttatggtaagaggatagaatttttgtagttattatttattgattgtttattgtgtttttaatattttgttaagtgtttttgtgttttatttttttaatattgaaaattgttttatgaggtattattttattttatattatagatgaggaaattgtggtttatagaaattaagtagtttgtttattgttatagtgttaataaatggtggagttaagtttatagatattagatttttattgtgtaatattgttttcgattataataggtatatatttttaaattgtttaataggatgtttttttaaaatatatagaaataaatgatgggtatatatatttgtatatattaataattagttatattgagtgtatatgaataataattaattagaagataaaatgaaggaaggaaaagattttagttataataggttttttaaaaaggaaaggaaagtgaaggaaggaaggaaaggagatataagatttttaggagtagaattaataataaaaaaatgtataagatttatatgaagaaaaaaaaaattttttttttttttttgagataatgttttattatgttgtttaggttggtttcgaatttttgggtttaagagatttttttattttggttttttaaagtgtttggattataggtatgagttattgtttttaattaagaaatatatatatatatgtggtttttttgggtttttttgtttgtttgtttgtttgtttgagatagagttttattttgttatttaggttggagtgtagtagtttgattttggtttattgtaattttcgtttttcgggtttaagtgatttttttgttttagtttttcgagtagttaggattataggtatgt

SEQ ID NO: 703 - DNA, 6077 bp, Artificial Sequence
  chemically treated genomic DNA (Homo sapiens)
  unsure 1153: n is a or g or c or t
tgtaatttttgtttttcgggtttaagtaatttttttgttttagttttttgagtagttgggattataggcgcgcgttattgtacgtagttaatttttgtatttttagtagagacggggttttattatgttggttaggatggtgtcgattttttgatttcgtgatttgtttattttagttttttaaagtgttgggattataggcgtgagttatcgcgtttggttaatatttgttttttaattaatttgtttgtttagattttatttaatgtaattatatttttaaaatattattatttgaatatgtaattaatatagaaattattgatgagatattttatattttttttataataagtttttaagatgcggtgtatattttttatttatagtatattcgttagtattagttatattttaagtgtgtagtggttattgtgtgggttataggtttagaatataagatatgaagatggagagtgagaaatgtttttggaaaggttggaagtttttgtttttttgttgttaattattaaattttttgagagtgttattaaggagtgatttaaagtattatataaagagaattataaatattttaatattatatttgaaatttaaatgtataattttttatatttggttggtattttagagaggagagaatgggtatagttatttatattatttatttgagttttataattatttgtgatgtggttttttttaggtgggaaatcgaggtttagaacggttaagtgattattttagggtggtaagattataagtggaagggtgtgaatttatattgtttttagcggataagaataaaaagatttaggttgggtgtggtggtttatgtttgtaattttagtattttggggaggttattgtaggtggattttttgagtttaggagtttattattagtatgggtaatatggtgagattttatttttattaaatatatagaaaattagtttagtttttcgggaggttgaggtgggaggattatttgagtttgggggatggaggttgtagtgagttgaggaacgtgttattgtattttagtttgggtgatagagtaatattttgttttagaaagaataaaaagatttggttatgaattcgttagttagttttttttatataatttntggataaggagatttgatatttataggtttttttttagaagtgggagagttttaaggttacgtggttcgtttagtttttgttattttattagatattgtttattttgtatgttggattagtattttagtgagaagatagtaggtatttttatttatgtagtttatttagtttttataattatttgtgatggaggtaaggtaagtattttagttttttttgatgagtgggaaattgagatgtgttttttttttgttttttatcgaggatttttgtatgtaggtatgaattttaggagtttagttgatattggagagacggggcggggggaattagttgtagggttttggaggaagttgttgtgtatatttgtaaggttgtaggttatatttatttgttaagtagtgaaggaaggaagttgtttttaagggattggaaaaatttattaattagtagaatgagaaattgaggtgaagtaggaggtggtagggttttagatagtatgttggattagtggtttgtgttattgtgttttttgtaggcgggtggtatggggtgtatgttgattttttattttaggagttggtgttaggaggttaggtttttttaatatttttgttttatagatgttaaatttgagggttagaggggtaggagaggaagagattttttgtattttttttgggaaagaataagagggaagttggtagatgaatttgaagtgtattgattagggagttgagagagggcggtttgtagttagtttatatttgggaggaggcggtaggtttttttggggatagagtggttaagtcgaagtaagtttaattattttaatatgatattatttttttttattggaatttgagaatttgtttagtattttgatatttagtaagggatttgggtttttttggttaggtgtgcgtttttgggtgataggtttgtattaggtgtattttcgggatgtagtaagttgtggaatatgggtttaggggtattttttggtaagtattgtttttattttagttttgggaatgtgttttatgtagtgttttagatggtttatttgtggtttgtttttaagggttttttttttagttagttagttttgagatagagttttatttcgttatttaggttggagtgtagtgatgtaatttcggtttattgtaatttttattttttaaatttaagtaatttttatgcgttagttttttgagtagttgggattataggcgtgtattattatatttagttaatttttgtatttttagtagacgaggaattttattatgttggttagtttggttttaattttttattttaggtgatattttcgttttagttttttaaagtttcgggattgtaggtatgagttaatatgttttggtataagggtttatttttgattaatggaattgtaaattaagttttttttgttattagagttattttggatttatttttatttatttggtttggataaattgagtttgtattagatggagttaggtttgattaattttttatttatttttttttattttgttttttaatatttaaaaattttgaggtattattatatgttagttatatttttttgagtaaagtatttaatttttttgagttttagtttttttattgtataaaaggaataataaaatttattttttataagtttatagtgaggaatgaattaattttttattatagttttaaattaattttatttagggtatttttggtatatagtgggtgtttagtatttattttatttttttttttttgatttttttcgtaaaagtagaaaaatgaaagagaaatgttgattttttttttgatttgaaattattaaaatattttagtaagttttgggagggagttagtggtgtggtatgtgtatttcgttggttaagtatatgtgaacgaagttaagaatttaggggtttttttgttagttagtattgatttatttgcgaggggttttgtttggttcgggggaggtagggttgaagtattatattagggtatgtttcggggaagtagattttttgaataatttggatggttttttggagtatttaggatagaagttatttggaaaatagagatggttatttttacgtagttttgatagtgtttagaaagttttgttatttggtaaatgttaatagttatgattcgttttttaagattttggggagttttaagttttattttattagatttgagaagggtaaagggttgtagattttgtttttttaattggggttagtgtgagttatttttgatttagtgtttgtaatagattttgattttgtagtgggattttttaggtttttttgtttttcgtaatttttggatttatattcgttagatattatttgttattttttagtattagggagaattggattttttttggttttatatttttaggttttttgtaagtagttggtgagggtttttttttttttgtaagggaggttggtagaattatggatgtgattcgtataattttagagataaaaagaaagtatttaggaggttatttattttagttgttttattgtataggtcggggagttgagtatggagtttagtagttattaattagttatttttgtatttggtttttatttattggtttttagtttgtttcgtgattttttattgttttttattttttattagagggattggttggttttagatggagtggtttttttaaaattttttttttaaattttttgagatagagttttattttgttatttaggttgtagtgtagtgttgcgatttcggtttattgtaattttcgttttttgagtttaagtaatttttttgttttagttttttgagtagttgggattataggtgtgtattattatgtttagttaatttttgtatttttagtagagatgggattttattatattggttaggttggttttgaatttttgattttaaatgatttgtttattttagtttttcgaagtgttgggattgtaggtgtgagttatcgtatttggtttgggtagagtgaagttttatgttggggagttattagtatgtttaaattttttgtaattgtagtatattttgtaaaattgttttttataaaagggtagaattatttgggatttttatgagattatttattttgtagtatatattattttgaagtttatattttggaaaattttatgatggtatttttaggtttgtacgtaatttgtatttaaaatatagttgtagaattgaattaaagtatttttttgtttaattaagatttataatttttttttttgagatagaatttcgttttgttatttaggttggagtgtagtggtgtaattttagtttattgtatttttcgttttttggatttaagcgatttttttgttttagttttcgaagtaattgggattataggtgcgcgttattacgtttgggtaatttttgtatttttagtagagacggggtttcgttatggttaggttggttttaaatttttggttttaagtgattttttcgttttagttttttaaagtgttgggattatagggtgtattattatatttagttaggatttatgatttaatttattgttggggtagttttataatttttttttggacgttttagtaagtttatattttaagtagttattatatggtatattttattttttgttttttttttttttttttttatttagatttttttaatttttggggttttttttttttttttagggttagtttgaaaaggaggatcgagtttattgtggagtatttatggagatgtggagttttgttattaatttttaattgtagaattgggatgtggagttggaagtgtttttttttttgggttgtgttggttatagttatattttgtatcgttaggtcgttttcgattttgtttgaataaggtaaggtgttggttgggggtagtttggatttttgggttttgggaataggatgggttgggagggaggtgatatggttgtaggtgatgtggttaatagggaaggtttttttttaagtggagtaaagaattttttttttgtaggagaaatttttaagatatttgggttggttttggtttggttataaatataattgattttattagaggttggggttatgaaggttggtgatatttatttatttgagatgatatgtttgtggggggtaatttatgtttttttttttttgaggaaagaatatttgatgaggattttagtgttatattttaatataggtgatgtataaaatgtagttggtggtgtaatggggagagaatgattttagaatttgcgtgtagaatttgggttagattataggggatgttgtaggaggtgagagtttgttaaagatttttgatttttagaaaattgttttaaggttatattttcgttaggtatagtgggttatatatgtaattttagtattttgggaggttaaggtaagaggattatttgaggttaggagtttaagattagtttaggtaatatagcgagattttatttttataaaaaaaaaggaaattaattgggtgtgatggtgtacgttgttagttttagttatttgttatttaggaggttgagataggaagattgtatgattttaagagttgaggttgtagtgaattatgattgtattattgcgttttagtttgggtgaaaaaaaggtatattttttataagggttagtagttatggttttacgtttgtatttttttatttttaattgtgttttataggttttgtttgggggtttgttaagcgatttgttttggataggtattgtttgaggggttttgaagtgattgagatttaggaagtataaaggggtatggagatttatggcgtgttggaaatttagagttattatcggtaataggaaggatttattt

SEQ ID NO: 704 - DNA, 6077 bp, Artificial Sequence
  chemically treated genomic DNA (Homo sapiens)
  unsure 4925: n is a or g or c or t
gggtaagttttttttgttatcgatgatggttttgaatttttaatacgttataggtttttatgtttttttatgttttttgggttttaattattttaaaattttttaaatagtatttatttaaagtaaatcgtttggtaggtttttaaatagaatttgtgagatatagttaaggataggaaaatgtaggcgtgaagttatgattgttgatttttatagaagatgtgttttttttttatttaggttggagcgtagtagtgtaattataatttattgtagttttaatttttaggattatgtaatttttttgttttagttttttgagtagtaagtagttgggattagtagcgtgtattattatatttagttaattttttttttttttgtagagatggggtttcgttatattgtttaggttgattttgaatttttggttttaagtgatttttttgttttagttttttagagtgttgaggttatatgtgtgatttattatgtttggcgaagatgtggttttgaaataattttttggaagttagaggtttttagtaagtttttattttttataatattttttgtagtttgatttaagttttatacgtaaattttaaggttattttttttttattgtattattagttgtattttatatattatttatgttaaagtgtgatattagggtttttattagatattttttttttagaaagagaaaagtataaattattttttataaatatgttattttaggtaaatggatgttattagtttttatgattttaatttttgatgaagttagttatgtttataattagattagaattaatttaggtattttgagagttttttttataggaagggagttttttgttttatttgggaaggagttttttttgttgattatattatttgtaattatattattttttttttagtttattttgtttttaaggtttaggagtttaggttgtttttagttagtattttattttgtttaggtaaggtcggggacggtttagcggtgtagagtgtggttgtgattagtatagtttagaagaggaggtatttttagttttatattttagttttgtagttagaggttggtgataaggttttatatttttatggatattttatagtgagttcgatttttttttttaaattgattttgaggaaaggaaaaaaattttaaaagttaggagggtttaggtaggggaggggaaaggaaaaatagaaggtaaagtatgttatgtggtggttgtttaaagtgtggatttattaaggcgtttagaagaaaattgtgaagttattttaataatgaattagattataggttttggttgggtgtggtggtgtattttgtaattttagtattttgggaggttgaggcgggaggattatttgaggttaggagtttgagattagtttggttatggcgaaatttcgtttttattaaaaatataaaaattatttaggcgtggtggcgcgtatttgtagttttagttatttcggaggttaaggtaagagaatcgtttgaatttaggaggcgaaggatgtagtgagttgagattgtattattgtattttaatttgggtgatagagcgagattttgttttaaaaagagaggttataggttttaattggatagagggatgttttagtttaattttatagttatgttttgagtgtagattacgtgtaagtttgggaatattattatgaggttttttaaggtataaattttaaagtagtatgtgttataaagtgaatggttttatgaaagttttaaatagttttgtttttttgtgggaaatagttttataaagtgtgttataattgtaggaggtttgagtatgttgatggttttttagtataagattttattttgtttaggttaggtgcggtggtttatatttgtaattttagtatttcgggaggttaaggtgggtagattatttgaggttaggagtttaagattaatttggttaatatggtgaaattttatttttattaaaaatataaaaattagttgggtatagtggtatatatttgtaattttagttatttaggaggttgagataggagaattgtttgaatttaggaggcggaggttgtagtgagtcgagatcgtagtattgtattatagtttaggtgatagagtgagattttgttttaaaaaatttaaaaaaaaaattttaaaaagattattttatttagggttaattagtttttttggtgagaaataaggggtaatgaagaattacggaataagttaaggattagtaaatggaagttaggtatagagataattagttagtagttgttggattttatgtttaatttttcgatttatgtaatgaagtagttgaaataaatgattttttgggtattttttttttgtttttaaaattgtacgaattatatttatagttttattagttttttttgtagagagaagaaaatttttattagttatttataaagagtttaagagtgtggagttaggagggatttagttttttttgatgttggaaggtgataagtgatgtttgacggatatgagtttagaagttgcggggggtaagggggtttgggaggttttattgtagaattaaggtttattgtaagtattgagttaaagatggtttatattggttttagttaaaagaatagaatttgtagttttttattttttttaggtttggtggggtaaaatttaaaattttttagggttttaaagaacggattatagttgttaatatttattaagtgataagattttttgggtattgttaaggttacgtgggggtgattatttttattttttaggtggtttttgttttaaatgttttagggagttatttaagttatttagagaatttattttttcggaatatgttttaatgtggtattttagttttgtttttttcgagttaggtagggtttttcgtaagtgagttagtgttggttggtagaaaagtttttggatttttggtttcgtttatatgtgtttggttagcgggatatatatgttatattattagtttttttttaaggtttattaaaatgttttaatgattttaaattaaaagagaagttaatattttttttttatttttttatttttacgaaaggaattagaaaagagaaaatgaaatgaatattgaatatttattatgtattaaggatgttttaagtagaattaatttagaattatagtgaggaattaatttattttttattataaatttatgggggataagttttattattttttttatgtaatggagaaattgaggtttaaagaggttaagtattttatttaaggaaatgtagttagtatgtaatagtgttttaaggtttttggatattagagaatagggtgggaggaagtaaataagggattgattaagtttgattttatttgatgtaaatttaatttatttaaattaagtagataagggtaaatttaaggtaattttggtaataaaagaggtttgatttgtagttttattggttaaagatagatttttgtgttagggtatgttggtttatatttataatttcgggattttgggaggttgaggcgggagtattatttgaggtggggagttgagattagattggttaatatggtgaaatttttcgtttattaaaaatataaaaattagttgggtgtggtggtgtacgtttgtaattttagttatttaggaggttaacgtatgagaattgtttgaatttgggaggtggaggttgtagtgagtcgagattgtattattgtattttagtttgggtgacggagtgagattttgttttaaaattaattaattaaaagaaagatttttggaagtagattatagatgggttatttaggatattgtatggggtatatttttagagttgggatagaagtagtgtttgttagaggatgtttttaaatttatattttataatttattatatttcgaaaatatatttgatgtaggtttgttatttagaaacgtatatttgattaagaaaatttaggttttttgttaagtgttagaatattgaataagtttttaggttttaatgggaaagagtggtgttatgttgagatggttaagtttgtttcgatttggttattttgtttttagaaaagtttgtcgtttttttttaggtgtgggttggttgtagatcgtttttttttagttttttggttaatgtattttaaatttatttgttagttttttttttgtttttttttaaaaaaggtataaaaagttttttttttttttatttttttggtttttaagtttgatatttgtaaaataaggatgttaagaaaatttggttttttggtattaatttttggaataagaagttagtatatattttatgttattcgtttgtaaaaaatatagtgatataggttattagtttaatatgttgtttgggattttgttattttttgttttattttagttttttattttattaattaatgaatttttttaattttttagaaataattttttttttttattgtttgatagatagatgtaatttgtagttttgtaggtgtatatagtagttttttttaagattttgtagttggtttttttcgtttcgtttttttaatattagttaggtttttgggatttatgtttgtatgtagaggttttcggtggggagtagagagggggtatattttagttttttatttattagagggggttgaaatatttgttttgtttttattataggtggttatgaagattgaatgggttgtatgggtgaaagtgtttgttgtttttttattggagtattgatttaatatatagggtggatagtgtttggtgagatagtaggggttggacggattacgtgattttgaagtttttttatttttaagagaaaatttatgaatgttagatttttttgtttanaaattatgtaaggaaaattagttgacgaatttatggttaaatttttttattttttttgagatagagtgttgttttgttatttaagttagagtgtagtggtacgttttttaatttattataatttttattttttagatttaagtgatttttttattttagtttttcgagaagttgggttaattttttgtatatttaataaaaatggggttttattatgttgtttatgttggtaatgaatttttgggtttaggagatttatttatagtggtttttttaaagtgttgggattataggtatgagttattatatttagtttgggtttttttatttttgttcgttggagatagtatgaatttatatttttttatttatgattttgttattttgggatagttatttaatcgttttaagtttcggttttttatttagaggaagttatattataggtgattatgaggtttaaatgggtggtgtgggtgattgtgtttatttttttttttttaaagtattaattaaatgtaaagaattatgtatttggattttagatataatattaagatatttataattttttttgtgtagtgttttgagttattttttaatagtatttttaggagatttggtaattggtagtagaaggataggaatttttaatttttttaaaggtattttttattttttatttttatgttttatattttagatttgtggtttatatagtggttattgtatatttgaaatgtggttggtgttaacggatatgttataagtaaaaagtatatatcgtattttaaaaatttgttatgaaaaaaatgtaaagtattttattaataatttttatattgattatatgtttaaatgataatattttggaaatatagttatattaaataaaatttaaataaataagttaattaaaaaataaatattggttaggcgcggtggtttacgtttgtaattttagtattttgggaggttgaggtgggtaaattacgaggttaagaggtcgatattattttggttaatatggtgaaatttcgtttttattaaaagtataaaaattagttgcgtgtagtggcgcgcgtttgtagttttagttatttaggaggttgaggtaggagaattgtttgaattcgggaggtagaggttgta

SEQ ID NO: 705 - DNA, 5919 bp, Artificial Sequence
  chemically treated genomic DNA (Homo sapiens)
tttttttttttgtttttttttattttttttttttttttgataaaatagtatgaatatggttatatgtagtgtggtttttttttgttttgggttatgtagatgttatattttgtgttttatattttttgacgttttagtatattggtttttagagagttaggtttggttagggttttggtttgtattaagtttggaagtgataagatttaagagttgtttatttttgtttgttgacgatacggttagttttgttagggttttttttgagtttatagagttttttttttagatgttgatagttttttttttttagttatattgggtatgtagaatttagggattttttttatttgatatagatatgttgtggtaatatatacgtgggtattattggaagtggtaatattgtatttgtgtgtgaatatgagagattgtataagtttatgtttttttatagaggagagttttatgtgggtttatgttatcggagagggttgtgtatatttgtgtgtgtgtgtgtgtgtgtgtgtgtgtgtgtgtgtgtgtatttttatatggggggtggggggatagtgtgggggtattcgtatttgtgtatgttagtaggaatggttgtatttgtttgtatttgtgataggtaatggagagaaatgtttgaaagtttagattttggagttaaatattaggatatattatgtttgtggtttttttttttgagatagagttttattatgttgtttaggttggagtatagtggtatgattatagtttattgtagtttttattttttggttttgagtggtttttttgttttagtttttcgaggtacgtgttattatgttaagttaatttttggagtttttttggtttttttttgttttttttttttttgagatagagttttattgttatttaggttggagtgtagtgataggcgtaagttatcgtgtttggttaatttttgtattttttgtagagatgggatttgttatattgtttaggttggtttcgaatttttggatttaagtaatttttttgttttggttttttaaagttttgggattatagatatgagttattgtgattggttaattttgggtaggtttttaaatttttttgtgttttagttgttttattagtaataataatatttaggttaggtgtagtggtttatttttgtaattttaatattttgggaggttaaggtaggtggattatttgaggttaggaatttaagattagtttggttaatatagtgaaaatttatcgttattaaaaatatagaaattagtttggtatggtgttgggtgtttgtaattttagttatttaggaggttgaggtaagagaatggtttgaatttaggaggcggaggttgtagtgagttgagattatgttattgtattttagtttgggtgataagagtgaaatttttttttaaaataaataaattaataataataatattatttaaattatagggttgtgtggataaaatgagataatataggtaaagtgtttaatgtagtggttagcgtatatagtaagcgttataaattttgtatttgttatttttttatagaggatgtgtgtgtgtgtgtgtgtgtgtgtgtgtgtttatgtgtatgtatatttatgtgtagacggatgagggttggaggtgtgtgtatatggggtgtgtgtatattagaagatgtttgtgttaggaatttgtgtagaggagtttggagtttgtgtatgaggtagttgaggtaatgtgttaattgagaaggggtttgaagggttgtgtggatttgggtattagtatggtgcgttatttgaggtgtgtatgtgtgtttttttgtgagaaggttttatttttatttttggtttttttgttttttttttaaaatagagatagggttttattttgttttttaggttggagtgtagcggtgtaattatagtttttgtagtttcgaatttttaggtttaagtaatttttttattttagtttttcgagtagttgggattataggtgggtgttattaggattggttaattaaaaaaagatttttttttatagagacggggtgtttttatgttgtttaggttggttttaagtttttgggtttaagtaattattttgtttcggtttattaaagttttgggatagtaggtgtgaattattgtgttcggttttatttttgtttttgtattagttttatttttttttttattagtttttgaaatttttttcgttgggttttggatggtttttagttttttatttttattttttgttttggttttaattagttttgtagtattttggggcgttttagatatagtggttttattttagggaggggtttcggggtaaaggttttaggtagggtttagtgaataggggttattttagggtaggttttttattatagttcgttttatagtttattatatgggtgtgatgtttttatttttatttaatatatatatgagagattatttagagtaaagggtgagaggggtaggtggggttagggtggagattaaagtattgatgtgacggaattattagttaggtaattggatttggtggatttaggaagattttttggaagaggtgagtggtgttaggtagaaaggataggatttagagagaagaggaagagaatatttgtaaggatgattggattggggatcgagagagagaagttgggggtttttttttttaggattttggggtttttttggggtaaattagggtttataaggttggttttattttaaattttttatttttatattttaggaaattaagtttttttattagtcggtttttttttgagtgttgtaatggtaatgtttttggtagggtgtgggggatttttgtttaatgattttttgttttgttgtttagaggatatcgttgttagaaaagggttggtttattgtggggttttttaaggtattttggtagttttagtttttgatttggttttttttttggtatggggataggaggagagtttcggaggtaggtatttatttttatttagttattatatggaattttagggtggttgggagtatagtagggtttagaggaaggattgttttttgtttgtttgtttgtttgtttttgagatggagttttgttttgttattcgggttggagtgtagtggtgcgatttcggtttattgtaagttttattttttaggtttaagtgattttgttgtttcggttttttaagtagttgggattataggcgtttatttttacgtttggttaatttttgtatttttagtagagacggggttttattatattggttaggttggtttcgaatttttgattttgtgatttatttatttcggttttttaaagtgttgggattataggcgtgagttattgcgtttggtcggaagaattggtttttaggagatggtgattggggattgtgagggagttgagtatggtttgatagaaattttgttagagagatgattataatgtttaaaattatgtgtgtttgagtgtgttcgtttgttaatttggtaggtattttatgtatatgtgtatgtgtatgtgtgtgtgttattgtgagtttgggtttgttagagtttgtattggcgtgtgatggggttggtacgtatatttatgtaaatatatgttgtgagtgttattgtgtgattgtgttggtgggttaggtgagtatgagtgtgaaagagagttggtgtgggtggtttgttttatgtgacgggggttgtgtaagtgtgttaggggtgataggaaggaaagtgaaggtagaagttatgttggggtagagtttaggttttttggttttttgaagagggtaggagttgggtagttgttgatagaaatattggtagagattttattttttttgtttttttgttttatttttaggtttttgattttttttaaggattatgtcgtagttttattgatttaggagtaggggtttaaggggtgagtggggtagattgagggtttttagggttaggaaatagggtgggggtggtttttttgaattttataattttttatagttttttttttttataaggattttgttgttaggtaacggatgggggagttagaatgaggtagtttgagaggttgaaggttggatttacgataggaaatggttttgatttttttttgtagtgattttttaggtgtagatatatagttttatatatatttatatataaatatgcgtagatatatagatatatatgtagagatatatatatttagagataggtatattgtttttatatagagataggtgtatatttatagatatatagatatagagatatttatttatatagataggtatatatatatttatatagaaatatatgtatataaatacggttttatagatatatatatatgtagttaaatatatatatagagatttttatatattttcgtatatatataaatttgtatatatagatagatatttataaagagttgtatatatatgtatatttatataggtaaatttatttatatttagagatatataaagacgtatatgtataagtatattgaaagagttatagaaatataatatattaaagtaataggatttaatttgagtaatatagtaagattttgtttttattaaaaattaaataaattagttaggggtattggtacgtatttgtatagttttagtttttgggaggttgagattagaggattatttgagtttaggagattaaggttgtagtaagttatgattgtgttattgtattttagtttgggtaatagagtgagattttgttttaaaataaaataaaaaaagtaaagtaataggaggtaaaaatatgtaaataagtatagtaatattttaatgtagaaagttagttttagagatatagatatgagttaatgggaagagaagtattgaggggggatatattgtgaggtagattgaacggtatagtaggtggtttagtttcgtttttattttttatagggaggattttaatttaggtttaagagggaaagttacgtgtttgtatgagcgtatgagtatgtgtatgcgcgtgtgtgtatagggtggtgtatttggtaggggtttttgagtgaggtatgttttattttgtagtagggaatttggaatgggttgtgtgttttgtaagaaattggagtcggtggttacggttaaggaggatgttggtttggaaggggattttagaagttacggggtagtagattattatgggtttgattttattaaggttcggtttgtatttttatttgtttatatttttaattatagtaatttttttttttaggttattaattttggtttttttgatagtggtattattaggggtgtgttaggtgagtttaaggggtcggaggtaggagttgtttggattttgggagaaattgagggaagaagaagagatgcgaatttgtttttaggagtttttaggaggatgtggtagatataatttcgtttttaagattatatgggttgagggagtttgtatagtttttttattagaaattatagtttgtaggggagggttaagaagttttatttttagtttgagaggggtaggattttgtgatagatgtaagtgataaagagaaattttttgtttttttaggtgttattttttagatgggaagtttttttggtggggaagaggaggagtgggtaataaggggattttttatggtgggaggaatgggtttgaagttgtgtgttttaagttgtggagattaaattagaaattttttggattttaaaggtttttgggaattagagtattaaaggagtggggaggtgtagtatttggttggggaataggaatttggggtgtagtttttttggtgtttttgttttatgttttattttgttgagtagttttgattttgtagg

SEQ ID NO: 706 - DNA, 5919 bp, Artificial Sequence
  chemically treated genomic DNA (Homo sapiens)
tttgtagagttagggttatttagtagggtagggtatggggtagaagtattaagggggttgtattttaaatttttgttttttagttaggtgttgtatttttttatttttttagtgttttggtttttaaaggtttttggggtttaaggaatttttgatttggtttttatagtttaggatatataattttaagtttattttttttattatggaggatttttttgttgtttatttttttttttttttattaagaagattttttatttgggaagtggtatttaaaagggtaagaagtttttttttgttatttgtatttgttataggattttgttttttttagattgggagtagagttttttgatttttttttgtagattgtggtttttgatgggagggttgtatagatttttttagtttatgtgattttgaaagcggggttgtatttgttatatttttttggaggtttttaagggtaagttcgtatttttttttttttttttagttttttttaggatttaggtagtttttgttttcgattttttggatttatttgatatatttttgatggtgttattattaaggaagttagggttgatggtttgagaggagaagttgttgtagttggggatgtgggtaaatgaggatgtaggtcgggttttagtggggttaggtttatagtggtttgttgtttcgtagtttttgaagtttttttttaggttagtattttttttggtcgtggttatcggttttaattttttgtagaatatatagtttattttaggttttttgttatagaatggggtatgttttatttaaggatttttgttaggtgtattattttgtgtatatacgcgtatgtatatgtttatacgtttatataggtacgtggtttttttttttgggtttagattggggttttttttgtaagggataaaggcggaattgggttatttattgtatcgtttagtttgttttatagtatgtttttttttagtgtttttttttttattggtttatgtttatatttttggggttggttttttatattgggatattgttatgtttatttgtatatttttgttttttattgttttgttttttttgttttgttttgagataagattttattttgttgtttaggttggagtgtagtggtataattatagtttgttgtagttttgattttttgggtttaagtgattttttggttttagttttttaagaattgggattatataggtgcgtgttagtatttttggttaatttgtttgatttttagtagagataaggttttgttatattgtttaggttgggttttattgttttgatatgttgtgtttttgtgatttttttagtgtgtttgtatatgtgcgtttttgtgtgtttttaagtatgggtgagtttgtttgtgtgggtatgtatgtgtgtgtagttttttgtggatgtttgtttgtgtgtgtaggtttgtgtgtatacgagagtgtataaaagtttttgtgtatgtgtttggttgtatgtgtatatgtttgtaagatcgtgtttgtgtgtatgtgtttttgtgtgagtatgtgtgtgtttgtttgtgtgagtgggtgtttttgtgtttgtgtgtttatgaatgtgtatttatttttgtgtgggagtagtgtgtttgtttttggatgtgtgtatttttgtatgtatgtttatatatttgcgtatgtttgtgtgtgagtgtgtgtgaggttgtgtgtttgtatttggagagttattgtagagggggattaaggttattttttgtcgtgggtttagtttttagttttttaagttgttttattttggtttttttattcgttatttagtaatagggtttttgtaggaggaggaggttgtgaggagttgtggggtttaggaaggttatttttattttgttttttgattttgaaagtttttagtttattttatttattttttaggtttttatttttgggttagtggggttgcggtatgatttttgggaggggttagagatttgagggtgagatagaaggataaggaagatgaagtttttgttaatgtttttgttagtagttgtttagtttttgttttttttaggaagttagaaggtttgggttttgttttagtatgatttttgtttttatttttttttttattatttttggtatatttatataattttcgttatatagggtaaattatttatattagtttttttttatatttatatttatttgatttattagtatagttatataataatatttatagtatatatttgtatgagtgtgcgtgttaattttattatacgttaatataggttttaataagtttaagtttataatagtatatatatatatatatgtatatatatatggggtgtttgttaggttaatagacgaatatatttagatatatatgattttgaatattataattatttttttaataggatttttattaagttatgtttagtttttttatagtttttagttattattttttaaaaattagttttttcggttaggcgtagtggtttacgtttataattttagtattttgggagatcgaggtgagtggattataaggttaggagttcgagattagtttggttaatatggtgaaatttcgtttttattaaaaatataaaaattagttagacgtggaggtgggcgtttgtagttttagttatttgggaggtcgaggtagtagaattatttgaatttgggaggtggagtttgtagtgagtcgagatcgtattattgtattttagttcgggtgatagagtaagattttattttaaaaataaataaataaataaataaaaaatagttttttttttgaattttgttgtgtttttagttattttagggttttatgtggtggttgagtgagagtggatatttattttcggagttttttttttatttttatattagagaaaggattaggttagaagttggggttattagagtattttgggaagttttataatgagttaatttttttttggtagcggtattttttgagtaatagggtaggaggttattgagtaagggttttttatattttgttagaaatattgttattgtaatatttagagaggaatcgattggtgagagggtttggttttttaagatgtgagaatggagagtttagggtggggttaattttgtgaattttgatttgttttagaggggttttaaggttttagaagaaagggtttttagtttttttttttcgatttttagtttagttatttttatagatatttttttttttttttttttgggttttattttttttatttagtattatttattttttttagaaagtttttttggatttattaggtttagttgtttggttgatggtttcgttatattagtgttttggtttttattttagttttatttgttttttttattttttgttttaagtgattttttatgtgtgtattgggtgggggtgggggtattatatttatgtggtgaattgtggggcgggttgtggtgagaagtttgttttaaaatagtttttgtttattgggttttgtttgagatttttgtttcgggatttttttttgggatgaaattattgtgtttaaaacgttttaggatgttatagggttagttagagttagggtagaaaatagaggtggaggattggaagttatttagggtttagcgggagggattttaggaattggtgaaaagagagatggggttgatataaaaataagggtgaggtcgggtatagtggtttatatttgttattttaggattttggtaggtcgaggtaggatgattgtttgagtttaggagtttgagattagtttgagtaatatagggatatttcgtttttataaaaaaaaatttttttttaattagttagttttgatggtatttatttgtagttttagttattcgggaggttgaggtgggaggattgtttaagtttgggagttcgaggttgtaggagttgtgattgtatcgttgtattttagtttgggagatagagtaagattttgtttttattttaaaaagaaaatagaaaaattaagggtgagaataaagtttttttataggaagatatatatatatattttaaatggcgtattatgttgatatttagatttatatagttttttagatttttttttagttggtatattattttagttgttttatgtataggttttaggtttttttgtatagatttttagtataaatattttttagtgtatatatattttatatatatatatttttagtttttattcgtttgtatatagatgtgtatgtatatgaatatatatatatatatatatatatatatatattttttataaaagaatagtaaatataaaatttatagcgtttattatatgcgttggttattgtattaagtattttatttatattattttattttatttatataattttatgatttaagtagtattattattattaatttatttattttgagagggagttttatttttgttatttaggttggagtgtaatggtatgattttagtttattgtaattttcgttttttgggtttaagttatttttttgttttagttttttgagtagttgggattataggtatttaatattatgttaggttaatttttgtatttttagtagcgatgggtttttattatgttggttaggttggttttgaatttttgattttaagtgatttatttgttttggttttttaaagtgttgggattataggggtgagttattgtatttggtttaagtattattattattgatgaggtaattgaagtatagagaggtttggaaatttgtttagggttggttagttatagtggtttatatttgtaattttagaattttgggaagttaaggtaagaggattgtttgggtttaggaattcgagattaatttgggtaatatggtaaattttatttttataaaaaatataaaaattggttaggtacggtggtttacgtttgttattgtattttagtttgagtgatagtgaagttttgttttaaaaaaaaaaaaaataaaaaaaaattaaaaaaattttaaaaattagtttggtatggtggtacgtgtttcgagaggttgaggtaggaggattatttaagattaggagatagaggttgtagtgagttatgattatgttattgtattttagtttgggtagtatagtgaaattttgttttaaaaaagaaggttatagatatgatgtattttggtgtttggttttagaatttgagtttttaagtatttttttttattgtttattatagatatagatagatgtagttatttttgttagtatgtataaatgcggatgtttttatattgtttttttattttttatgtagggatatatatatatatatatatatatatatatatatatatatatagatatatatagtttttttcggtgatatggatttatatagagtttttttttataggagaatatagatttatataattttttatgtttatatatagatataatattgttatttttaataatatttacgtatatattgttataatatatttatattagatggaggggatttttgaattttgtatgtttagtatggttggaagggagagattattagtatttgagaaggaagttttgtgggtttaggaagagttttggtaggattgatcgtgtcgttagtaggtagaggtaggtagtttttgggttttattatttttaaatttgatgtagattaaagttttggttaggtttggttttttggggattagtatgttgaggcgttaggggatgtagggtatagggtatgatatttgtatggtttaaggtagggaggggttatattgtatgtagttatgtttatgttgttttgttagaggaaagaaagagatggggaaagatagaaaaaggag

SEQ ID NO: 707 - DNA, 5270 bp, Artificial Sequence
  chemically treated genomic DNA (Homo sapiens)
ttttaggatttaagttattaaggaagaggttgtttttagtaataggggtttgagagttgtttagtttaaagatttcgttttaggggatagttcgttgttaaggattatattttagatttggaggtttatagtttacgttttgtttttttattttgagatagaattttattttgttatttagatgtaattatattttattgtagtcgtaattttttaggtttaagttatcgttttattttagttttttgagtagttgggattataggcgtgtattattatgtttagttaattttttttttttgtagagattggggtttttttatgttggttaggttgattttgaatttttgggtttaagtgatttgttcgtttcggttttttaaagtgttgggattataggtgtgagttagtataattggttgagtttattgtttttttttttattttattttattttattttattttttttgagatagagttttattttgtcgtttaggttggaatatagtggtacgattttggtttattgtaatttttgtttttcgggtttaagtgatttttttgttttttaagtagttgagattataggtatttatcgttatgtttagttaattgttgggggtttttttttagtagagatggggtttcgttatattggttaggttggtttcgaatttttgatttcgcgtgatttgtttgttttagttttttaaaatgttgagattataggcgtgagttattgtgtttaattaatttttattttttaaatggagacggggtttcgttatattgtttaggttggttttaaatttttgaatttaagcgattttttcgttttagttattttaagtgttgggattataggagcgagttatcgcgttttatcgtttatttttttaaattttttgttgataatagatgtgaatttgttgataagagttttggggtttattttttttaatatgggttgttaagggagaggaaattttttaattattgggtttagtgtttttttttattatttggaagttttgtttgggaggagttgggtattgtagttgtagagtttgggtttagtttgaagtttttcgttagtaatagtttttatcgcggaggaagtaggtgtttagtaataagtttgtagaagtgtttattttcgtttttttttttttttagggtttttagtttgtcgagtgggtttcggtaggaaattttaaatcggtgtgggcgagtaggggttgttcgcgggtttgggattaggaggtcgagggggtaggtttagagttggggttgcgagtggcgcggattaaggttttgtggttgtttatgggggattgatgtttgagcgttatttattgtattttggatattttatattaaggggagatgtattttatagatatttgggattttttttttttggtttttgtgttttttaataaattttttgattaattttagttgtgtttttgcgagaagaaagggtgtagtaatttttggtagatatgaggttttttttttttttttttttttttttgagataacgtttggttttgttatttaggttggagcgtagtggtataatttcggtttattgtagtttcgatttttggggtttaagggatttttatgttttagttttatatgtagttggggttatagatatgtattattatatttggttcgaggttattttagttttgaggttgagtagtttaggagtcggttttagtacggtgttgtgtttgtgaaatagagaaaggggattttcgaggattttagatagggttttaggatttttatatttttttgttttttttatttggtggtttttgttttttggttttttttatttttttatggttttagaatttatatgtagtaaaggaattttttggaataaaattaaagtttttttatatgatttttgttaatttttatgatgtaaatgtttttatcgtgtcggattttaaggtataggtgattaaataattgtttgcgagattttgaattgttaataggttagtttttatgagttaatacgagtcgttttagtatattattgttttaggattttggttgtgggtgggtttttttggtttgttttttgttttttcgagatagagtttttttgtcggttaggttggagtgtagcggggtgatttcggtttattgtaattttcgttttttaggttcgagcgatttttttgtttcggtttttagagtagttagaattataggttcgcgttattatatttagataattttttgtatttttagtatagacggggttttattattttggtttggttggttttaaatttttgattttaagcggttcgtttgttttggtttttttaaagtgttaagattatagatttaagttattgcgtacgattgttgatttttaaataaaggattttgtttaaaaaattagttgggtatggtggcgggcgtttgtagttttagttatttgggaggttgaggtagaagaatggcgtgaattcgggaggtggagtttgtagtgagtcgagatcgagttattgtattttagtttgggcgaaagagtgagatttcgttttaaaaaaaaaaaaaaaaaatttttttattttagttttttgagtagttgggattataggtacgtattattatgtttggttaatttttttttttttaataggtagagtttatttacgttgtttaggttggttttgaatttttggttttaagcgattttttcgttttagttttttaaagtgtgggattgtaggtattagttattatatttgaagtagaattttttttgatgtaagaaatttatttttattagtttaggataaaagggagtttttagaggttaggttcggtgatttaggtttgtaattttaatattttgggaggtcgaagtaggcggattatttgaggttaggagtttgagagtagtttggttaatatagtgaaattttgtttgtattaaaaatataaaaattagttgggtgtggtggcgggtatttgtaattttaattatttaggaggttgaggtagaagaattattcgaatttaggaggtagaggttgtagtgagttgagagtatatattttattttagtttgggtaatagagtaaggttttattttaaagaaaaaaaaaatgagagtttttcggattaggtgtggtagtttatatttgtaattttagtattttgggaggtcgaggtgggtggattatttgttagaagtttgagattagtttgggtattatggtgaaatttcgtttttattaaaattataaaaattagttaggcgtggtggcggtatttgaaattttagttatttgggaggtaggagaattgtttgaatttgggaggtagagggggagtttgtagtgagttaagatcgtgttattgtattttagtttgggtaatatagcgagattcggttttaaaaaaaaaagagagagagagaggagttttttggaaggttatagagattttttagaggtaatagggcgatagggtaggatatatattgaggggttttaggatttggttaggaaggagttagagtaggttttttgtttatgggttatatgagttattggggtttgtatttttgtttttttgttttatttaaatttttttagttagatggaaggtttgattattgggtgcgataaggtagttaatttaggttgaataggaagtgaggtaggtagagggattagggaagggaaatggatgatgaaggttaggacgggcgaggttttgttgtagtaatatataattttcgaatttgcgtgggttataattataatattagtttgttgtttatattttttgtgtttattcggggttggtaggatttttgtgttttttcgagtggtataggaaatttggttgatagaggcgttttttttatgtattttttattatttatttttcggttttttagatttttatttagaagtgatatttgttatttttatttttatgtgattggttaaagtgagtgtggttatgttcgagttttttaggatgggatttcgaatttttttgttgggggggtgggggtagtagatgttttaggatagtttgttacggattagatgggtgagtaagagatttaggatgggcgtgatgggttatatttgtaattttagtattttgggaggtcgaggtaggttgattatttgaggttaggagttcgagattagtttggttaatatagtgaaatttcgtttttattaaaaatataaaaattagtcgggtatggtggtacgtatttgtaattttagttatttgggagtttgaggtataagaattgtttaagtttaggaggcggaggttgtcgtgagtcgagattgtgttattgtattttagtttgggtaatagagtgagattttatttaaaaaaaaaaaatgttttagagatttagagatttatagatgtggaagagagtttttattttgttttatgtattattttattttttagtttggagttggagaagtcgaggtttagagaggttaaggggttggttaagtttttatagtgataaagttagtgttagggcgatatttgttaggtttaatgtgataagatgtattttgagttttgtgtgttaagttttggcggggtaaagttggggttcggaggacggtaagatatagtaattgcgagtttttagagatagattcgggttttagttttagtttattatgtattgggcgtgttatttagggagttagttttattgtagttttcgttgcggggcgttcggagaacgcgttatttgcggcgtgagcggtcgttttttattattagggggcgcgtttcgtttgggtttagattttattttttgattgtttgtttttaaaaatttttttttattttcggtttttggttgttattcggtttggttttttttatatttaattggggtaagtttggtgcgtgaggagatttggattttaggtttttaaggggcggagttagggtttttatttttggggtagggggagtagagggtggggggttgggttttcgggtttttaatttggggagggttttggggattagacgtcgaggtttttagaagtggagatgaagagtttttatcgtaattggggtagacgtaggaagtttgggggaggaaggggcggaaatttagttatattaatgggacgcgggaggggcggggaggtaaaggggcgggtagggtaggggttggggtatgagggttcgagatttgtttttttgttttttttaaga

SEQ ID NO: 708 - DNA, 5270 bp, Artificial Sequence
  chemically treated genomic DNA (Homo sapiens)
ttttggaagggatagaagaataagtttcggatttttatgttttagtttttgttttgttcgtttttttgttttttcgtttttttcgcgttttattgatgtggttgagttttcgttttttttttttttaggttttttgcgtttgttttagttacggtgaaaattttttatttttatttttaagaatttcgacgtttggtttttagaattttttttaggttagggattcgggaatttagttttttattttttgttttttttgttttaggagtggggattttggtttcgttttttggggatttagagtttaagtttttttacgtattaggtttgttttagttgggtgtggaaggggttaagtcgggtgatagttagagatcgaaagtgaaaggaaatttttgggggtagatagttaaggggtggaatttgggtttaggcggagcgcgttttttggtggtgagaggcggtcgtttacgtcgtagatggcgcgtttttcggacgtttcgtagcgggggttgtagtggggttgattttttgggtggtacgtttagtgtatggtgagttggggttggaattcggatttgtttttgggaattcgtagttgttgtgttttatcgtttttcgggttttaattttgtttcgttaaggtttggtatataggatttaggatgtattttgttatattgggtttggtaggtgtcgttttagtattagttttattattgtgggagtttggttagttttttgatttttttaagtttcggtttttttaattttaaattgaggggtgaggtggtatatgagataaaatagaagtttttttttatatttgtggatttttgaatttttgaagtattttttttttttagatggggttttattttgttgtttaggttggagtgtagtggtatagtttcggtttacggtaattttcgttttttgggtttaagtaatttttgtgttttaggtttttaagtagttggaattgtaggtgcgtgttattatgttcggttaatttttgtatttttagtagagacgaggttttattatgttggttaggttgatttcgaatttttgattttaggtgattagtttgtttcggttttttaaaatgttgggattataggtgtgatttattacgtttattttgaattttttgtttatttatttgattcgtggtagattgttttgaaatatttgttgtttttatttttttagtaggaggattcgaggttttattttggggaattcggatatggttatatttattttggttagttatatgagggtggaggtgataggtgttatttttgaatggaagtttaagggatcggggagtggatggtggaggatgtatggagagagcgtttttattagttaagttttttgtgttattcggaggagtatagggattttgttagtttcggatgagtatagggagtgtaagtaataaattaatgttgtggttgtggtttacgtagattcgggggttatgtgttattgtagtaaagtttcgttcgttttggtttttattatttattttttttttttgatttttttgtttgttttattttttgtttagtttgggttagttgttttgtcgtatttaatggttagattttttatttggttagaaagatttaaatgaagtagagaggtagagatataagttttaatagtttatgtggtttatggataaaggatttgttttagtttttttttgattaagttttggggttttttaatgtgtgttttgttttatcgttttattgtttttagggaatttttgtagttttttagaagattttttttttttttttttttttttttgagatcgagtttcgttgtgttgtttaggttggagtgtagtggtacgattttggtttattgtaagttttttttttgttttttaggtttaagtaatttttttgttttttagatagttgggattttaggtgtcgttattacgtttggttaatttttataattttagtagagacgggattttattatggtgtttaggttggttttaaatttttgataagtgatttatttatttcggttttttaaagtgttgggattataggtgtgaattgttatatttagttcggaaaatttttattttttttttttttgagatggagttttgttttgttgtttagattagagtgaagtgtgtgtttttagtttattgtaatttttgttttttgggttcgagtgatttttttgttttagttttttgagtaattgggattataggtgttcgttattatatttagttaatttttgtatttttagtatagatagggttttattgtgttggttaggttgtttttaaatttttgattttaggtgattcgtttatttcggttttttaaagtgttgggattataggtttgagttatcgagtttggtttttgaaaatttttttttattttaaattagtaagagtgggttttttatattaaaaagaattttattttaggtgtggtggttgatgtttgtagttttatattttgaaaggttgaggcgagaggatcgtttgaggttaggagtttaagattagtttgagtaacgtaggtagattttgtttattaaaaaaaaaaaaattagttaggtatggtggtgcgtgtttgtggttttagttatttaggaggttgaggtgggaggattttttttttttttttttgagacggagttttattttttcgtttaggttggagtgtagtggttcgatttcggtttattgtaagttttatttttcgggtttacgttatttttttgttttagttttttaagtagttgggattataggcgttcgttattatgtttagttaattttttgagtaagattttttatttaaaaattaatagtcgtgcgtagtggtttaagtttgtaattttagtattttggggagattaagataggcggatcgtttgaggttaggagtttgaaattagttaggttaagatggtgaaatttcgtttgtattaaaaatataaaaaattatttgggtgtggtggcgcgagtttgtaattttagttattttggaggtcgaggtaggagaatcgttcgaatttgggaggcggaggttgtagtgagtcgagattatttcgttgtattttagtttggtcgatagagagattttgtttcgaaaaaataaaaaataaattaaaaaaatttatttataattagaattttaaggtagtggtgtgttgaagcggttcgtattggtttatgggagttgatttgttaataatttaggatttcgtaggtagttgtttaattatttgtattttgaaattcggtacggtgggagtatttatattatggaaattgataaaagttatataggaggattttaattttattttagagagtttttttattgtatatggattttggggttatgaaaaggtagagaaaattagagagtaagagttattagatggagaagataagaagatatgagagttttaaggttttgtttggggttttcgggggttttttttttttgttttataaatatagtatcgtgttggagtcggtttttgagttgtttaattttagaattaaaatggtttcgagttaggtgtggtggtgtatgtttgtggttttagttatatatgaggttgaggtatgaggattttttgagttttagaggtcgaggttgtagtgggtcgagattgtgttattgcgttttagtttgggtgatagagttagacgttgttttaaaaaaaaaaaaaaaaaagaaaaaagttttatatttgttagaagttgttatatttttttttttcgtagaagtatagttagggttggttagagagtttattgggagatataggaattagaaggggaaagttttaggtgtttgtggggtgtatttttttttggtgtgaggtgtttaaaatgtagtaggtggcgtttaggtattagttttttataggtagttatagggttttggttcgcgttattcgtagttttagttttgggtttgttttttcggttttttggttttaggttcgcgggtagtttttgttcgtttatatcggtttgaggttttttgtcgaggtttattcgataaattgggaattttgaggggaggaagagacgggggtaagtatttttgtaggtttgttgttgagtatttgtttttttcgcgatgaagattgttattgacgaggggttttaggttggatttaggttttgtagttataatgtttagttttttttaagtagaatttttagatggtagggaaaagtattggatttagtggttagggaatttttttttttttaatagtttatgttgaaaggaatgggttttaaggtttttgttaataagtttatatttgttattaataggaggtttaagagagtggacggtggggcgcggtgattcgtttttgtaattttagtatttggggtggttgaggcgggaggatcgtttgagtttaggagtttgagattagtttggataatatggcgagatttcgtttttatttaaaaagtaaaaattggttgggtatagtggtttacgtttgtaattttagtattttgggaggttgaggtaggtagattacgcgaggttaggagttcgagattagtttggttaatatggcgaaattttatttttattaaaaaaaaatttttaataattagttgggtatggcggtgagtgtttgtagttttagttatttgggaggtaggagaattatttgaattcgggaggtagaggttgtagtgagttaaaatcgtgttattgtattttagtttgggcgatagagtgagattttgttttaaaaaaaataaaataaaataaaataaaataaaaaaaaaaatagtagatttaattagttgtgttggtttatatttgtaattttagtattttgagaggtcgaggcgggtagattatttgagtttaggagtttaagattagtttggttaatatagagaaattttagtttttgtaaaagaaaaaaattagttgggtatggtggtgtacgtttgtggttttagttatttaggaagttgaggtgggacggtggtttgagtttgggaggttgcggttgtagtgaggtatgattgtatttgggtgatagggtgaggttttgttttaaaatagaaaaataaagcgtagattgtgggtttttaaatttagggtgtggtttttagtaacgggttgttttttgagacgaggtttttgggttaggtagtttttaggtttttgttgttaaggatagttttttttttagtaatttgagttttaagg

SEQ ID NO: 709 - DNA, 5497 bp, Artificial Sequence
  chemically treated genomic DNA (Homo sapiens)
atagttgtaggttttgttataaatgtttattaagttataaagatgtttaaagaaatttttaaaaagaaaaatataaaagtggttgttttttttaatttttagatagtggatatgtgagttattgaattattattattgatattagtaaatttattttaagtataataattggttttaagtagttttggttttttttttaattttatttttagtgtttttattttaaaggtgggtttttaggaaaagaaaaataataatttcgaggtgtaaggaatagagggaattattttttttaatgtgtggtattaaaaaataaatatttatattttagaatgataggtatttgtggggaagatttgtgtaggtaggggatttttgatgtttcgagtgtagcgggaagttgtgagttagggaattgtgtttgttttaattttgttttttgtagagagaaaaataattttacggggtgggtttaatttttagattaagtaaattttgtgtttttttttagttttaaaattttgtggttttaattgtgaattagagaagtgaaatagagtaatggaagtgagattgaagaagatggttgataatttaagatgaatgaaagataaatttaatatttgaaattataaaaatattagacgataatattagaaaaatttttttagatattgatttaagtaaagattttatgattaagaagttaaaagtaaatgtaataaaaataaagataaatagattggatttaattaaattaaaaagtttttgtataataaatgaaataattagtagagttaacggataatttatagagtgggagaaaatttttgtaatttatatataaaataaaagattaatatttagaatttataaggaatttaaataaattagtaggaaaaaacgaataattttattaaaaagtgggttaaagatatgaatagataatttttaaaagaagatatataaatggttaataagtatatggaaaaatgtttaatattattaatgattagggaaatgtaaattaaaattataatgtaatattattttatttttgtaagaatgtttataattttaaaaatataaaattatagatgttggtatgaatgtggtgaaaagggaaaatttttatattgttggtgtgaatttaaagtagtataattattatggaaaatagtgtggagattttttaaagaattgaaagtagttttattatttgatttagtaattttattattgggtatttaattagaggaaaagaagttattatataagaaagatatttgtataagtatgtttacgttattataatttgtaattgttaaaatatagaattagtttaaatgtttattaattaatgagtggataataatttatgatatatatatatatatatatatatatatatattatggaatattatttaattataaaaaaaggaataaaataatggtatttgtagtaatttggatggagttagagattattattttaagtaaagtaatttaggaatggaaaattaaatattgtatgtttttatttataagtgggagttaagttatgagaatgtaaaggtataagaatgatacgatggattttggggatttaggggaaagggtaggagggaggtgaggtataaaagattatatattgcgtatagtgtatattgtttgggtgatgagtgtattaaaatttcgtaaattattattaaagaatttttttatgtaattaaatattatttgttttttaaaaatttatcgaaataaaaaatatattttttaaaaaagaagatgattgagaaatataatgaaggagttaagaaatatttttttagtgtattgattaataaagatttggtatgatgtattaataattaatttttaaatttcgatattttgaaataaaataaagattattttatgtatgtgtttattagtgtaggttttgtttattatatttattaggtattcggattaatagaagagttattttgaaagttgttgattattatattgaaggaaaagaaagttttatggaattttattggtaattaagtgttttagtttagaaaggatattttattttagtttatagttttttgattagaacgagttatattttttttaattaatcgttagagggttaagaagaataattttattatttattttttttgaaggtaggaggtttagaatattttttaaagagtattattgtttattaatttagttttttagggtttaggtttattcgaataaggggattatatatttttttttattttatggtttagagtataattgattaataaaaatttttaaaaatagtagaaattgaagttgttatcgaaggtcggtttttttatttttaattattataagttttttgttgattatggaaaatgagatgatataataaaattattattttatttttaattaatagtttaaagttttgtgattttttttatgttagtagtatgtttggtaaggtttagggataagttaagttttattattagtgtattaaattttagtatttatatatttattttgatgtgtatatgttgtatattaaggtaaattataaattaaatatattttgatttttgaaaatatatttgaattaatagttattttaaaggtttattttttgggtataattaagtttgaaattatttaaatattattatttttatagttgtagtaaagtagttgaattttatagagttaataatgttgtttttgtgttgaatatttaataagttagaaatgaggtaaaaggtgagtttaatgagtaagtagtatatttagtgatatataggatttttaggttaaagggttatattatgttgaaaattaaggaaaaagatatatttttttagaaatttttttttgttttagtttattaattttttatggaatttattttttgtatttgtgggagttattttagtgttatgaattagtaattaagatattttatttggtttaataatgatagtattattattattattattattattattataattatatatagtatttattatatatatataaattttttgatatagattattttatttaatttttattataattatttgatgtagatgttattatgtttgttttatttattttttagaattttttattttatttattttaatagtttttgggggagtaggtggtgttttgttatttggataagttttttaatggtgatttgtgggttttggtgtatttattatttgagtagtgtatattatatttaatgtgtagttttttatgtattattttttattttaatatttatttttaagtttttaaagtttattgtattatttttatgtttttgtatttttatagtttagttttaatttatgagtgagaatatagaatgtttagttttttatttttaagttattttatttaggataatggtttgtaattttatttaggttgttgtgaatgttattattttatttttttttatggttgagtagtattttatggtatgtatatattacgaattatttatttatttattgattgatgggtattttggttggttttattttttgtaattgtaaattgtgttgttataaataagtgtgtttaagtattttttttgtataatgattttttttttttatttttaagatagtattagttgcggtagtatagggagaatgtaagattgttttaaggttttttggataagtattcgtgttttttaggttaatagttaaaattattataaagtttagttggaagtttttttttttttgtggtttttttttaattttattggtagttttttttaaggatttttgtgagataaagttagaaatgatttttttgggtattaagagtatttatagggttttttttattgtttttatttttatatttcgttttgttttttaaatttattttagttttaggtaaggttaaattttttttttgtgatttggatttttaggttttttagtgggtttgcgtgtttggaggtagatttttttttttatttatattttgggtatttatagttttttagttgttttatggagtttgtagcggtaagttattttttttaaaggttttgtgaatttttttggtttttttggtatgtttatgtagtattttttggaggaaaattttattgtgtgagtttttatatgttgttttgtttgtttgcgtggaaattgtaagttagttttgttttttatttattattttttaataatttgtcgttaattattttaaagtatagaatttagtggtatttagtatatttataatgttgtgtaattataatttttatttagttttaaaatatttttattatatttaaaagaaaattttatatttattagtaatttttttttatttttttttttttttagtttttggtagttattcgattatgtttattttaaattgaggaaattaaagttgagaaaagttatataatttttttaatatgattttgataatagttggtgaacgtaatattcgaatttaggatttgtgatttttaagattagattttttttatatatttgttttttattttttaagtgtttgggtaattagttgtatttaaaaagtttttataaattgagtttattaatgtgagtaatatatgattttttaaaaataataattgtttttaaaggtgaaatggattaaagtttttaaaagtgaatttgtggtgtagtaattgttaatataattgttttattttatttttatttttttaaagaataaaattgatgaataagtgaggatgttggtgtaattttttaatttagtttatagtttgtaagtagaagagtgagtttaaagtatatattattagatagtgttttttttagtatttcgttgttgtattaattaataagttaaaatataaataacggttaattttgggttttaaatttaatattttttattttttagattaggtttatttattgtgttggggatttttaagttagtattggtttatattgatttattttgatttttgttaatattagagttttgcgtggtagagttattggtattagaaattataagtacgtaaagtaagtaattagatataatttttgatttttttggatgaggaaagtggggtttggagtttttttgttttgttattgtgttttagggaagaattattttattagaaagtagttttttttgtttaattttggaggagttataaagttattttttggtttaaagtataggagtagtaaatgtttggatatttataatgggataatattattgatttaattatttaataatttatttagtagtatatttatttgttttttatgtatataggtaagtatattgttgggtagattattaagtggttgaattaaatgggaaaaatttggatttttaatgtaagaggaaaagtttttttttttttttagtgtttttattagtagtttttaatattgtttgagatt

SEQ ID NO: 710 - DNA, 5497 bp, Artificial Sequence
  chemically treated genomic DNA (Homo sapiens)
gattttagataatgttagaagttgttgatggaagtattaaaaaaaaaaagagatttttttttttgtattagaaatttaagttttttttatttgatttaattatttaataatttatttaatagtatatttatttgtgtatatggaagataggtaagtatattgttgggtagattattaagtggttgaattaatgatattgttttattataagtatttaaatatttattatttttatattttgggttaaggagtagttttatagtttttttagggttggatagagaaagttgttttttgataaggtggtttttttttggagtataataataaaataggaaaattttagattttattttttttatttaaagaaattagagattatatttggttatttattttacgtatttgtaatttttggtgttaatggttttgttacgtaggattttggtattagtagagattaaaatgaattagtatgagttagtgttggtttgggagtttttagtatagtggataaatttggtttaagagataaggaatgttaaatttgaaatttaaggttagtcgttgtttatattttaatttgttgattaatgtaatagcgaaatgttaggagaaatattgtttggtgatatgtattttagatttatttttttgtttatagattataaattaagttagggagttatattagtatttttatttgtttattagttttattttttaaggggatgagaataaaataagataattatgttaatagttattatattatagatttatttttaagggttttgatttattttatttttagggataattattatttttaaaaaattatatattatttatattagtaaatttaatttgtaaaggttttttaagtgtagttgattgtttaagtatttgggaaataaaagataggtatatgggaggagtttgattttgggaattataagttttgggttcgagtattgcgtttattagttattattagagttatgttggaaaaattgtataattttttttagttttagtttttttaatttaaaataggtatgatcgagtggttgttaggggttggggaaagaagggaatggggaaggattgttaatgagtatggagtttttttttgggtgtgatgaaagtgttttgaaattggatagaggttgtggttatatagtattatgaatgtattaaatgttattgaattttatattttgaaatggttaacgatagattgttggaaaatggtggataggaggtaggattaatttgtagtttttacgtagatagatagaatagtatgtggagatttatatagtgaaatttttttttaagaagtattgtatgaatatattaggaaaattaaaagaatttataggatttttgaaagaagtggtttgtcgttgtaaattttatgagatagttgaaaaattgtgagtgtttaaagtgtgagtgggggaaaaaatttgtttttaaatacgtaaatttattagggaatttaaaaatttagattataggagaaggatttaattttatttagagttgggatgaatttagagagtaaaacgaaatataaaagtagaagtagtgggaagagttttgtaggtatttttggtgtttagggaagttatttttgattttattttataggggtttttgaggagggttgttagtgaaattgaggaaggattatagggagaaggaaatttttagttgaattttgtaatagttttgattattagtttgagaaatacgaatatttatttaggagattttagggtaattttgtattttttttatattatcgtagttgatgttgttttgaaaatgaggaaaaggagttattatataaaaaagatatttgaatatatttgtttatagtagtataatttgtaattgtaaaaaatgaaattagttaaaatgtttattaattaatgagtggataaataattcgtggtatatatatattatggaatattatttagttataaaaagggatgaaataatggtatttatagtaatttggatggagttgtagattattattttaagtgaagtaatttgggagtggaaaattgaatattttatgtttttatttataagttggagttaggttatgagaatataaaggtataaaaatgatataatggattttggggatttgggggtaagtgttggagtggggggtgatgtataaaagattatatattgggtatagtgtatattgtttagatgatgggtgtattaaaatttataaattattattaaagaatttatttaggtaataaaatattatttgtttttttaaaagttattgaaataaataaaataaaaaattttaaaaaataaataaaataggtataataatatttgtattagatagttgtggtggggattagatgagataatttatgttaagagatttgtgtatatatagtaaatattgtgtatgattgtaatgatgataatgatgatgatgatgatgttgttattgttggattagataaggtgttttgattgttggtttataatattgaaatgatttttataggtatagagaataaattttatgagaggttggtggattgaagtagagagaaatttttgaaagaatatgtttttttttttgatttttaatatggtataattttttgatttggaggttttgtgtattattgagtatattgtttgtttattgggtttattttttgttttatttttggtttattaagtatttagtatagagatagtattgttagttttgtgaaatttagttgttttgttgtagttatgaaaataataatatttggatgattttaagtttaattatatttagagagtaagtttttaaaatgattattagtttaagtatgtttttaaaaattagaatatgtttgatttgtaatttattttggtgtgtagtatatatatattaaggtaagtatgtaagtattgggatttggtatattaatggtgggatttaatttgtttttgggttttattaggtatgttgttaatataaggagaattataggattttaaattgttggttgagaataagatgatgattttattatattattttattttttataattagtaagagatttgtagtaattaaaaatgagaagatcggttttcggtggtaattttagtttttgttatttttagggatttttgttagttagttatattttaggttatgggataaggaaggatatgtagtttttttattcgagtggatttagattttaagaagttgaattggtagataataatgttttttaggaaatattttggattttttatttttagggaagatgaatggtaggattgttttttttggttttttagcggttggttgggaggaatgtgattcgttttggttaaagaattgtgagttagagtaaggtgttttttttgggttagagtatttaattgttagtaagattttatagaattttttttttttttagtgtggtaattagtaatttttaagatggtttttttattagttcgaatatttggtgaatgtgatgagtagggtttatattaatggatatatatatgaaataatttttgttttattttaaggtatcgaggtttggggattggttgttaatgtattatattaagtttttattgattaatgtattagagggatgttttttagtttttttattgtattttttaattatttttttttttaaaaagtatattttttatttcgataggtttttagggagtaggtggtgtttggttatatgaaaaagttttttagtggtgatttgcgagattttggtgtatttattatttaagtagtgtatattgtacgtaatgtgtagttttttatgttttattttttttttgtttttttttttaagtttttaaagtttatcgtattatttttatgtttttgtatttttatagtttagtttttatttatgagtgagaatatataatgtttggttttttatttttgggttattttatttagaataatggtttttaattttatttaggttgttgtaaatgttattattttgtttttttttttatggttgagtagtgttttatggtgtgtgtgtgtgtgtatatatatatatgtattataaattattatttatttattgattgatgggtatttgagttggttttatattttggtaattgtaaattgtggtgacgtaaatatgtttgtgtaagtattttttttgtgtaatgatttttttttttttggttagatatttagtagtgggattgttgaattaaatggtagaattatttttaattttttaaggaatttttatattgttttttatagtggttgtattattttaaatttatattagtagtgtaaaagttttttttttttattatatttatgttaatatttataattttatatttttaaaattatggatatttttgtaggagtaaggtggtattgtattgtggttttgatttgtatttttttgattattagtgatgttgaatatttttttatatgtttgttggttatttgtatatttttttttgagaattgtttatttatgtttttagtttattttttgatgagattgttcgtttttttttgttgatttgtttgagttttttgtagattttggatattagttttttgttttatgtatagattgtaaagatttttttttattttgtgggttgttcgttaattttgttaattattttatttgttgtgtagaagttttttaatttaattaagtttaatttatttatttttgtttttgttgtatttgtttttggttttttggttatgaagtttttgtttaagttaatgtttagaagagtttttttgatgttatcgtttagtatttttatggttttaggtgttagatttgttttttatttattttgagttgttaattattttttttagttttatttttattattttattttatttttttgatttatagttagagttatagaattttagagttgaaagagagtatagaatttatttagtttgaaaattggatttatttcgtgaaattgtttttttttttataaaaaataaagttaagataaatataattttttaatttataatttttcgttatattcgaagtattaaaggttttttatttatatagattttttttatagatatttgttattttaaaatgtgagtgtttgttttttaatgttatatattaaaggaagtaattttttttgttttttatatttcgaggttattatttttttttttttgagaatttatttttagaatgaaagtattgaaagtggagttggagggagaattaagattatttaaggttaattattatgtttgaaatgagtttattagtgttagtagtggtgatttagtgatttatatatttattatttgaagattggaggaaatagttatttttatgtttttttttttaagaatttttttaaatatttttatagtttgataaatatttgtgataaagtttgtaattgt

SEQ ID NO: 711 - DNA, 6759 bp, Artificial Sequence
  chemically treated genomic DNA (Homo sapiens)
tttaattgtagtgtttaagtggtttttgtgttatttatggtttaataaatgatgtgtaatttttttttgatggtattttggagtcgggagaggtagtgaaatggaagaataatttaggtgtattatttgttaaatttaggaggtggaggttgtagtgagtagagatagtattattgtattttagtttgggtaataagagcgaaattttattttataaataaataaataaataatttgttgagggggttttaaattttaaatatatattattgttgttagatatttaggagtggaattggaaaattggtaacgaaggagattattggaataagttatagagaatatttgttattaatatttagaatattatttggaatataatagatatttatttattagattaataaatgaaaagtgtatatgaatgtagtttaatgtgttaatgaaaggtattatgtgtattttttttagttataagttttaattagttgttttttattttatatattttttattttggttatttaatatgttacgtaatttagtatgttggatagtgtacgtgtgtttgatttgtaattagttagttataattataagttgaattagttaattaattttttttatattaaaggtttaaaaataaaataggtgtgttgatttataagtgggttttgatggtagaaatatttttttatagtggtatttggaaatatataggggtagttttttttttttttatgtttagtagtttttattggtatttattgatttagatattaggtaagttaaatattttgtaattttaaggatgattttatataatgaaaaatttttttgtttaggttgatttgttatagtgtttaagtttgtaatattagtattttgggaggttatagttggaggattattgagtttaggagtttgagattattttgggtaatatagtaaggtttttatttttattttataaaaaaagaaaagaaaatttgttaggtatggtggtatttatttgtagtgttagttatttgggaggtagaagtaggaggattttttgagtttaggagtttaagggtgtagtgagttatgatcgtattacggtattttagtttgggtgatagaataagattttaatttaaaaaataaagaaagaaaagaggtcgggcgcggtggtttacgtttgtaattttagtattttgggaggtcgaggcgggcggattaagaggttaggagatcgagattatttcggttaaaacggtgaaatttcgtttttattaaaaatataaaaaaattagtcgggcgtagtggcgggcgtttgtagttttagttatttgggaggttgaggtaggagaatggcgtgaattcgggaggcggagtttgtagtgagttaagatttcgttattgtattttagtttgggcgatagagtgagatttcgttttaaaaaaaaaaaaaaaaaaagaaagaaaagaaaaattgtttagtttaaaatgttatagtgagatcgtttataaatttaatttttaaagtttttttaagttttaaaattatatgattttaagtggaaagtatattttgaaaattattgttttataatgtagatatgagtattaggttaatattagttaatagggtttttgtttttttttttttttgcgtttttgcgtgtttttggttggtttattatttttaggtgtaatatgtgggttttatgaatgaaatggttagattttttggtgtgaaatttaaattattgtttttattttttatgtatttaaaattagtttggaaagtttttttggttattatatattaatttagttttaggtgatagaatatgagaaatggaatggagtttaaaaggttattttgtttttttatttttattgttttaaaattattaaagtaattaatataagggttttttttttaatgagcgatgaaagtgattttttttattttataaggtttttgttttggaaggttttggtaatggcgattatttttttggtaatttagggttatttgtaattttagtagttgttatagaaggtttagatgggaatttaaagttgtaagataagttttttatttattttttttaattagggttgttttggtttttttgtttttggggtaatagtggtaatgtgaggaatagagattttgtttttttgtaaaggaataagtggagtaattattttggatttattattggatttgattttaatttagtgttttttaatagtgtaattaaatgttaaaaattatagataaatattgtttgtatttgtttgttagttttaggattaaatagatagttttttattatttaagttttaaaatgttttggttttattttttttttattataattttttaaatttagtttttttattttatttattttaagtttttttatttatttatatatgatgatttttaaaggtaaagtatattaatcgttttttatatatatatttatatttttttttttgattaaaatttattatagattatatgagtatgtttatgtgtgtttgtgtttatatttatatagatttttaaaaattagtatttatttttgaaataaggattatattataagtatttttttgtatgttgttttttttttttttagtattttaatggggtatttttttaagttatttgttagttttaatttatagaataatttatttatttttttaataaaaagtatttattttattttatttttgatattttgaataatattgaaataaatttttttatataatttgttaaagtatgtttatatttgtatttttataagatatatttttaaaagtaaaattatttgattaaatagtatatattttttttttaaagaaaaattgaagatattttatttttattattattgaagttaataattgataagtttattagagaaaatattttatataattttatattattgatttagagtttatatatatatgataaagatagttaaaaatatatgaaaaaatatatttttggaaataaatatagtatttttttggttatgaaattaaaaaagtttgagatattttttaaatttgtagtagaagatgtaatagattgttagttttatttagtattgtttgtattaattgttgtttattcgattttttacgagatattagttttagaatatggattttaaagaatttatatttttggaatgttttattatagttttgatgattaagtttgagtttttaaaagttatttttattttatagaaattttttaattgttatgtattattagatatgataataggtgttataagagatatatgttttgtttttagtaaattaattagaagaaaataaaaatttttttaaaatataaagaaaatatagagtaagagaatagaatataagttttttatttatattttttaatagtaataataatttagtaattatttagggatgaaagtttttttttagtagttttgtgatttggaggggataatagagtagagaatgtttattgttttaattagagtttgggtatttgagattttgaagatttaaaaaggggttttgtagaaagttgtggtaagtaaaggataggttagagagagataggattaataaatgtgtcgattttagatatatttttgtgaaggatagtaaagaataggtggtttttttattttttagagagataaaatatcggaggttaaggtagaattgggtgtgttttgttaatttttaaatgaataaggttataggagtagtattgttttttgaagtagttataattttttttttgtattattttaattttatttatgtagtattaaaaattgaaaagaagttttatgtaaaatgagagtagagaaaattatgttgtttgaattgtagttttagaaaattttatgaatttatgatttgtttttaatttttatttataagttatatttgtttatttttaattatatgttatattttatatgtatttatgtatatatgtatttatgtgtatatattttttaattttttaatttttgttaaaaaaaaaatagttagataggaattaatagtgtagttatttttattttattaatgagtaaattaacgattggaaaggttaagtgatttgtttaaggttatagagttatagaagtgatttggaattttttatatttatattttagagatgaagattattgtttttaaaaggtatgaagggtaattttttaaaattagatatatattagtttatattaagtattatttgtttaatgaaggagttaattagataaaatgagtgagatgttataattttaagtgatattaaaatatagttgataggaaaattttttttgaaattttattatattttatgattgggagttaggtgtagtttattttgtttaattgttaatataattttatttggtattaattttatttggtttttggtattaatagattaatttgtggaattttgattttttttgtgattatatattgtatttagaaataagtaaatataagtttgagaaatataggtttttgattttaaaattttaagataggatatgaaaagagagagtagagaaaagttattttttttattgggttattttaattaagtagttaagtttttatagtatttggaggattattatgagttatttataaaagaattaggaataaggaaaataaggtaaatttttaaataatatataataaaatggagtatagaattgtaaagttatttgggagaaattatttgatttttaggttaagggtttaagagtataattagtagtttgtgtttattataattaaaggaaaagtagaaattgggtggttatgggagattggtttatagttttatttattatagagggttggcgtgtgtttatttatttaaggattaataaatgagtatttttttaagagtagttttttttattttttaataatttttttaatatgtaggtttattagaatatttttttttttaaattgtttagacggttggataggacgtagatatatagaagaaaagaagataaagaacgggtaggaaaattaaaaaggtaggaggttgaggcgggtggattatttgaggttaggagtttgagattagtttgattaatatggtgaaattaaatttttattaaagatataaaaattagttaggcgtagtggtgtatgtttgtaattttagttatttgggaggttgaggtaggagaattatttgaatttgggaggtagaggttgtagtgagtcgagattatattattgtattttaatttggataaaagcgaaatttcgttttaaaaaaaaaaagaaaagaaaaagaataaaaggtgatatagtaaagggttgagggtgggatgggtaaatgaagaaggagtatgttgtagttttatattaaatatggttagaatgagaatgatataatttaggtagtttgtttgtttttgggaattacggattatgatgtttaattatttaagtttatttttttgtatagttatgtgattttgtttaaaaagaaaaaaaaaagtagtgaaagaagtagtggtagagtttaaagatagtgttaggaatagaaaaaagttaggaaacgtaatttttttagaggggaatggacgttgaaggtagtgggaaaaaattgtttttaggtaagaatatgatttttttttttaatatttttcggagagaaggttttattttgttatttaggttatagtgtagtgttgtaattatagtttattgtagttttaaatttttgggtttaagcgatattttagtttaataggattatataattttagagtagttgggattataggtatgtattatttatttgtttttttaattgagaaggtgaagtatattattgatggggagaaggggtgattatttggtatattgaaatatagatatttttagattttgttttttattattcgtatttaagtaaaaagaagatatagattgcgtgtgtgtgtgtgtgtgtgtatgattgtgtgtgtgtatatatatatatatgtgtttttttatttttatatataggtatatgtatgtgggtgggtgggtggatgtgtttataggtgttttagttgcgaatttttattttttttgtttattttttttggtagatagtaaatgataaagtttaaaagtaaaaaagataaatatgtatgttgggttattagttttttaattttggagagttgatgattaaaaataaagtgtttattttttttttagaagaaaattttttttttagaaattagagagaaatgaaaatgtagttagattattaaaaggaatttgttttttagagataaggttttattttgttatttaggttggagtgtagtggtataattacggtttattgtagtttggaatttttgaatttaagtgattttatcgttttagttttttgagtagttgggagtataggtatgtgttattatatttagttgattttgtttgttttttgttttgttttgtggagatagggttttattttgttgtttaggttgtttttaaatttttgggtttaagtgatttttttattttagttttttaaagtgttgggattataggcgtgagttattatatttagttagtgtttattaaaaagtaaagtttttattaagttaaagagcgaaattaaaataaatagataaataagtaaatatatttttagtaatgttgttattggaaatgttttttgggtttttgtatagg

SEQ ID NO: 712 - DNA, 6759 bp, Artificial Sequence
  chemically treated genomic DNA (Homo sapiens)
tttgtgtaaaggtttagagaatatttttagtaataatattgttgaaaatgtatttatttatttatttatttattttgatttcgttttttggtttaataaaaattttattttttaataaatattggttgagtatggtagtttacgtttgtaattttagtattttgggaggttgaggtgggaggattatttgagtttaggagtttgaaagtagtttggataatagagtgagattttgtttttataaaataaaataaaaaataaataaaattagttgggtgtggtggtatatgtttgtatttttagttatttaggaggttgaggcggtaggattatttgagtttaggagttttaggttgtagtgagtcgtgattgtattattgtattttagtttgggtgatagagtaagattttgtttttagaaaataaattttttttagtgatttaattatatttttatttttttttaatttttaaagagaaagtttttttttgaaaaaaaaataagtattttgtttttagttattagttttttaaaattaagagattgatgatttagtatatatatttattttttttgtttttggattttgttatttattgtttattaaaaagagtaagtagaagaaataaagattcgtaattaaaatatttgtagatatatttatttatttatttatatatatatgtttgtatatgggaatgaagaaatatatatgtatatgtatatatatatatagttatatatatatatatatatatacgtaatttgtattttttttttatttagatacggataatgaggaataaggtttgaagatgtttgtattttagtgtgttaggtagttattttttttttttattaataatgtattttatttttttaattaaaaagataagtaaatggtgtatatttatagttttagttattttgggattatatagttttgttgagttggggtatcgtttgagtttaggagtttgaggttgtagtgagttatggttatagtattgtattgtagtttaggtgatagagtgagatttttttttcggggggtgttggggaaagaagttatgtttttatttaaaaataatttttttttattatttttagcgtttatttttttttaagaaaattacgttttttaatttttttttgtttttgatattgtttttaggttttattattattttttttattatttttttttttttttttagataaaattatatagttatgtagggaaatagatttggatgattaaatattatgattcgtgatttttagaaataaataaattgtttgaattatattatttttattttagttatatttggtataaaattatagtatgttttttttttatttatttattttatttttaattttttattatattattttttatttttttttttttttttttttttttgagacggagtttcgtttttatttaggttggagtataatggtgtgatttcggtttattgtaatttttgttttttagatttaagtgatttttttgttttagttttttaagtagttgggattataggtatgtattattacgtttggttaatttttgtatttttggtagagatttggttttattatgttggttaggttggttttaagtttttgattttaggtgatttattcgttttagttttttatttttttaatttttttattcgttttttgttttttttttttttgtgtgtttacgttttgtttaatcgtttgggtagtttgaaagagaaaatgttttagtgagtttatatattaggaagattgttgaaaaatgggaggagttgtttttaaagagatatttatttattggtttttgaatgggtgagtatacgttaattttttgtgatggatgggattgtaggttagttttttatggttatttagtttttattttttttttgattatggtaaatataagttgttggttatatttttggatttttggtttgggagttaagtagttttttttaggtgattttgtagttttgtattttattttattatgtgttatttgaaagtttattttgttttttttatttttagtttttttgtgggtagtttatagtagttttttaaatattgtagaaatttagttatttaattgagatagtttaataaggaggatgatttttttttgttttttttttttatgttttgttttggaattttggggttaaaggtttgtattttttaagtttatatttatttgtttttgagtatagtgtgtggttatagaaaagattaaaattttataaattgatttattagtattaggaattaggtaaaattagtattaggtaaaattatgttggtagttagataaaataaattgtatttaatttttagttatgaaatatagtagaattttaaaaaaagtttttttattaattatattttgatgttatttagaattataatattttatttattttgtttagttaatttttttattaagtaagtgatatttagtgtaaattggtatatgtttaattttgaggaattattttttatgttttttgaagatagtaatttttatttttgaagtgtgagtatgagagattttaaattatttttatagttttgtggttttgggtaaattatttaatttttttaatcgttgatttatttattaataaaatagggataattatattattaatttttgtttggttattttttttttaataaggattagaggattaaagggtatgtatatataaatatatgtatatataggtatatataaaatgtggtatgtagttaaaaatgagtaaatgtgatttgtagataaaaattaaaaataagttataggtttatgaaattttttagggttgtaatttagataatatgattttttttgtttttattttatatagaatttttttttagtttttaatgttatataaatagaattaaaataatgtaaagaaaagattgtgattattttaggaagtaatattatttttatagttttatttatttaaagattggtaggatatatttaattttattttggttttcgatgttttatttttttaggaggtgaaaaggttatttattttttgttgttttttataagaatgtatttgaagtcgatatatttattagttttgtttttttttagtttattttttgtttgttatagttttttgtagagtttttttttaaatttttagaattttaaatgtttaggttttggttggggtagtgggtattttttattttgttgttttttttaaattataaaattgttaagaagaaatttttatttttggatggttgttagattattgttgttgttggaggatatgagtggaagatttatattttgtttttttgttttatattttttttgtattttaaagaaatttttgtttttttttaattgatttgttggaggtaaggtatatattttttgtgatatttgttgttatgtttgatgatgtataatagttgaaagatttttataaaatgagagtggtttttggagatttagatttgattattaaagttatgatggaatattttaaagatgtggattttttagggtttatattttgaagttaatatttcgtaaagaatcgagtgaataataattagtgtaggtagtgttaaatgaagttgatagtttgttgtattttttgttataagtttaaaaagtgttttaaatttttttagttttatagttagaggaatgttgtgtttatttttaaagatatatttttttatatgtttttagttatttttgttatgtatgtgtgggttttaagttagtgatgtaaaattatgtaaaatgttttttttaatgggtttgttaattgttaattttaataatgataaaaataaagtgtttttagtttttttttagaaaaaagatatatgttgtttgattaggtgattttatttttgggaatatattttataaaaatataaatataagtatgttttaataaattgtataaaaaagtttattttagtgttgtttaaagtattaaaaatgagatagaatgaatgttttttgttagagaagtgaataaattattttgtaaattagagttaatagatagtttggagaaatattttattaaagtattagaaaggaaaaaagtaatatgtaaaaaagtgtttataatatgatttttattttaaaaatgaatgttgatttttaaaaatttgtataaatgtgaatatagatatatatagatatatttatatgatttgtaatggattttgattagggagaaaaatatgaatgtatatataagaagcggttagtatgttttatttttgggggttattatatgtgagtagatgaaagagtttagaataaataaaataggaaaattaaatttaaaaaattatgatagggaaaaaataaaattaaaatattttagaatttaggtaataaaagattgtttatttaattttggaattaataagtaagtgtaaataatgtttgtttgtgatttttgatatttggttgtattgttgagaaatattgagttaaagttaggtttaatgataggtttagagtggttattttatttgtttttttataaaggggtaaggtttttgttttttatattgttattattgttttaggggtaggaaaattaagatagttttgattaaggaaaataaatgaagagtttattttataattttgagtttttatttgagttttttgtggtagttgttggagttataaataattttaagttattaggaaaatggtcgttattattagagttttttagagtaggagttttatggaataagaaagattatttttatcgtttattagagaaagaatttttgtgttggttgttttggtaattttggggtagtagaggtgaggggataagatagttttttaggttttattttattttttatattttattatttggaattgggttggtgtataatggttaaaaagattttttaggttagttttggatgtatgaggaatggggatagtagtttgagttttatattagagaatttgattattttatttatagagtttatatattgtatttgaaagtaatgggttagttaggaatacgtaagaacgtaaaagaggaagaaaatagaaattttattggttgatgttagtttgatatttatgtttgtattgtaaaataataatttttaaaatgtattttttatttagaattatgtaattttagaatttgaaagaattttaaggattaaatttatgaacgattttattataatattttgggttaggtaattttttttttttttttttttttttttttttttttgagacggagttttattttgtcgtttaggttggagtgtagtggcgggattttggtttattgtaagtttcgtttttcgggtttacgttatttttttgttttagttttttaagtagttgggattataggcgttcgttattacgttcggttaatttttttgtatttttagtagagacggggttttatcgttttagtcgggatggtttcgattttttgattttttgattcgttcgtttcggttttttaaagtgttgggattataggcgtgagttatcgcgttcggttttttttttttttttattttttgagttggagttttgttttgttatttaggttggagtgtcgtggtgcgattatggtttattgtatttttgaatttttgggtttaagagatttttttgtttttgttttttaagtagttggtattgtaggtgagtgttattatgtttggtaaatttttttttttttttttgtagagtagagatgggggttttgttatgttgtttagggtggttttaaatttttgggtttagtgattttttagttgtagttttttaaagtgttaatattataggtttgagtattatggtaagttagtttgggtagagagattttttattgtgtgagattatttttaagattgtagggtatttagtttatttagtatttaagttaataaatgttagtgaaaattattaggtatagaaaaagaaaagattatttttatatatttttagatgttattatggggaagtatttttgttattaagatttatttatagattaatatatttattttgtttttagatttttaatgtgaaagaggttaattaattaatttaatttgtagttgtagttgattagttataagttagatatacgtgtattgtttagtatgttgagttgcgtggtatattaaatagttaaaatagaaaatatgtaaaatgaagggtagttggttggaatttataattaaggagaatgtatatgatgttttttattggtatattaagttgtatttatatatattttttatttgttaatttagtaaatgagtgtttattatattttagataatgttttaagtattagtgatagatgttttttgtaatttattttagtgatttttttcgttgttagttttttagttttatttttaagtgtttgataatagtggtatatatttaaaatttaggatttttttagtaagttatttatttatttatttatgagatggagtttcgtttttgttgtttaggttggaatgtagtggtattatttttgtttattgtaatttttattttttgggtttaataggtgatatatttgagttatttttttattttattatttttttcgattttagaatattattaagaggaggttatatattatttattggattataagtaatatagaagttatttagatattataattaaa

SEQ ID NO: 713 - DNA, 10713 bp, Artificial Sequence
  chemically treated genomic DNA (Homo sapiens)
ttttgggaggttggggtcggaggatcgtttgaatttaggagtttgagattagtttgagtaatatggggaaattttgtttttataaaaagtataaaaattaataggatatggtagtatatatttgtagttttagttatttgggaggttggggtaggaggattgtttgagtttgggaggcggaggttgtagtgattagagattatgttattgtattttagtttgggagagagagaaagattttgttttaaaaaataaaaataaaaagagaaaagaaagttgggtatggtggtatatatttgtaattttagttatttaggaggttgaggtataataattgtttgagtttgggagggggaggttgtagagagtggagatttaagattacgttattgtattttagtttgggtgttaagtgagattgttttaaaaaaggaaaagaaatttatatagaaataatttttagtcgggtatggtggtttatatttgtaattttagtattttgggaggttaaggggggtagattatttgaggttaggttttcgagattagtttggttaatatggtgaaattttgtttttattaaaaatataaaaattagttaggtgtggtggtgggcgtttgtaattaggaggttgtatttaggaggttgaggtaggagaattgtttgaattcggaggcggaggttgtagtgagttgagattgtgttattgtattttagtttgggcgatagagcgagattttattttaaaaagaaaaaagaaaaaaaaaaaagaatttttaaataagttaaatggttataagatgtatgaattattgattttattaattatttatttagttggttttttattatattgggaagttttttttaagatgttatttaagtttttgttatagtaatagtttttattaattttttttttttaatatttaattatttataatatgtataattaattgttgtaagtttgttgttaaaattagaattatgttggtttaatgcgtagattttatagataagttaaattggtagttttattttttggtttttatgttgtttgatagattttaggggttgaggtttgtttatttttatttttgtttggttagagtttaattggttataagttttttggttataagggttttattaaaggattggatggatttggagtaggtaattttattattttggtaataatatgatataaattttgttattgatgttgtttgtggttgattttagttaaaaagaggaaatgtgaaataaaaagaaaattcgtcgggtgcggtggtttatatttgtaattttaatattttgggaggtcgaggtaggtggattatttgaggttaggagtttaagattaggtttgttaatatggtgaaattttgttttttttaaatatataaaaattagttaggtatggtggtgggtgtttgtaattttagttatttaggaggttgagttaggagaatcgtttgaatttgggaggtagaggttgtagtgagtcgagattacgttattgtattttagtttgggtgagagagcgagattttgttttagaaaaaaaaaggaaaagaaaagaaaagaaaattaaagtttttttaattgattgaataaatttattttggttaaggagattttataaaaattttaaaatttaagttttttggttatgataagataggaggttggttatattttagtatatttttttttttattgttatcgattttttttttaatagttaagaagaaattagttttggaaaatagatggaagaattttgttgattttaattttaattatttgatgttgtggttagacgtttttttttttttcgtgtttttattttgttttgttttgtttttgttttttttttggagataggtttttttttttttttttttttttgagataggttttgttatttaggttggagtgtaatggtatgatttcggtttattatagtttttgttttttgggtttaagtgattttttcgttttagttttttaagttgttgggattataggtatatattattatgtttagttaatttttgtatttttttgtggatatggagttttgttgtgttgtttaggtttgttttaaatttttgggtttaaaggatttatttgttttagttttttaaagtgttgggattataggtatgagttattgggttcggtttttttttgtgattttgatatgatagttgattagtttataaagtatttttttttgattaatttttattaattatggggtggttttggttaatttagagaggcggtatataaagtgtttttgtgttttatgtttcgttttttgatgtgtatagtttaagtttgtattttttttttttttttttgagacgtagtttcgttttgttatttaggttggagtgtagtggtattattttggtttattgtaagttttatttttcgggtttatgttatttttttgttttagtttttcgagtagttgggattataggtattcgttattatattcggttaattttttgtatttttagtagagatagggttttattataatatatgttagttaggatggtttcgattttttgatttcgtgattcgttcgtttcggttttttaaagtgtttggattataggcgcgagttattatgttaggtttaagattgtattttaaggttaagttttggttgggtatggtggtttatatttgtaattttagtattttgggaggttaaggtgggaggattgtttgagtttaggagttcgagattagtttgggtaatatagtgagattttgtttttttttttttttgcgggggcgggggacggagttttgttgtgttgtttaggttggagtgtagtggtgtgattttggtttattgtaatttttgttttttaggtttaagtaattttgttttagtttttaatagtagttaggattataggtgtgcgttattatgtttagttaatttttttatttttagtagagacgggtttttattatgttggttaggttggtttcgaatttttaattttaggtgattcgtttatttcggttttttaaagtgttgggattataggtatgagttattgtatttagtttttttttattatttttaaataaaaatataaataggtcgggtgtcgtggttcgtatttataattttagtattttgggaggttaaggtgggtagattatttgaggttaggaatttgagataagtttggttaatatagtgaaattttatttttattaagaaataatattaaaaaatagttgggtgtggtggtgtatatttataattttagttattttagaggttgaggtaggagaattatttgaatttatgaggtggaggttgcggtgagtcgagattgtgatacggtattttagtttgggtgatagagtgagattttgttttaaaaaaaaaaaaaaaaaaaaaaataggttaggtgtcgcggtttatatattgtaattttagtattttgggaggttgaggtaggcggattatttgaggttaggagtttgagattagtttagttaatatggtaaaattttatttttattaaaaatataaaaattagttaggtatggtgttaggcgtttataattttagttattcgggaggttgaggtaggagaattttttgaatttgggaggcggaggttgtagtgagttaagatcgtgttattgtattttagtttgggttatagagtaagttttcgatttaaaaataaataaataaatgaaaaaataaaaaaattaatgttaaattttaattttaaagtgaatataagatgtatgtaatatgtatgtttgtttagtatatatgtatgtggtttttttttatgaatatttatagttttttttataatttattaatatgtatgttagttaatttattttatataaaatttttgttttatttttttttttttaaattgtttgtttttggttttagttaaaggttttatttattagtttgtaggttataatttgatataagaaaaaatattgtttttaaatatatagatttggtgattttaagttgatattttttaggttgttataagatttaggtatggtttattgttgtaggatataagttgggattttttgggaattggtttgtttgtaggttttagagagtttttttttttggttgatttttttttagagatttaattgtttttttaggtttttttgtttgttttttttttgggtttttttttgtggtattgtttagattattgggtttttattttttttatatttattgttatttatagtttgatggtttttatatttgtatttaatttggattttttttttgagtttttttttttataattatttttttcgggttaagggtatataggtatttcgataaaatagtgttttatgtttttttttgtttaaatttgtttttttttttttttttttttatttgtggtattattatgggtttagagaataaaaaaaatgaaggtttttgttattgattggggtggagatggagggaagagttagtttagaattataggtgttgtagaaaggatatttgagttgtcgggagagggggtttatgagttggggatggaaggagagtttggttttttaaataattgaagatttgattaaaagatttagaatatttgtgattttgtggttggtgatgggtgatatttgggttaatggggttgggggagttggtggttttataatttatggttttgggagatttttgttttttatagttgattgggaggttggaagtttgggttttagtttttgttttgatttttcggattttattttttttatttgtttaataggatagaggggttggaaattgatgagattagtttaaaggattttggtagtttaggttgtaagattttttttagattttagtgtttgggaaaaaattgggtaggtggagtttagggattggttttaggtttgtattgttaatttatttttttttattattttatggaggtttggttggtgtttatatataataattaattgttgagtggttttcgtttaattttaggttttatttttgggttttatttttattttttgtttgttttttaggttattaaattatagttgttttttggaataaggtaagggggagtgtagagtagagtagaagtttgagttagacggagagttatttttttttttaggtatgtgatattttttatttttttttagaggttatatattttatggtatttttattatgtgttaaggattttttgaattggaagggttttttgtttgtttgaaggttagagaattttgaagtggagattgaggtttagattagagtgtggtttgtttaaggttaaacgataagttagtgtttatttttttgaattagtatttgggttttagttttttagtttagagttgagtttttagtttttttagtttggggttttaaggttgggtgtgggggttatgattgttggtggggaggggttatagttggattaagatttgaaggtgagattaggtaggtgggaaaggagtttgtagagtgatgttgtttaaaaggataggaagagagtttggttttagaagtagttatagtaagagagattattgattgaataggtgggttttattgggggttggggaaaggatttttttagtttttatttttagtattgtgtgttggtcgtatttatgagagttttagtattttgaaggtgtagggggtaaaggttaaaagagttttggtttgaatttgggtggtttttattgtgtgatttggggtatggtttttatttgtgttgaaatgattttataaagattaaattggttattatttgttgatttttttttttttatatttaatttttgtaggagaaagttaagttttaagatagtttgttttttttttttttaaggttaaggagaaggtggagtgagggttggggtcgggataggttgaacgggaattttgtgttttaaatagttagggtttgttttcgtaggaattgaatttaaaggattatttggtattttttgagagtatagattttttcggcgtggtttttaaggttagtgagtgagtaggtttataggggtatgattggattttggaatgaatgaattaattatgagagagtgaatgaatattggaattaatagagtagtagagtaatggattgtggagtaggaaagagagttgttgggtgggaatttaattttaggtttatatgagttttgttgtgtagtcggtttggagatagtttagtttaggttttgtttagatttttgttaaggaggttttgttaagaggagaggaggggtagtacgggggtaaggtaagtttgtgagcgggaaaggtatgtttattttagcgattggtatgtggaagatgagttagaggagatagatggagagaagttataggaaataaattttgagtattttaggagggtttagatatttggtgtttagtggagtgaaggaaatagtcgttttttaaaatttagtgtttgaggttaaaggattgaagttttgtgatgattaaggagaagttagttttgtggtagggggtataggagttttttaaggttttagggttgtttagttggttgttttttgttagtatttatgttttgtgattttattttattaagattttatggttttcgggaagggtttattaaattagtttgagtgatgaggttagaaaggggttgggattaaggtttaaaaagtaaaataaattaataaaaattatattgtagtttttttaattaaaatatttttataaatttttttttttttttgagatggagtttcgttttgttatttaggttagagtgtaatggtataattttggtttattgtaatttttattttttggatttaagtgatttttttgttttagttttttacgtagttgggattataggtatacgatatcgtatttagtttattttgtatttttagtagagatagggttttattatgttggttaggttggttttaaatttttgattttaggtgatttatttattttagttttttaaagtgttgggattataggtatgagttatcgcgtttagtttatttttgtaaatttttataatgaagtaatttggtgttaaaatttgatttgaaaattaatgtgagtttatgtatagttttaatttattttattagtgtaattgttttattttagaatatatatttgattattgggtatatgaaaattatattttttttgaattatttttgatgaaattttaaaaaattttaattttgaaatatttgaataaggtattgtggatttatggtaaatttttggttatttttgtattttgtttaaatttatttttgaattatattatttgaatttcgtgattatttggagaaggtaatgaggtttaagttagggaggggtggtgtttaattttattttttattggatttgggaaaattgagggagatgggggtagggttttatttgttttaggttttcgtttaggttttatttttttggagttttgtatataatttaaggttttattttcgtattttttggtgttattgattatagttttttttttagggatagatatggtttagcggatgataatatagttgttgttttttttagtgtgggtggttgtagtaggggaggtttagataaggattgtatgggttaggattgagttttttaatgtttgtatgaacgttaagtattataaggaaaagttaggtttcgaggataagttgtatgagtaggtgggttagggggtgatttggggtggtgagggattggtttaggaagaggaaacgaggatatggaaatgttaaattttatttattggtgaattgaagtggaggagttttttagtttgtattaatatgggtgattattttatagatattgtgttaaatgtcggtataatgttaatagtttatttttttggttgttgagttttcgtattatagaaataaggaagtaggtttaaaggagagtttgggaaatgaagttggagtgatttattttggggttgtttgatttagggatttagattgggaatgatttttttaaagatttgagggaagaaattgtatattgtgtatagtggttttttttttgttagttttaaatagtttaagaagggagagttttttatattatgaggttgtgtgtaaagtattttttttttttttttttgagataaagtttttatatgttgtttaggttggttttaaatttttggatttaagtgatttttttattttagttttttaaagtgtgggattatagaaatgagtcgtacgtttttttgaagtattttggtttatgtatttcgtaaaattttgggttgtgtttttcgattatattggatttgaggtttttttataatatttattttgttattatttttttaatattttgaatatgatgatataattaaagaaaaagtagaggaaaagtaatttgtaggttaggtgttacggtttacgtttgtaattttaatattgtgggatgtcgagatgggtagattatttgagtttaggagttcgagattagtttgggtaagatggtaaaattttatttttattaaaaaataaaaaaaattagttaggtgtggtggtatatgtttgtagttttagttatttaggaggttgaggtgggtaggttagttgagtttaggaggtagagattgtagatcgtgttattgtattttagtttgggtaatagagtgagattttgttaaaagaaagaaagaacgaaaaaaagaaagaaaggaaggaaggaaggggaggaaggaaagggagggaggaaagggagggaggaaagggagggaggtaagggagagaaatttgtaatacgtattttttttttttttttttgagatagagttttgtttttgttgtttagggtggagtgtagtggtataattttagtttattgtaatttttattttttaggtttaagtgatttttttgttttagttttttgagtaggtatacgttattatatttagttaattttttgtttgtttgtttgttttgtttgttggtatttttagtagagatgggggttttattatgttggttaggttggtttcgaattttttattttataattcgttttttttggttttttaaagtgttgagattataggtgtgagttattgcgttcggttttaagtgtatattttatttatttatttatttatttatttattgagatggagttttgttttgttgtttaggttggagtgtagtggtataattttagtttattgtaatttttattttttaggtttaagtaatttttttgttttggtttttagagtagttgggattataggtatttgttattatgtttagttaatttttgtatttttagtagaaatggggttttgttatgttggttaggttggtttttatttttgattttaagtgatttgtttatttttattttttaaagtgttgggattataggtattatgtgagttattgtgtcggtttatattttaatatttagtttgttagttttaagtaatgagatttaggaagtttgaggataggtatataggagtatagttttaagttgttttgaattttgtagttattataagttagtttttaaggaaaaagattagtttttaagttgttttttaataatttataataaaataatatttataattgattggttatatattgtttttttgtattataaattttataaatagataatgggtgaggtagttagttagggataaaatattttttaagtagttgggattataggtgttcgttattatatttggttagttttttgtttgtttattttttgagatggagttttgttttgtcgtttaggttggagtgtagtggtatgatttcggtttattgtaagttttatttgtcgggtttatattatttttttgttttagttttttaagtagttgggattataggtgttagttattacgttcggttaattttttgtatttttagtagagacggggttttattatgttggttaggatggttttgattttttagtttcgtgatttattcgtttcggttttttaaaatgttgggattataggcgtgagttatcgtattcggtttaatttttatatttttagtagagacggggttttattatgttggttaggttggttttaaatttttgattttaggtgatttatttgttttggttttttaaagtgttgggattatataagtaagttattgtatttagtttggggttataatttaaattgtttttttatttttaaatttttgatattttagtgaggtttaatttgatcgtattattatattataagtttttattcgtttttgtttaatttttgtttaaagtaaaaattaggtgatgtgtttattgttgtaattttagtttttataaaagtatttgggtgagagtaagtaggattttaataaaggttgaattaataaattttgtaatgattgtaattttagtaggagtttttttttgggtttttattgtttttgacggtttttttttttaaagaggttttaatagtaagtatttttttgggtgatttttagtgggttggggaattaaggattaagaggggagatattgtatgtggaatattttggttgtgttggttgtgttggttgtggattgagttttttgtttttttttatttagt

SEQ ID NO: 714 - DNA, 10713 bp, Artificial Sequence
  chemically treated genomic DNA (Homo sapiens)
attggatgggggaagatagaggatttagtttatagttagtatagttagtatagttagaatattttatatgtagtgtttttttttttagtttttgattttttagtttattggaagttatttaggaaaatatttgttattgggatttttttaggggagagggtcgttagagatagtgggagtttaaaagggagtttttgttggagttgtagttattataaaatttgttaatttaatttttattgagattttatttatttttatttaggtatttttgtagaaattggggttataataatgaatatattatttgatttttgttttggataaaaattaagtagagacggatggggatttgtagtgtaatagtgcggttagattaagttttattgaggtgttaaagatttgaaggtaaaaaagtaatttaaattgtaattttaggttgggtgtagtggtttatttgtgtaattttagtattttgggaggttaaggtaggtggattatttgagattaagagtttgagattagtttggttaatatggtgaaatttcgtttttattaaaaatataaaaattaggtcgggtgcggtggtttacgtttgtaattttagtattttgggaggtcgaggcgggtggattacgaggttaagagattaagattattttggttaatatggtgaaatttcgtttttattaaaaatataaaaaattagtcgggcgtggtggttggtatttgtagttttagttatttgggaggttgaggtaggagaatggtgtgaattcggtaggtggagtttgtagtgagtcgagattatgttattgtattttagtttgggcgatagagtaagattttattttaaaaaataaataaataaaaaattagttaagtgtggtggcggatatttgtaattttagttatttgggaagtgttttgtttttgattagttgttttatttattatttgtttgtggaatttgtgatataaaaaaataatgtatagttaattaattgtggatgttattttattataagttattgagaaataatttaggaattaatttttttttttaaaaattaatttgtgatggttgtaaaatttaggataatttgaaattatgtttttgtgtgtttatttttaagttttttgaattttattatttaaggttgataagttaaatattaaaatgtgggtcggtatagtggtttatatagtgtttgtaattttagtattttgggaggtggaggtggatagattatttaaggttaagaatggagattagtttggttaatatggtaaaattttatttttattaaaaatataaaaattagttaggtatggtggtaggtgtttatagttttagttattttggaggttaaggtaggagaattgtttgaatttgggaggtggaggttgtagtgagttgagattgtgttattgtattttagtttgggtaatagagtaagattttattttaataaataaataaataaataaataaataaaatgtgtatttaaggtcgggcgtagtggtttatatttgtaattttagtattttgggaggttaagaggggcggattatgaggtgaggagttcgagattagtttggttaatatggtgaaatttttatttttattaaaaatattaataaataaaataaataaataaataaaaaattagttgggtgtggtggcgtgtgtttatttaggaggttgaggtaggagaattatttgaatttgggaggtggaggttgtagtgagttgagattgtgttattgtattttattttgggtaataagagtaaaattttattttaagaaaaaaaaaaagaaatgcgtattataagttttttttttttgtttttttttttttttttttttttttttttttttttttttttttttttttttttttttttttttttttttttttttttcgtttttttttttttttgataaggttttattttgttgtttaggttggagtgtagtggtacgatttataatttttgttttttgggtttaattgatttgtttattttagttttttgagtagttgggattgtaggtatgtgttattatatttgattaattttttttattttttagtagagatggggttttgttattttgtttaggttggtttcgaatttttgagtttaagtgatttgtttatttcgatattttatagtgttgggattataggcgtgagtcgtaatatttggtttataaattattttttttttgttttttttttagttatattattatgtttaggatattaaaggggtggtagtaaaataaatgttatagggagattttaggtttaatgtggtcgagagatatagtttaaagttttgcgagatgtatgaattaagatgttttaggagggcgtacggtttatttttgtaattttatattttgggaggttgaggtgggaggattatttgagtttaggaatttgagattagtttgggtaatatatggagattttgttttaggaaaaaaaaaaaagaatgttttgtatatagttttataatgtgagagattttttttttttgagttgtttagggttggtagaaaagaggttattatgtatagtgtgtagtttttttttttagatttttggaggagttatttttagtttaaatttttaaattaagtaattttaggatgggttattttaattttattttttaggtttttttttgggtttgtttttttatttttgtaatgcggaaatttaataattaagaaggtgaattgttggtattgtatcgatatttggtatagtgtttgtgaaatagttatttatattaatgtaaattgaagggtttttttattttagtttattagtgaatggggtttggtatttttatgttttcgttttttttttttgagttagttttttattattttagattattttttggtttatttgtttatgtaatttgttttcggggtttggtttttttttgtggtgtttggcgtttatgtagatattgagaagtttagttttggtttatgtaatttttgtttgagttttttttattatagttatttatattagaaggagtagtagttgtgttgttattcgttgagttatgtttgtttttgaagaaagagttgtggttagtggtattaaggaatgcggaggtggggttttaagttgtgtgtagggttttaggagggtggggtttggacggaagtttggggtagatagagttttgtttttattttttttagtttttttagatttaatgaaaggtaggattagatattatttttttttggtttgagttttattgttttttttaggtggttacgaggtttaggtgatataatttaaggatggatttgggtaaaatgtagaaatagttaggagtttgttataggtttataatgttttatttaaatgttttagggttaaaattttttaggattttattaaaggtgatttaaagaaaatataatttttatatatttaataattaagtgtatattttggggtgaaatagttatattagtgggataaattaaaattatatataaatttatattaatttttaggttagattttgatattaaattattttattgtaaaagtttataaaaatgggttgggcgcggtggtttatgtttgtaattttagtattttggaaggttgaggtgggtggattatttgaggttagaagtttgagattagtttggttaatatagtgaaattttgtttttattaaaaatataaaatgagttgggtgcggtgtcgtgtgtttgtagttttagttacgtgggaggttgaggtaggagaattatttgaatttaggaggtggaggttatagtgagttaagattgtgttattgtattttagtttgggtgatagagcgagattttattttaaaaaaaaaaaaaagtttataaaaatgttttagttgggggggttgtagtgtggtttttgttagtttgttttgttttttaaattttggttttagtttttttttagttttattatttaagttagtttagtaggtttttttcggaaattatgggattttggtggggtggggttataggatatgggtgttggtaggggatagttagttggatagttttggggttttggggagtttttgtgttttttattatagagttggtttttttttggttattatagaattttaattttttgattttagatattgaattttgggaggcgattgttttttttattttattggatattaggtgtttgggtttttttaaaatgtttagaatttattttttatgatttttttttatttgttttttttaatttattttttatatattagtcgttaaagtggatatgtttttttcgtttataagtttgttttgttttcgtgttgttttttttttttttttgatagggtttttttgataggggtttaggtagggtttgagttgggttgtttttaggtcgattgtatagtagggtttatataagtttggaattgaatttttatttagtagtttttttttttgttttataatttattattttgttattttattgattttagtgtttatttatttttttatggttgatttatttattttaggatttaattatgtttttgtggatttgtttatttattaattttgagggttacgtcggagaaatttgtatttttagggaatattaggtgattttttgggtttagtttttgcgggaataaattttaattgtttagagtatagggttttcgtttaatttgtttcgattttagtttttattttattttttttttggttttgggggaaagagaagtaaattattttgaggtttagtttttttttgtaaggattaaatgtaagaagggggaaattaataaatgatagttagtttaatttttgtggaattattttagtatagatgagggttatgttttaagttatatagtagggattatttaagtttaggttagagtttttttggtttttgttttttgtatttttagagtgttgaggtttttatgggtgcggttaatatatagtgttggggatgggggttgagaaaattttttttttagtttttagtggagtttatttgtttagttagtagttttttttgttgtggttgtttttgaagttaggttttttttttgtttttttgagtagtattattttgtaagttttttttttatttgtttagttttatttttaggttttagtttagttgtgatttttttttattaataattatgatttttatatttaattttggggttttagattagaagagttgagaatttagttttggattgaagggttagagtttaggtattagtttagggggatgaatattaatttgtcgtttaattttgagtaggttatattttggtttgggttttagtttttattttaagattttttggtttttaggtaaatagagggtttttttagtttagaaaatttttaatatatggtgggaatgttatagggtgtgtggtttttgaagggggatggggagtgttatatatttgggagaggaggtggtttttcgtttggtttaggtttttgttttgttttatatttttttttgttttattttaggggatagttgtggtttagtggtttaggagataggtagggagtgggaatggagtttaggagtggagtttgggattgggcgaaggttatttagtagttaattattgtatgtgagtattagttaggtttttatggggtagtgggagggggtgaattaatagtgtaggtttaaggttagtttttaagttttatttatttaatttttttttaaatattgaggtttgaaaaaaattttgtagtttgagttgttaggattttttgagttaattttattagtttttaatttttttgttttgttaggtagatgaggaaaatgagattcggaggattaaggtaagggttagagtttaggtttttaattttttagttagttatagagagtaaggattttttaaggttataaattgtagagttattaatttttttaattttattagtttaggtgttatttattattagttataaaattatagatgttttgaattttttgattagatttttaattgtttgaagggttaagttttttttttatttttaatttatggattttttttttcggtaatttaggtattttttttatagtatttgtgattttgggttaatttttttttttatttttattttagttaatgatagaagtttttattttttttattttttgagtttatggtggtattatagatgggaaaagggagagggaggggtaggtttgggtaggaagaaatatagaatattgttttgtcgaggtgtttgtgtgtttttggttcggggaaggtggttgtagaggggaaagtttaggggaagagtttaggttggatgtagatgtgggaattattagattatgagtggtagtaagtgtagggaaaatgggggtttagtaatttgggtaatgttataagaaaggatttaaggaggaggtaggtaggggagtttgagaagatagttggatttttagaggaaaattaattaagaaggaaggttttttagggtttgtaagtagattaatttttaggagattttagtttatgttttgtaatagtgagttatatttgaattttgtgataatttgagaagtgttaatttaaaattattagatttatatatttggaaataatatttttttttatgttaggttgtaatttgtaggttggtaagtggagtttttggttgagattaaaagtaggtaatttgagggaggaagggtgggataggagttttatgtaaaatgggttggttagtatatatattaatgggttataggaaaagttatgaatgtttatgaaagggagttatatgtatgtatattaagtaaatatatatgttatatatattttgtgtttattttggggttgagatttaatattaatttttttatttttttatttatttatttatttttgagtcggagatttgttttgtagtttaagttggagtgtagtggtacgattttggtttattgtaattttcgttttttagatttaagagatttttttgttttagtttttcgagtagttggaattataggcgtttgatattatgtttggttaatttttgtatttttagtagagatggggttttattatgttggttaggttggttttaaatttttgattttaagtgattcgtttattttagttttttaaagtgttgggattataatgtgtgagtcgcggtatttggtttgtttttttttttttttttttttttggggtagagttttattttattatttaggttggagtgtcgtgttataatttcggtttatcgtaatttttattttatgggtttaagtgatttttttgttttagtttttagagtagttgggattataggtgtgtattattatatttagttattttttgatattattttttagtagagatggggttttattgtgttggttaggtttgttttaaatttttggttttaagtgatttgtttattttggttttttaaagtgttgggattataggtgcgagttacggtattcggtttatttatatttttatttaaaaatagtgaaagaaggttgggtgtagtggtttatgtttgtaattttagtattttgggaggtcgagatgggcggattatttgaggttaggagttcgaaattagtttggttaatatggtgaaaattcgtttttattaaaaataaaaaaattagttgggtatggtggcgtatatttgtaattttagttattattgggggttgaggtagaattgtttgaatttgggaggtagaggttgtagtgagttaagattatattattgtattttagtttgggtaatatagtaagatttcgtttttcgttttcgtaaaaaaagagagagatagggttttattatattgtttaggttggtttcgaatttttaggtttaagtaatttttttattttggttttttaaggtgttaggattgtaggtgtgagttattatgtttagttaagatttaattttaaaatgtagttttaggtttggtatggtggttcgcgtttgtaatttaagtattttgggaggtcgaggcgggcggattacgaggttaggagatcgagattattttggttaatatgtgttatggtgaaattttgtttttattaaaaatataaaaaattagtcgggtgtggtggcgggtgtttgtagttttagttattcgggaggttgaggtaggagaatggtatgaattcgggaggtggagtttgtagtgagttaagatggtgttattgtattttagtttgggtgatagagcgagattacgttttaaaaaaaaaaaaaaaaaatgtagatttaggttgtatatattaaaaggcgaaatataggatataaaggtattttgtgtgtcgtttttttaaattggttagaattattttatggttaataggaattgattaggaaggaatgttttgtgagttggttagttgttatattaaaattataaaaagaggtcgggtttagtggtttatgtttgtaattttagtattttgggaggttaaggtaggtggattttttgagtttaggagtttgagataagtttgggtaatatagtagaattttatatttataaaaaaatataaaagttagttaggtatggtggtgtgtgtttgtagttttagtaatttgggagattgaggcgggaagattatttgaatttaggaggtagaggttgtaatgagtcgagattatgttattgtattttagtttgggtgatagagtttgttttaaaaaaaaaaaaaaaaaaagagatttgtttttaaaaaaaaaataaaaatagaataaaataaaataaaaatacgaaaaaaagagggacgtttggttatagtattaggtggttgaagttgaaattagtaggatttttttatttgttttttaggattggtttttttttaattgttaggaaaaaagtcggtaatagtaaggaagagggtgtattggggtgtgattagttttttgttttattatagttaagaaatttagattttgaagtttttgtggggtttttttggttaagatgggtttgtttagttagttgagggggttttgattttttttttttttttttttttttttttttttgagatagagtttcgtttttttatttaggttggagtgtagtggcgtgatttcggtttattgtaatttttgttttttaggtttaagcgatttttttggtttagttttttgagtagttgggattataggtatttattattatgtttggttaatttttgtatatttagaagggatagggttttattatgttggtaaatttggttttgaatttttgattttaggtgatttatttgtttcggttttttaaagtgttgggattataggtgtgagttatcgtattcggcgggttttttttttattttatattttttttttttagttgagattagttataggtagtattaatggtaaaatttgtattatgttgttgttaggatggtgaggttgtttgttttaggtttatttagttttttggtgggatttttgtggttaagagatttatagttaattgaattttggttagataggaatagaggtgggtagattttaatttttaaggtttattaagtaatataaaggttaaaaggtagggttattaatttaatttgtttataagatttacgtattgagttagtataattttggttttagtagtagatttatagtagttggttatatatattataggtaattaaatgttaagaagaaaaggttaatggagattattattataataaggatttgaatggtattttgaaaggaattttttagtgtggtagaaagttaattaaataggtaattgatgggattagtagtttatatattttgtaattatttagtttgtttggaaattttttttttttttttttttttttttttgagatggagtttcgttttgtcgtttaggttggagtgtagtggtataattttagtttattgtaattttcgttttcgggtttaagtaatttttttgttttagttttttgaatgtagttttttgattataggcgtttattattatatttggttaatttttgtatttttagtggagataaagttttattatgttggttaggttggtttcgaaagtttgattttaggtgatttgttttttttggttttttaaagtgttggggttataggtgtgagttattatgttcggttgaaaattatttttgtatgaattttttttttttttttgagataattttatttggtatttaggttggaatatagtggcgtaattttaaatttttattttttgtaattttttttttttaggtttaagtaattattgtgttttagttttttgaatagttgggattataggtgtgtgttattatgtttagtttttttttttttttttatttttattttttgagatagagttttttttttttttttaggttgaagtgtaatggtatgatttttgattattgtaattttcgttttttaggtttaagtaatttttttgttttagttttttaagtagttgagattataggtgtgtgttattatgttttgttaatttttgtattttttgtagagatagggtttttttatgttgtttaagttggttttaaatttttgagtttaagcgatttttcggttttagttttttaaag

SEQ ID NO: 715 - DNA, 8087 bp, Artificial Sequence
  chemically treated genomic DNA (Homo sapiens)
attagtttgattaatacggtgaaatcgtgtttttattagaaatataaaaattagtcgggtatggtggtatatatttataattttagttatttaaaaggttgaggtataagaattgtttgaatttgggaggtagaggtggtagtgagttgagattttgttattgtattttagtttgggtaatagagcgagattttgttttaagaaaaaataaaataaataaataaataaataaatttagtttagaattttttggggagatggatttgaaggtttttttttgttatagtagatagttagttaggtatgagtagagtaggagaggtttttattttttaattttaggaatgttaagtaattattgggtgatggttaggtagttgttaagttatttcgttaaaataataattgattgtagttggtgttagagaaaggtagttttttaaaagatagaaatatttgaaattggtgattagtagttttttataagattttaggagttgggcgagtaggtttaagtatgggtattaagaggtaaaatcgtagatgattattaataggtaaaatcgtcgatgatttttttttaggaatattggattggtaagggaaatatattttgagtgagtatgtttataattttagtaaatatattgtatatgcgtttttatttaagtgttgataggttattatgtatgtggatagtttattttaagggaagaattaggggagaagggatgtaagattttggaagtatgttaatttcgagttaaggttaaatagcgtatttgattttttaggttaattgtttggtttttttttaagtgttttttatttttttttatttttgttttaaagttttttaataaatttcgtttttgttttaaaatttgttttagttttttattttgttttatgttttttagttgaatttttttttttgaggaggtaagaattgagtttgttgtagattatgtaaatttagcgttggtaatatttttatttttttagttggttgttttgcgattattaaattttttttttgttgtagattttgttgttttattgtattggttaattgttgttgtgtagtaggtatagaattttgttggaattataagagaaagatttataagatgtagtaaaattttaaaaatgtaaaatagtgcgtatagtataataaaaggggaaaataaaaatatatgtatgggttgggtatggtggttcgtgtttgtaattttagtattttgggaggttgaggtaagcggattaattgaggttaggagtttgagattagtttggttaatgtggtgaaattttgtttttattaaaaataaaaaaattagttacgtatgatggtatagatatgtaattttagttattggggaagttgaggtaggagaattattttaatttgggaggtagaggttgtagtgagttaagattatgttattgtattttagtttgggcgatagagtgagattttgttttaaaaaaaaaaaaaaaaaaaaaaaggaatatatatacgtatatatttgtttgtttttgtagatagaaaatttagggatgtataagaaattgagaaaatatatagttaaggggtaagggtggagtaagattttttatgataaatgtaatttgtttattttgagatttgaatagcgattatattgtatattagaagtttttaatgataaaaatatagatgttgggttaggtataatggtttacgtttgtaattttagtattttgggaggttgaagtaggcggattatttgaggttaggagtttaagattagtttggttaatatggcgaaattttgtttttattaaaaatataaaaattagttgggtgtggtggtaggtgtttgtaattttagttatttaggaggttgaggtacgagaattatttgaatttaggaggcggtggttgtagtgagtcgagattgcgttattgtatttttgtttgggtattagaacgagattttatttaaaaaaaaaaaaaaaaaaaaaaattgaatattagtgaaaatgtaaaatttagaggaatatttattttataggagtaatgaaaagaggttaaatttaaagtagttattattattcgagaggttgaggtaagagaatcgtttaaatttgggaggtagaggttgtagtgaggtgagatggtttttttgtattttagtttgggtgatagagtaagattttgttttaaaaaaaaggagtaattatatatatatatatatttatatatatatatatataattttttttttttgagatagtgttttattttgttaatttaggatggaatgtagtggtgtagtggtgagattatagtttattgtagttttgattttttgggtttaagtgatttttttattttaattttttaagtagttgggattataggtgtatgttattatattaattaattttttgtattttttgtagagatgaggttttattatgttgtttaggtgggtttaaataatttatttgttttagttttttaaagtgttgggttattgtgtttggttaatattatagatattaataataataataataataataaaaattttgttaaataaagtattttgttagttacggaatattgatatttttatttgtttatttatttatttatttgagatggagttttattatgttgtttaggttggttttaaatgtttgggtttatgtaatttttttgttttggttttttaaagtgttgggattataggtgtgagttatcgtatttagtttaattatttttaatttggtagtttagattttttgaaaatttattttttttatttttatttgtttttattatataagtaattgataatgtataaagaaaaaaagtgtgttttttttaaattatattttagttgtgtatattttttttatgtaaatagagatatataagaaatgtataaatatttttgtaaatggttgtattatatttatattgttgtataatttgtaatttttaaattagttgtgaatttttttttttttagtaaatatttatttaattattattatttattgttattattattatttgagataggatttttttttgttgtttaggttgtagtgtagtggagattatagatgattgtaattttgaagttatagatttaagtgattttcgtgttttagttttttaagtagttgggattataggtatgtgttattatatatagttaatttttaaattttttttgtagagataagggttttattatgttgtttaggttggtttggaatttttggttttaagtaattttgtttcggttttttaaagtgttgggattttagggatgagttattatgttaggttttaaattataattattaatggttatgtattttttttattatgaatgtatttttttttttttttttttttttttttgagatggagtttcgtattgttattttagttggagcgtagtggcgcgatttcggtttattgtaattttcgtttgttggttttaagggatttttttattttagttttttgagtagttggtattataggtatttgttattacgtttatttttttttttttttttttgtatttttagtaaagacggggttttattatgttggttaagttggttttaaatttttgattttatgattcgttcgtttcggttttttaaagtgttgggattataggtgtgagttatcgcgtttaaacgaatgtattatattttattggatttttattttgaaatatttaggaatttttagtgtttattatgataaatagtattgtgattaaaaaaaaatgtagttaaatttatttttgttgttgatttttttttttttaatttgtagagatatcgtttcgttatgttgtttaggttggtttggaatttttggttttaagcgatttttttgttttggttttttaaagtgcgtgggttatcgtgattagtagttatttattttttttggttgtgtgtgtgtgtgtgtgtgtgtgtgtgtgtgtgtgtgtgtatgtatgtattgagacggagtttgttttgttgtttaggttagagtgtagtggtacgatttcggtgtatgtaatttttatttttcgggtttaggcgatattcgtgttttagtttttcgagtatttgggattataggcgtgagttattatgtttagttaatttttgtatttttagtagagacggggggtgcgggtgggggaattttattatgttgattaggttggtttcgatttttgatttacggtgattcgtttgtttcggttttttaaagtgttggaattatgggcgtgagttatcgcgtcgggttagttattgattttttgaaaggatttttaaaaaataatgttgttttgaaaatttttatttatgattagtttttttggttaaaatttggttatggtttttttggagtgattttgagttggataattttgggaaagttagagaatttaattaaaaatatttttaaatgtttattaattgtaataaaagagatattataggatttataaagagcgttagttcgaaacgttttttgatgtagtaatttttgggtatcggtatcgtttatattttttttttagaattatatcgggaggggtcgcgaatttttgttagtcgttttcgttgcgattcggagatatttagatatcggattttttgagtttatagttcggatgtagaagggaattttagtagcgtcgtatcggatgtgtgagtggaagtgattgaggtgaatttacgatcgattggttttttcgagtggatttaagtttgtttttatttgttattggtcgcgtggtttgtttatttgaatagttttcgttttttggagaagtcgggttttgaagttttttttttttattattattggtttgttttttagtttattttttttttatatttgtcgattggtttttagggttgggaattttttttttttcgttttcggtttagaggatagcggggaaggcgggcggtggggtagggggtttgaagcggcggtatcggtgttggcggcggtagttgaggttttggtcgaagtcgcgcggtgagtttagggtttggtacgatttttttagggcggcgtaatgtttagatttacggttagtttgttcgtgggggggttaggggaagtcgttcgtttgggacgtggggtttttatattgtcggttttacgatttgggtatcgtttgaggttttgatttttatttttcgaggtaacgtttattttttcgggatttttaagagatttttggatttttcggttcgcggtacgttcgttcgaaggtcggtttattagttttggtattgttttttgggttttttgtttgttatagttatttttttttttgagttacgtataaaaattgtgtatttttgttttagggaatattagcgttcgtgttagttttttgttttttattgtggatattttttagagatttagttttcgaaattgagtttggttatatcgttggggtatatttttttttttttttttttagttttatttttgttttttttatttaattttaatttttttaagttttattaatattattaggatatttgattttagatattttaagtttaattgaatttagtttggagtagatggtttgtgggttttagattatataaagatatattggtttttttttgagaatagaaattttttgttagttatttttttttttttcggacgtatatatatatatataaattggagtagtttttttagtagggatttttaagtttttttttttttaaaggatgatatttttttttgtagttttttttttggtagtggagtatttgaaagttttataaaattaattatttttaggttttttttttgtgttttataaatttttttaaaaataagaattttgagaaattggttttgtagtataagttgaatatatttgggataggtgtatgttatatttatggtagtgtgggtataattgaggaatgagggaatgagtttaggaattaattggtgttttttgttttgttttgagacggagtttcgttttgtcgtttaggttggagtgtagtggttcgatttttgtttattgtaagtttcgtttttcgggttttcgttatttttttgttttagtttttcgagtagttgggattataggcgttcgttattatacggttaatttttttttttttttgtatttttagtagaggcgggattttatcgtgttggttaggatggtttcgattttttgatttcgtgattcgttcgtttcggttttttaaattcggttaggaattaattatttttttttagtttatatttgaagagttagttttttgtagaattgcgttgtttagtataagaattattagttatatgtggttgtggagtatttgaaatgtgattagtttaggtcgggtatggtggtttatatttgtaattttagtattttgggaggttaaggcgggtagattatttgaggttaggaatttgagattagtttggttaatataataaaattttatttttattaaaaatatataaaaattagttaggcgtggtgttgtatatttgtagttttagttattcgggaagttgaggtaggagaattatttgaattcgggaggtggatgttgtagtgagtcgagattatgttattgtattttagtttgggtgatagagcgagattttgttttaaaaaaaaaaaaaaaaatgattagtttaaattgatattgttgtaagtgtaaaatgtatattagattttgaagattcgttaaaaaaaaagaatggatattatattaattttttaaatattgataatatgttgaaatgatattttggatatattggtttaggtaattaattttatttgtttttttttattttttaaaatatggttataagtagttttaaaattatatttgtggattattgtatttttttttttttttttttttaattgagatggagttttgtttttgttgtttaggttgtagtgtaatggtttaattttagtttattgtaatttttgttttttgggtttaagtgatttttttgttttaattttttaagtagttggggttataggtacgtattgttacgtttggttaattttgtatttttagtagagacggggttttattatattgtttaggttggttttaaatttttgattttaggtgatttgtttattttgggtttttaaagtgtcgggattataggcgtgagttattgtgttcggtttaaatttttattagatagtgttgttgtagaataataatttttttttttagattgaatttgaggaaaggggtagttttagttatttttaattttttttttattttttgatatttgttatttggtattttgttatgtatatagtagtagtagtagtaataataatagttaataattattaagaatttagtatatgttttgtattgttttaaatattttttgatacgtattaagttatttagtttttatattaatttatgaattaggtattattatttttttattgtagttgaagaaatatattttgagtgttttttttgaggtatataattttgtttttgttttcgtttgtttttgttttgagatagtgtagtggtaggatttcggtttattgtagtttttattttttaggtttaagggatttttttgttttagttttttgggtgatatatgttattacgtttagttaatttttgtattttttatagagatgggtttttattatgttgggtaggttggttttaaatttttgattttaggtggttttttaggtttagttttttaaattgtttaaggtatataatttaaggatttaaatttaagtaggttaggtcgatagtttataatttaatttttttattatattgttttttttaaatattagttattgtttaatgaatttaggttttttaaatgttttttaattagattttttaatttttttagaattttttgtttgataagggttagggggagatttgtgttgggtgattagggttataagtaaatttattattatatttttttatttagaatattaaaggaaatttttttttaaaga

SEQ ID NO: 716 - DNA, 8087 bp, Artificial Sequence
  chemically treated genomic DNA (Homo sapiens)
tttttagagagaagttttttttaatattttggataagaaagtatgatgataaatttatttatggttttggttatttaatatagatttttttttagtttttgttaggtaggggattttaaaaaggttgagagatttgattgaggaatatttagaaagtttagatttattaaataatgattgatgtttaaaagaggtagtgtagtagggaggttaaattgtgggttatcggtttagtttatttgggtttgaatttttgggttatatattttgagtagtttgggaggttgagtttggaggattatttgaggttaggaatttgagattagtttgtttaatatggtgaaaatttatttttatgaaaaatataaaaattagttgggcgtggtggtatgtgttatttaggaggttgaggtaggagaattttttgaatttgggaggtagaggttgtagtgagtcgagattttgttattgtattgttttaaaataaaaataaacgaaaataaaaataaggttatatattttaagaaagatatttaaaatgtgtttttttaattataataggaagataatagtatttagtttatgggttgatgtgagaattaaatgatttaatacgtgttaaaaagtgtttaaaatagtgtagggtatatattaagtttttaataattgttagttattattattattattattattattatgtatatggtaaaatgttaggtaataaatgttaggaggtagggaaagaattaaaaatgattaagattgtttttttttttaagtttagtttaaaaagagagattattattttatagtagtattatttaatggaaatttaggtcgggtatagtggtttacgtttgtaatttcggtattttgggagtttaaggtgggtagattatttgaggttaggagtttgagattagtttgggtaatatggtgaaatttcgtttttattaaaaatataaaattagttaggcgtggtagtgcgtgtttgtaattttagttatttgggaggttgaggtaggagaattatttgaatttaggaggtagaggttgtagtgagttgagattgggttattgtattatagtttgggtaataagagtaaaattttattttaattaaaaaaaaaaaaaagaggaaatataatgatttataaatgtaattttaaggttgtttgtagttatattttaaaaggtaaaaagaaataggtgaaattaattatttaaattaatatatttaaaatattattttaatatgttattaatatttaaaaaattgatatagtgtttattttttttttttagcgagtttttaaaatttaatgtgtattttatatttataataatgttaatttggattagttatttttttttttttttttgagatagagtttcgttttgttatttaggttggagtgtagtggtatgatttcggtttattgtaatatttatttttcgggtttaaatgatttttttgttttagtttttcgagtagttgggattatagatgtgtagtattacgtttggttaatttttgtgtgtttttagtagagatggggttttattatgttggttaggttggttttaaatttttgattttaggtgatttgttcgttttggttttttaaagtgttgggattataggtgtgagttattatgttcggtttggattagttatattttaagtgttttatagttatatgtggttggtggtttttgtattgaataacgtagttttataggggattagttttttaaatgtaagttaaaagaaagtaattagtttttggtcgggtttgggaggtcgaggcgggcggattacgaggttaggaaatcgagattattttggttaatacggtgaaatttcgtttttattaaaaatataaaaaaaaaaaaaaattagtcgtatggtggcgggcgtttgtagttttagttattcgggaggttgaggtaggagaatggcgggaattcgggaggcggagtttgtagtgagtagagatcgagttattgtattttagtttgggcgatagagcgaaatttcgttttaaaataaaataaaaaatattaattagtttttgagtttatttttttattttttaattatgtttatattgttatgggtgtaatatatatttattttaagtatgtttagtttatgttataaaattaattttttaaaatttttatttttgaaagaatttgtaaggtatagaggaaaaatttgggaataattggttttgtaaagtttttaaatattttattgttaagaagaagattgtagaaagaaatgttattttttaggggagaagaaatttaagaatttttgttaagaaaattattttagtttgtgtgtatgtgtgtgcgttcgaaaggggggaaggtggttggtaagggatttttatttttaggaaagaattagtgtatttttatatgatttgaggtttataggttatttgttttagattgaatttaattaaatttaggatatttgaagttaaatattttaatggtgttgatagggtttaaggaagttaagattggatgggggaaatagggatggggttgggggagagggagagaagatgtattttaacgatgtaattaagtttagtttcggggattggatttttgagaggtgtttatagtggaggataaggggttgatacggacgttagtgttttttggggtagagatatataatttttatacgtggtttaaaagaaagggtggttgtgataggtaaaagatttaaagggtaatattagagttgatgggtcggttttcgggcggacgtatcgcgggtcgaagggtttaggggttttttgggggtttcggggaggtgggcgttgtttcgaggggtgggagttaaggttttagacggtgtttaggtcgtggggtcggtaatgtggggattttacgttttagacgggcggttttttttggtttttttacgggtaggttggtcgtgggtttggatattacgtcgttttagaggggtcgtgttaggttttagatttatcgcgcggtttcggttaaggttttagttgtcgtcgttagtatcggtatcgtcgttttaggttttttgttttatcgttcgtttttttcgttgttttttaagtcgggagcgagggaaggagggtttttagttttgaggattaatcgataggtatagggagaagatggattgaaaaataggttaatagtaatgaagaagagaagttttaggattcggtttttttagggggcggggattgtttaaatagataaattacgcggttagtggtaggtgaaaataggtttgggtttattcgggagaattaatcggtcgtgagtttattttagttatttttatttatatattcggtacggcgttgttaggatttttttttgtattcgggttgtgaatttaaggagttcggtgtttgggtattttcggatcgtagcgagagcggttagtagaggttcgcgatttttttcggtgtaattttgagaggagaatgtgagcgatgtcggtgtttaggaattattgtattaaaagacgtttcgggttagcgttttttatggattttgtgatattttttttgttataattaataagtatttgaaaatgtttttaattagattttttaatttttttaaaattatttaatttaggattattttagagaaattatagttaagttttaattaaaagagttagttataaataaaaatttttaaagtaatattattttttaaaaatttttttaaaaaattaatagttggttcggcgcggtggtttacgtttataattttagtattttgggagatcgaggtaggcggattatcgtaggttaggagtcgagattagtttggttaatatggtgaaatttttttattcgtatttttcgtttttattgaaaatataaaaattagttgggtatggtggtttacgtttgtaattttagatattcgggaggttgaggtacgagtatcgtttgaattcgggaggtgaaggttgtatgtatcgagatcgtgttattgtattttagtttgggtaatagagtaagtttcgttttaatatatatatatatatatatatatatatatatatatatatatatatatataattaaagaaaataaataattgttggttacggtggtttacgtattttgggaggttaaagtaggaggatcgtttgaggttaggagttttagattagtttgggtaatatagcgagacgatgtttttatagattaaaaaaaaaaaaattaatagtaaaagtggatttgattatatttttttttaattatagtgttatttgttatagtaaatattgaaaatttttaaatattttaaagtaggagtttaataaaatatgatgtattcgtttgggcgcggtggtttatatttgtaattttagtattttgggaggtcgaggcgggcggattatgaggttaggagtttgagattagtttgattaatatagtgaaatttcgtttttattaaaaatataaaaaaaaaaaaaaaaaggtaggcgtggtggtaggtgtttgtaatgttagttatttaggaggttgagataggaaaattttttgaagttagtaggcggaggttgtagtgagtcgagatcgcgttattgcgttttagttggggtgatagtgcgagattttattttaaaaaaaaaaaaaaaaaaaaaaaaagatgtatttataataagaaaaatatatagttattaataattataatttagagtttagtatggtggtttatttttggaattttagtattttgggaggtcgaggtaggattgtttgaggttaggagttttagattagtttgagtaatatagtgagatttttgtttttataaaagaaatttaaaaattagttgtgtgtggtagtatatgtttgtagttttagttatttggaaggttgaggtacgagaattatttgagtttatgattttaaggttgtagttatttgtgatttttattgtattgtagtttgggtagtagagaaagattttgttttaaataataataataataataaatagtggtaattagatgaatatttgttaagaaggaaaaggtttataattagtttaaaaattataagttgtgtaataatgtaagtataatataattatttataaaaatatttatgtattttttatatgtttttgtttatatgggggaaatgtgtataattaagatgtaatttgggaaagatatattttttttttttatatattattaattatttatgtaataaaaataagtgaaggtagaagaaatgagtttttagaaggtttaaattgttaaattaaagatagttgggttgggtgcggtggtttatatttgtaattttagtattttgggaggttaaagtaggaagattgtatgagtttaggtatttgagattagtttgggtaatatagtgagattttattttaaataaataaataaataaataaataaagatgttaatatttcgtggttaataaaatgttttgtttggtagggtttttgttgttgttgttgttattgttaatatttatgatattggttaggtatagtgatttaatattttgggaggttgaggtaggtggattgtttgagtttatttgggtaatatggtgaaattttatttttataaaaaatgtaaaaaattagttggtgtggtggtatgtatttgtggttttagttatttaagaggttgaggtgggaggattatttgagtttaggaggttaaggttgtagtgagttgtgattttattattgtattattgtattttattttgagttgatagagtgagatattgttttaaaaaaaaaaaattatatatatatatatataaatatatatatatatataattgttttttttttttgagatagaattttattttgttatttaggttggagtgtaggggagttattttattttattgtaatttttgttttttaggtttaagcgatttttttgttttagtttttcgagtaataatggttattttagatttagtttttttttattgtttttgtgagataagtatttttttaaattttatatttttattgatgtttaatttttttttttttttttttttttagatggagtttcgttttggtatttaggtaggagtgtagtggcgtaatttcggtttattataattatcgttttttgggtttaagtgattttcgtgttttagttttttgagtagttgggattataggtatttgttattatatttagttaatttttgtatttttagtagagatagggtttcgttatgttggttaggttggttttgaatttttgattttaggtgattcgtttgttttagttttttaaagtgttgggattataggcgtgagttattgtgtttggtttaatatttatatttttattattaaaagtttttaatatgtaatatagtcgttatttaaattttaaaataaataagttatatttattatgaaaagttttgttttatttttgttttttgattatgtatttttttagttttttatgtatttttagattttttgtttgtaaaaataagtaaatatatacgtatgtatatttttttttttttttttttttttttttgagatagagttttattttgtcgtttaggttggagtgtagtggtatgattttggtttattgtaatttttgttttttaggttaaagtgatttttttgttttagtttttttaatagttgggattatatgtttgtgttattatgcgtggttaatttttttatttttagtagagataaggttttattatattggttaagttggttttaaatttttgattttagttgattcgtttgttttagttttttaaaatgttaggattataggtacgagttattatgtttagtttatatatatatttttattttttttttttgttatattatacgtattattttgtatttttaaaattttattgtattttgtagattttttttttgtagttttaataggattttatgtttgttgtatagtaatagttgattaatgtaatgagatagtagagtttgtagtagagaaagagtttagtgatcgtagggtagttaattgaggagatgggagtgttattagcgttgaatttatatggtttgtagtaagtttagtttttgtttttttagaagaaagaatttaattgaggggtataaggtagagtgagagattgaggtaagttttagaataggagcgaagtttattaaagagttttagagtaggaatgaaaggaagtaaaggatatttggaagagaattaagtagttgatttgagagattaagtgcgttgtttgattttgattcggggttggtatatttttagggttttgtatttttttttttttgattttttttttggggtgggttgtttatatgtatggtggtttgttagtatttgggtaggggcgtatgtgtagtgtgtttattggagttgtgggtatgtttatttaagatgtgttttttttattagtttagtgtttttagaggaagattatcggcgattttgtttgttagtgattatttgcgattttgttttttagtgtttatgtttgagtttattcgtttagtttttgagattttatgggaagttgttgattattagttttaggtgtttttattttttgggagattgtttttttttggtattagttgtaattaattattattttagcgagatagtttaataattgtttgattattatttaatggttgtttgatatttttggggttagggggtgggggttttttttgttttgtttatgtttgattagttatttattgtaataggaggagatttttaaatttatttttttaaggaattttgagttgggtttgtttgtttgtttgtttgttttgtttttttttgagatagagtttcgttttgttgtttaggttggagtgtagtggtaggattttagtttattgttatttttgttttttaggtttaagtaatttttgtgttttagttttttgagtagttgggattataggtgtgtgttattatattcggttaatttttgtatttttagtagagatacggttttatcgtgttggttaggttggt

SEQ ID NO: 717 - DNA, 16127 bp, Artificial Sequence
  chemically treated genomic DNA (Homo sapiens)
  unsure 14193: n is a or g or c or t
atttttgttttaaagtgaaattatatattaaattttttttatagttagtttggcgtggtttttgttatatgtttaggaataagtgaggatagttagtttatgagattagaagtaagatggagttagttaagttaaattttttttattgttataatttttataaaggtggttttattaggtatattaatgtaaattttttagttaaaataagaatgattttttaaaggttatattttagatatattatatgtttttttttttttgtttttttaatagtaagtaagaagagtatttttgtataagagagaggtttttgtttgaagtttttttaatttgttagattatagattaaaagttattatatattgtttaagggattttaaagggagttatttttagaaaataaatttaaatttttttttttttggttattgaaacgtttaataattagtttattatttatattatttatatgtttaatatttattgattttggaattattgattattttgttgagtattttatgaatttaatttatattaatattaaggtgatgtattaaattgtattttagagtgtggatttgattttagtgttataattagttttttgggataaatagttgtttttttttttttattatagaaaaaaattgtttttggtaaatgttaaagaatatttttttattaattttttttattaattaatttaagtaaatgtagtgggattttttttttttagagttgaagttattttttgataggaagttaagtttttaggtattgaattatagtattgagttgaagtttaggattaagtaagaatgagtgagaatttggagatttaaggtttggttatttgtagaggattgggttttgttttgttttgtttttgttttggtgttttgtaaggttttttattgttttttattaggtaatatgttttgtttttgaattggttaattgtgttattttatttttttagtaatagtgattgttattgaagaaataggaggttaataaagaatattatttatttattagtagagtgtttatgttagagatattagataaataggaaaattaataattatattgtaggttgtggaaatagagagaggtatttaaggtatatttgtgggaatatgaaagtttggttttataaaaggattttggaggaagttatttttgatatttgagttgagttttataggatatgaagaaagtagttttatgtttcggttattatggttgtgtaataaattatttaaaatatattggattaaagttatgaaaatattttttttgtttagagattttgtgggtttgaaatttatatggaatatataaggtatattttgtttttgttttatgatgtttaaggatttagttggaagattgggaggttgggggttggaatttatttgaagaatgatttatttatatgtttattggttgattttggttgttggttgagggggttttagttttttttatattgtttttttattttggttagtttggatttttttaaaatatgatggttggtttttagtgttagtattttaaaaagagaatgtcggatatagtggtttatatttgtaattttagtaatttgggaggttgaggtgggaggttgtttgagtttaggagtttaagattagtttgggtaatatagtgagattttgtttttattaaaaatttttaaaattttaaaaattagttaggtgtggttatgtatatttatagttttagttatttaggaggttgaggtaggaggattatttgattttaggaggttaaggttgttgtgagttatgattatattattgtattttagtttgggtaatagaatgagattttgttttaaataaataaaaatttaaaaaaaaaaaaaagagagagagagggagttagaaggaagatgtattatttttatgatttggatttggaagttattaagtagtatttttgtagtattttgttggttggaatagttgtagtttaaattcgaattcgaagggaggagaatagataatatttttgggtgataggaatgttaaagttttaaatagtatatgatatgtgataaatattggtgtggttttttttggaagatttaattttttatattaggtaaagggatggaagattaaggaataatatgagggatagttagagagggaaaaagtattatttgttttaggaattataaatagtttgaagaagtaaagatgtttagatgttttttaatatgtagagtggggtgtatagaagagagtggtaagggcgttgggagagttaaggtgggtaagagagttttttttgttatgttaagaaagttggaatttattttgatggtggtgaaagtagagggttatggttagatttatatttgagatttagatttttagatttaaaatgattattttggtgatattggtttaatttataattttgtttaaggtttatgttattatagtgtttttgaaattttaaagtatattagaattatttggaggttttgttaaattatggattgttgggttttgaaattttagagattttgatttagtagatcgagaatagggtttgagaatttgtatttttaataagtttttaggtgatgttgaggttgttggtttagcgattatatttgataattatagttttttgataaattttattaaaatattttaatggtagagtaagggaattttggtgatatttttttttatttataatttgatagttattaggatttgtttatttgaggttaaaagtaattaagagaggaatagttatagtgtattatagagttttttaatatttttgtttacgttacggtgttttagttttttattaagtgtgtttgattttttttgattatttttaaggaagtggagaaagataagtttttgcgaagttttcgttttttttgatatgttattttatgtttatttttttggttaaaaagatggggtaatgatattaattttgtagggagttggagtatttgttagtgatttttttatgttagaatttgttaagtatgttagttaataatgatgtagtatagggtgcggtggtttacgtttgtaattttagtattttgggcggtcgaggcgggcggattatttgaggttaggagttcgagattagtttggttaatatgatgaaattttatttttattaaaaatataaaaattagttaggcgtggtggtgggtatttgtaattttagttattttggaggttgagatagaattttttgaatttaggaggtggagattgtagtgagtagagatggtattattgtattttagtttgggtaataaagtaagattttgttttaaataataataataataataattaatgatgtagttttttttttttgagtatataatgtagttttgatgatgtgaggaagggttttattgttggtgtggtagagtttgagattatggttggtaatgaaaatattattttttgatgtttatgggttttttttttatggttttaaggagggttttttaattttggtagaattttggattggatagttttttgttgtataggtggggggttgttttgtatattataggatgttttatttttggtttttatttattagatgttagtagaatatatttattttatagttgtttgttgtgataattaaaagtatttttagatattttgtagggggaaaatgatttttttaggtttggtatatatataatagtatttaagtagttgtttagaattaattaaatatagaaggatgttttttatttagaatgttttggattatttttttgataggtaattagattttattttttttattttatttttgaaggttttgtgttaatattattttttttatgaatatttttttgatttttttatttttagttttatataaattttttatttaatatttatatttgttagtttatattttttttgatatttgttatttagtattttaagtatgtaaatatgtttttttttacgatttataaagtggttttggaagaattttagtatttttttattttttttgttatggaaagtgtatataattgatattttttttttttttaagatagtattttgttatgatggtcgggttggaatgttgtggttatttataggtataattatagtttattgtagttttgagtttttaggtttaagtgattttttcgttttagttttttgagtagttgagattataggtatgtattattatattcggtttatatttgatattttttaaagtatatataaaatgtgaagaaaatttttataatttgtatttttttgtaatatgtaatagaaataaaatttttttttaaaatttattaataataggtaaggtacggtggtttacgtttgtcgttttagtattttgtgaggtttaggcgggtagatcgtttgagtttagaagtttaagattattttgggtaatatagcgaaattttttttttataaaaaatataaaaattagttgggtgtggtggtgtatatttgtagttttagttatttggaaggttgaaatgggaagattgtttgagttcgggagggagaagttgtagtaagttaggattatattattgtattttagtttgggtaatagagtgagattttgttttaaataaataaataaatgaggcgggtggattacgaggttagtagatcgagattattttggttaatacggtgaaattcgtttttattaaaaaaaaaaaaaaatataaaaaattagttaggtatggtggcgggcgtttgtagttttagttattcgggaggttgaggtaggagaatggcgtgaaatcgggaggtagagtttgtagtgagtcgagatcgtattattgttttttagtttgggcgatagagcgagatttcgttttaattaattaattaattaataaaatttattaataatatttattgtgtatttaataggaatatgttttgtttaaaaaaaattttatagggtttaatttattttatttttattataattttatgaagtaggaatttttataaaacgtattttataaataaggtatagagaggttaattaatttgttttttggttatatagttaggaagtgggtagagtatagatttatataaggtattcgttttttggttttatatatttaattgttgtaaatttatatcggcggttaagtagttttaatttgtgtatgtatttattttttagtaagatagtagtttttaagttttttttgtttagaattttagaagcggcgggttattaggttgtagttttttttgggttaggggttttggttgtatttcgtgttttgtataaagtaggttttttatttttgttaaatgtacgaatagtgttaagttgggaagttttttttgaggtttaatttttagttgtttttttatagaagagtgtttgcggttagtggttattaggggtcgtcgtagtatttagcgttggagggcggagcgggcggtagattcggagtagtatgtggattttcgggcgtcgcgtagtagtcggttttttggcgttatttagtttagtttaggtttagatttttattcgggtttcgcggtcggtagagttggttttattttgcggtcgtcgtggtttgcgtatcgatatcgatgcgatttgtacgtttcgtcgcgtagtaagtattcgcgtcgggaatagtcgcgggtcgtacgtcgcgggtcgtacgtcgtacgtttgcgtagggaggcgtcgcgtacgtcggggtcgtttcgggtacgcgcgttggattagtttatttcgtttttttttagggcggttcggcggaagcggttttgtaatttttttttttggttttttcggttgtatttatattggtttttgtttttcgaaggaaaaggggatattttgttttgcggtgcgattgcgggttaaggtacgggcgaaggtagggtaggttggtggaggggatcggtttcgaggggtgtgcggttgtttttatgtttgttatttttttgcgataatttgttttagtaatattaatagatggtatttgttagtatatatatatatataatgtgtgtgtttgtgtgtatttgtatatagcgtgtgtgttgtgtgtgtgtgtttgcgcgtacgggcgcgcgtatatttaatatttttaaggttggatttttttgaacgaaatgtttttttggaacgaggtgaaatttttagagttgtagaatagttagagtagtaggggttttggtttttggaaattgattcgatttttattttagattttgttttatttcgtagagttgtgtgattttgggggatttttttaatttttttgagacgtggttttgttttttgtagggagaagataaaggtgacgtttattttgcggatttggtgtgaggattaaatgggaataatatagataaagtttttagaattttaaattagtttttttttttttttttggggggtataaagaaatatttgatttagttacgttacggtttgaaaggaggaaatttaaagaatggttgtggggatgaggaagattttttaaggggaggatatggtatttaatgagggttttgaagatgttaaggaagtggtagagggtgttttacgaggagggaatcgtttgggtaaaggttaggaaggcggaaggggatttttttagagtggttggtacgtcgtatgtattaggggagatgaaagaggtaggttacgtttaagttatatttgtgttgtttttcggagtttgtattttaggtttgaattttttatacgtgttatttggtttatattgtgtttgaagaaattttgggattggttgttagtgtttaaaagttaggatttagaaaatggattttttggtaggacgcggtggtttatgtttataattttagtattttgggaggtttaggaaggtggattatttgaggttcggagtttaagattaatttggttaatatggtgaaatttagtatttattaaaaaatataaaaaaaaaaaaaaaagaagaagaagaagaagaaaataaagaaaagttagtcgggcgtggtgtcgcgcgtttgtaattttagttattttagaggttgcggtaggagaatcgtttgagttcgggaggtagaggttgtattaagttaagatcgtttaatgtatttcggtttgggcgatagagtaagatttcgttttaaaaaataataataataaataaaaataaaaaataaaatggattttttagtatttttggaaaaataggtaagtgtggttatgatggtttttagattttttttaggaaagtagatatttattatttggtttttgtgtattatttgagttgttacgtattgggtttttatttttgtttgtgtggatagtatgggttgttagtagagttgtgttttgttttgtttttttgagatagagttttttttttgttgtttaggttggagtgtagtggtttagttttagtttattgtaatttttgttttttgggtttaagtgatttttttgttttagtttttcgagtagttgggattatcggttaattttgtatttttagtagagatagatttttttatgttggttaggttggtttcgaatttttaattttaggtgattcgtttatttcgtttttttaaagtgttggaattataggcgtgagttatcgcgtttggttattagtagagtttttaatttaggagaatgataagaggtggtatagttttttagatggtatttggtggttgttaagggttattgattgataaatatatttaatttggcgttgtcgtttaggaggtggatattgggtttttggatagatggttagtaatttttgttattagttgggtttttttttttttatattgaattaattatatttgtttaatttgtttgttttatagtttttttgtatattttgggtatttgaggagttgggtgggtggtagtggtaattggggttattattttgtttaattattttaaagttttgattgttttggattgattttaagttttttttggtttttaaaatttattagaaattgagtttatttgaaggttttttttttatttttttttttattttttgtatttatttttaaagtagttgtttaatagaaatagaatgggagttatatatataattttatattttttagttaaaaagaaaaaaaaattatttttaataatatatttatttaatttagtatatataaaatattattattttaatatgtaattagtattttaaaaattagtaatgagattaggtacggtggtttacgattgtaattttaggattttgggaggtcgaggcgagtggattatttgagattaggagtttaagattagtttggttaatatggtgaaattttatttttattaaaaattagtttagtatggtggtgggtgtttgtagttttagttattcgggaggttgaggtatgagaattatttgagtttaggaggtagaggttgtagtgagttaagattttgggggattttgtgatatataaaaaaaattagtaataagatattttgtatatttttttcgtatttatatatttttagtatattttaatttataatttttaagtaaatgttttatttgtatttatttttataaaatttataattaaaaatgaaggtttatatagttaagttgttttaaatatatttaaatgttttttaggttgggtgtggttgtttatatttgtaattttagtattttgggaggttgagatgggcggattatttgaggttaggagtttgagattagtttggttaatatggtgaaatttcgtttttattaaaaatataaaaattagttggatgtggtggtatttatttgtaattttagttatttaggaggttgaggtaggataattgtttgaattcgggaggtggtggaggttgtagtgagtcgagatcgtattattgttttttaatttgggcgatagagcgagatttcgttttaaaaaaaaaaaaaaggtttttaataattttattattttattattattttaaataattaaaattaaatgaagttgaaaatttaggtttttagttttattagttatatttttagtgtttagtagttacgggggttggtgattattatatgggatagtatatttagtatttgattattggtttttagatttggttatttagtagaattaagaatttatagaaacggtttttaaaagtatagttttatagtttttagttttagttttatttatttggaggttgggaaggattttgattttacgaggtagtttatgttttttgatggagggatgtgataggggttgtatttttaacgtttttttttaaatattggagatagtttcgaggaggagataattggatgtgttttagtttatttgatggagggatgtgacggggttgcgtttttaacgtttttttttaaatatcggagatagtttcgagaaggagataattggatgttttttagtttattttttgttgtttgtgatagaatatttgaaattgggtaatttatatggtaaaaaattttttttttattgttttggaggttgagaagtttaaagttaagtttttttttgttggtggggattttgtagagtattgaggcggtatcgggcgttatatggtaaggggttgagtgtgttattttaggtgtttttttttttttttataaagtttaattagttttatttttatgataatttattaatttatgaatggattaatttattattgagggaagaatttttatgatttagttatcgtttaaaggttttattttttaatattgttatatcgggaattaagttttaatatgagtttcggaggtgataaatatttaaattatagtatgttgttttttaaatgatttaataagtttttgtggtatttatttttgtatgttttgggtagtttttagatatttgtttatttttttagagggataagattattatttgtgattttatgattttttggttttaggtttaataagtaggttatatttttatttatttttaaattatttttattgttttgtagataatttatataagtttatatatagaaaaggatatgtaaatatttatacgttgtcgggcgcggtggtttacgtttgtaattttagtattttgggaggtcgaggtaggtggattacgagtttaggagatggagattattttggttaatacgatgaaattttatttttattaaaaatataaaaaattagtcgggcgtggtgacgggtgtttgtagtttttattattcgggacgttgaggtaggagaatggcgtgaattcgggaggtagagtttgtagtgattcgagatcgtgttattgtattttagtttgggtgatagagcgagattgtattttaaagaaaaaaataaataaataaataaatatttatattgtttataaattaataataaatgttatggtttgtatgtttgtgttattttattatttatatgttaaaatttaattattaaagtgatattaggaggtggggtttttgggaggtgatgaggtatgagggtggagtttatatgattgggattagtgtttttttaaaatagtttaacggagtttagtgataaggtattatttatgaattaggaaattggtttttattagatattaaagttgttggtgtattgattttggattttttattttttaggattttaagaaatatatttttattgtttataagttatttagtggttggtattttgttataatattttagattaagataaataataaatatttgtatttttgatattaggttaagagatagaatttgtttgtttttttggaggtttttgtttttattttattattgttttgttttttttggaggaatttgttagttcgaattttgtttatcgtatttttttttttttagagtttgattttttttgtattttttttaatttatgtattgtttatatataaggtattttgttgtatttgttttgttatggtttgttttttttgtttaatattgtttttgtgcgttatttgtattgatgtatgtagttgttttttatttgtttttattgttggatagtatttggttgggtaaatatattatattgtaaattatattatttaggtttttttaggtgatatttggttgattgtagtgttttgttgttacgatggtgttgttgtgattgtttttgtgtatggatagaagttttttttaggtgaattttttagaatggaattgttgggtaaaggggtagttaataattaatttatttgatgttaaaagtggtggtgttagtttatttttttttgcgaggtatgggttttgatttattttttaagtgttgtggtttgatagggtcgggggtgataaggggatatttgggaaggaaagttgggttttttgttggttatttaggttagtttttattagggggtaggtaatgattgggttaagtggtttttgattattgggtttgagattttaggtttagaaattatttaatatttttttaaatgtattttatgagtaggtattgtgtgagtgagtatatatatttgaagttttaagttaggtaagtttattatgatttgtggtttaagggtttacgggtgatttggagttagagggagatatggttgttaggtggttttagaaagaatatttattatggttaggtgcggtggtttacgtttgtaattttagtattttgggaggttaaggtgggtggattatgaggttaggagtgagattagtttgattaatatgttgaaatttgttttttttaaaaatataaaaattagttgggtatggaggtgtacgtttgtaattttagttatttaggaggttgaggtaggagaattatttgaattcgggaggcggaggttgtaataagtttagattgtgttattgtattttagtttgggtaatagagtaagatttcgttttagaaaaaaaaaaaaaaaggaagaatatttattttatgattttgatttttaagttttgttttttttaagtagaatagaatggagttttttttaggtagaggcggaagtttgttttttatttagttttttatttttttgtttagagtttgaatatttttaggttttgtatttggggtatttttgttttttttgttttatgtttacggttgtgaggtttgttgtgagtattacgattttttttttagaggagtaaattaaggttttaaaaggtttagtagttgttcgaggaatattaaattggtaaaagtaggtagaatataaagtaaggagtatttggtaacggtttttttttatgattaaaaatagtcgaagaaagatttttatttgtgtttttgaaggagtaattgtatttgatttttttattagtaataattattaaatttttattaaattaaatatatatatatataaataaaaatagttattgtgaaggtattagcgattaagataattaaggtttgaggggttaggattttggagagatggaaatttttttgaggtgagttttatatttttagatatttttttttggatgttttgagtattgttttaatttttgggaaaataattttttttattgtgtatagattttggggttagatagtttgggtttaattttagttttgttatttaatgtttgtgtatttgtgtaggtaagttattttttggtgcgttagtttttttatttgtaaaatataattatagttgatttttattcgttaagagtttgtatttgttaatttgtttatttgttaaaatttgttattttaaaattagtatttttagttttttggggtcgttttaaagatgtgtgtagagcggtaaaaaaatgtgagtttttttaggtttatgtttttagttaaggtttaataaagtgttgttttgtttttttattttagttgttatagtgtaaattgtgttttttttatagtttgattagtgttatgttttttagatttttatgttttttttttggttatttttttgttaaaattgtttttaagtgtagtgtaaagtttagtacgaggaggttgtgatgttttttatagagaaaatgtatgtgttagagaagttttgttaggtatgagttaaggtgttgttgttttgagattaattaatttgttgttgttgtgtttgagatagggtttttttttgttgtttaggttgttggagtgtaatggtgtaattatagtttattgtagtttttatttttttggtttaagtaatttttttatttcggttttttgagtagttgggattataggtatattttattatatttagataatgtttttgatatttttttaggtggaattttgtttattatttaggttggagtgtaatggtgcgattttggtttattgtaatttttatttttcggatttaagtaatttttttgttttagttttttgagtagtatagattataggtatatgttattacgttttgttaatttttgtgtttttagtagaggcggggttttattatgttggttaggttagttttgaatttttgattttaggtgatttattcgttttcgttttttaaattgtagagattataggtacgaattataatgttcggttttatgttttttattttttaagttgaaatgaggtttttttatgttgtttaggttggttttaaatttttgagtttaagtaatttttttattttggttttttaaagtgcggggattataggtgtgagttattatgtttagttaagattagtgttaatgaattaattatatatattatataaggtgtttttaaatagaaataaggttatatattgatcgattggtaataatgttgtgattagtagtttatagggtatttagcgttgtattttttttataaataatttgttcgttgagtggatgtggtaattttgtagtatataattattatagaataaggattgtaataagagtacgttttttataggattgtaatgaagattgagtttatttatataaaggttgagagtagtgttaagtagatggagaatattgtagaatgtgcgatagttttaatagtggttattatggttgtttttttatttttttaaagatatgtgtttttaaggtttgtattttgttttattttttttatttattgttttttagttcgtttttttttttatttatttnttagttttgtgttttttgtttttttttttttgagtttgttaagggtattgttggtttaagagtagtaattaatagtttttcgttttttttttttatggtaattagtgatttttggagaatgtaaattttattattaattttttaaagtttttcggtgtttttttaggatgacgtttagttgaggtttttggtaagatttagggcgtttttttttcgttttattattttttttgttattttttttgtatttttttattttagttgtattatttttgtgttttagtggtttttgtttgattattttttttatttttttagttggttagtagagttggtggtaattaatttagattttgttatttggatgtttagtagttagggattaaaaaaaattaataggttatattttgttttgtagattatgataataagatttgttagatagtagttagtagttagagttaaattttttggattttagtaggattttgttttttgttattttttgttgttttttttagtgattttttaagagtattgtggatgttttttagttttttgttaattattttgtaatttgaatagtttgtagtagttttgtttagtagaattttttgatgtgatggaaatgttgtgtttgtattattagttatatgtggttataggattttcgaaattggtggtgtagttgaggagttgattttatattttattttattaaatttaaatgtaaatagttacgtgtggtttgttggttagtttattggaaaatacgggtttagagagatatagggagaattattgtaatgtattaaaagaaggtaaaaaaaaaaaaattttaagaaatatttttaaaatattttaatatagggttgggtgcggtggtttatatttagtattttgggaagttgaggagggtagattatttgaggttaggagtttaagattagtttggttaatatggtgaaatttcgtttttattaaaaatataaaaaatcgggtgcggtggcgggtgtttgtaattttagttacgcgggaggttgaggtacgagaattattcgaattcgggaggcgggggttgtagtgagtcgagatcgtgttattgtattttagtttgggcgatagagcgagattttattttaaaaataaaaaataaaaattaaaaaaaaaaattttagtatgattatttaattaaaatgtaggttagttgtttatcggatgtagagtttaattaataagagtaaggtttggtattaaaaaaagtgaatttatttcgaaattagtttgggtgaggggtataaagtattttgtttttttttaaaagtgttgtttttttttggaagtagaaagtggatatttttataaggtaaggggggaagtgtgtaagggtaagtgggggggtttttttgttagtttcgtgtatattttataggatagttgatttggtatttttttggttagtaataagttgtagtagtggttaagtgggtatgtttttagtatgtttttttagtgaatgaaagttttgaggtaatttttaagggtggaagtgttaggttattatttattggaggtgaaagtttcgtgatgggtttgttttggtttgcgaatttattgttatgtggagagatttgtgttttggaagagtatatagttagaaaagtttgttttgaagggaatgtatggtgaaggggaggtgaaaggttatatttgtatttttgaagggttaagtaggaaatcgggaattaggggagaggagaagagaagagaggataattttttttaagaaaagtaatatatttttttttttttagaaaaaatggagtattcggttataggtattcgaatgtagaagtagtaatatataaattatgtattaatgggttataatttattgaaaaatagtaacgtattttttaattttggtttttaga

SEQ ID NO: 718 - DNA, 16127 bp, Artificial Sequence
  chemically treated genomic DNA (Homo sapiens)
  unsure 1935: n is a or g or c or t
tttgaaagttaaagttaagaagtacgttattattttttagtgaattataatttattaatgtataatttatatattgttatttttatattcgagtgtttgtaatcgagtgttttattttttttaagaaaaagggaatatgttgttttttttaaaaaaaattattttttttttttttttttttttttttggttttcggttttttatttagttttttagaaatgtaaatataattttttattttttttttattatatattttttttagggtaagtttttttaattgtatgtttttttagagtatagatttttttatatgatagtagattcgtagattaaagtaaatttattacggaatttttatttttagtgggtggtggtttggtatttttatttttgggggttgttttaggatttttatttattgggagggtatattgaaagtatgtttatttggttattgttatagtttattattaattaggaaggtgttaagttaattgttttgtagagtatgtacggaattagtagagggatttttttatttgtttttgtatatttttttttttattttataaaagtgtttattttttatttttaaggggaagtagtatttttaaagaaaggtaggatgttttgtattttttatttaagttagtttcggagtaaatttattttttttggtattaggttttgtttttgttaattggattttgtattcggtgaataattaatttgtattttggttaaataattatgttgaagtttttttttttggtttttgttttttgtttttgagatgaagtttcgttttgtcgtttaggttggagtgtagtggtacgatttcggtttattgtaattttcgtttttcgggttcgagtgattttcgtgttttagtttttcgcgtagttgggattataggtattcgttatcgtattcgattttttgtatttttagtagagacggggttttattatgttggttaggttggttttgaatttttggttttaagtgatttgttttttttagttttttaaaatgttggatgtgagttatcgtatttagttttatattaaagtattttaggaatattttttaggatttttttttttttatttttttttagtgtattatagtgattttttttgtgtttttttaagttcgtgttttttaataggttagttaataagttatacgtagttatttatatttaaatttaatgagataaaatataaagttagttttttaattgtattattagtttcgagaattttgtggttatatgtggttagtggtgtagatatagtatttttattatattaggaagttttattgggtagggttgttgtaggttgtttaggttatagggtggttagtaggaggttgggaggtatttataatgtttttaaaaggttattaagagaggtaataggaaatagtaagaggtagaattttgttgaagtttagaagatttggttttgattgttgattgttgtttgatagattttattattatgatttgtaggatagaatgtgatttgttgattttttttagtttttaattgttggatatttaggtgatagggtttgagttgattattattagttttgttgattagttggggagatgaaggaaataattagataagagttattggggtataagagtggtgtagttggagtagggagatgtaggggaggtgataggggaggtgatggagcgaggagggggcgttttgggttttgttaaggattttagttggacgttattttgggaaggtatcgaagggttttaagagattggtgataaggtttatattttttaaaggttattggttgttatggagagaagaggcgagagattgttagttattgtttttgagttagtagtgtttttagtaaatttagaaaagagaaggtagaaggtatagggttggnaagtaagtggaggaggaaacgggttgggggatagtggatggggagggtggggtagagtgtagattttagaaatatatgtttttgaagaagtgagagggtagttatgataattattgttagagttatcgtatattttatagtgttttttatttgtttgatattgtttttagtttttatgtaaatggatttagtttttattataattttgtgagggacgtatttttattatagtttttattttgtggtagttatgtgttataaagttgttatatttatttaacgagtaaattatttataggagaaatataacgttaggtattttgtaagttgttggttataatattgttattaatcgattaatatataattttatttttgtttaaagatattttatgtaatatatatagttgatttattaatattgattttggttgggtatggtagtttatatttgtaattttcgtattttgggaggttaaggtgggaggattatttgagtttaagagtttgagattaatttgggtaatatagagagattttattttaatttgaaaaataaaaaatatgaggtcgggtattgtggttcgtgtttataatttttgtagtttgggaggcggaggcgggtggattatttgaggttaggagtttaagattagtttggttaatatggtgaaatttcgtttttattaaaaatataaaaattagtaaggcgtgatgatatgtgtttgtaatttgtgttatttaggaggttgaggtagaagaattgtttgaattcgggaggtggaggttgtagtgagttaggatcgtattattgtattttagtttgggtgatgagtaaaattttatttaaaaaaatattaaaaatattatttgggtgtggtggggtgtatttgtagttttagttatttaggaggtcgaggtgggaggattgtttgagttagagaggtagaggttgtagtgagttatgattatattattgtattttagtagtttgggtaatagagggagattttgttttaaatataataataataaattaattgattttaggataatagtattttaatttatgtttgataaagtttttttaatatatgtattttttttgtaaggaatattatagttttttcgtgttaaattttgtattatatttggagataattttaatagagaaataattaagaaaaaagtataaaaatttgaaaaatatggtattaattagattgtgaaaaggatatagtttatattatgatagttgaaataagaaggtagggtagtattttgttggattttggttgggaatatgagtttggaggagtttatatttttttgtcgttttgtatatatttttgaaacgattttaaaaggttaggggtattgattttggggtaataaattttagtaagtgagtaaattaataagtatagatttttaacgaatgaggattaattatagttgtgttttatagatgaggaaattgacgtattaaagggtaatttgtttatatagatatatagatattaagtggtagagttgggattgaatttaagttgtttggttttagagtttgtgtatagtggaaggaattgtttttttaggaattaaagtagtgtttaaaatatttaaggaaaagtgtttgagaatgtggggtttattttagggaagtttttatttttttaggattttggttttttaaattttagttgttttagtcgttgatatttttataatagttgtttttgtttgtgtgtgtgtgtgtttaatttaatagagatttgatggttgttattggtgggaaggttaaatgtagttatttttttaaaggtataagtagaagttttttttcggttgtttttaattataaaaaagaatcgttgttaaatattttttgttttatattttatttgtttttgttaatttaatatttttcgggtaattgttaaattttttgggattttagtttatttttttgaaggaaggatcgtggtatttataataaattttataatcgtgagtataaaataagaagaatagaaatattttaagtatagagtttgagggtatttaggttttgaataaaagaatggagaattaggtgagaggtaaattttcgtttttgtttaagggaggttttattttgttttgtttgagggaggtaaagtttggaggttaaggttataggatgagtgttttttttttttttttttttttttgagacggagttttgttttgttgtttaggttggaatgtagtggtataatttaggtttattgtaattttcgtttttcgggtttaagtgatttttttgttttagttttttgagtagttgggattataggcgtgtatttttatgtttagttaatttttgtgtttttaggagagataggttttagtatgttggttaggttggttttatttttgattttatgatttatttattttggttttttaaagtgttgggattataggcgtaagttatcgtatttggttatgatgagtgttttttttaaagttatttggtagttatgtttttttttaattttaggttattcgtgagtttttggattataagttatggtaggtttgtttagtttgaggttttagatgtgtgtgtttatttatatagtgtttgtttatgggatgtatttgaggaaatattagatagtttttgggtttgaagttttaggtttagtggttaggaattatttgatttaattattgtttattttttggtaaggattggtttggatggttagtagggagtttagtttttttttttaggtgtttttttgttattttcggttttgttaaattatagtatttgaagagtgaattaggatttatatttcgtaggggaggatgaattggtattattatttttggtattaaatgagttgattattggttgtttttttgtttagtaattttattttgagaaatttatttgaaaggaatttttgtttatgtataagaatagttatagtagtattatcgtaataatagaatattgtaattaattaaatgttatttaaaggaatttggatagtgtgatttatagtgtgatatatttatttaattagatattatttagtagtgagaataaataaaggataattgtatgtattaatgtagatgacgtataaaaatagtgttgaataaaaggggtaagttatagtagaatagatatagtagaatattttgtatataagtaatatatggattgggggagatatagaggaggttaaattttaagaaaaggagggtacgatgaatagaattcgggttggtagatttttttagggaggatagggtagtgatggggtgaagataagggtttttagaggaataaataaattttattttttaatttggtgttagggatataagtatttgttatttgttttagtttgggatgttataataaaatattagttattgggtggtttataaataatagaaatgtgttttttagagttttggagggtgggaaatttaagattaatgtattaatagttttggtgtttggtgagggttagttttttggtttatagatgatgttttgttattgggtttcgttgggttattttagaagggtattaattttaattatatgggttttatttttatattttattattttttaagggttttattttttaatattattttggtgattaggttttaatatatgaatggtggggtgatataaatatgtagattatagtatttattattagtttataagtagtataaatatttatttatttatttatttttttttttgagatgtagtttcgttttgttatttaggttggagtgtagtggtacgatttcggattattgtaagttttgtttttcgggtttacgttatttttttgttttagcgtttcgagtagtggggattataggtattcgttattacgttcggttaattttttgtatttttagtagagatggggttttatcgtattagttaggatggtttttattttttgaattcgtgatttatttgtttcggttttttaaagtgttgggattataggcgtgagttatcgcgttcggtagcgtataaatatttatatatttttttttatgtgtaaatttgtgtaaattgtttgtaagataataaaaatgatttgaaagtgagtgagggtataatttgtttgttaggtttaaagttaaaaggttataggattataggtggtggttttgtttttttaggaaaatggatagatgtttaaaagttgtttaaggtatgtagaagtggatgttataggagtttattgagttatttaagagatagtatgttatggtttgaatgtttgttattttcgaaatttatgttgaaatttaattttcgatgtggtagtattgagaggtggggtttttaagcggtgattgggttatgaaggttttttttttaataatggattaatttatttatagattaatgggttattatgggagtgaaattagttaggttttataagaaaagaaaaagatatttgaggtagtatatttagttttttattatatgacgttcggtgtcgttttaatattttgtaaagtttttattagtaagaagggatttgattttggattttttagtttttagagtagtaagaagaaaattttttattatataaattgtttagttttaggtattttgttataagtaatagaaaatggattaagaaatatttagttatttttttttcgaagttgttttcggtatttaagaggaaacgttaaagacgtagtttcgttatatttttttattaaatggattaagatatatttagttatttttttttcgaagttgtttttagtatttaagaggaaacgttaaagatgtagtttttgttatatttttttattaaaaaatataggttgtttcgtggaattagagttttttttagtttttaggtaggtaaggttggggttgggggttgtggggttgtgtttttaaaagtcgtttttgtggatttttggttttgttgagtagttagatttgagaattaatgattaggtattaaatatgttgttttatgtggtggttattagttttcgtggttattgagtattagaaatgtggttaatgggattgaggatttggatttttaattttatttaattttaattatttgaggtgataataaagtaataaagttattaggagttttttttttttttttgagacggagtttcgttttgtcgtttaggttggaaggtagtggtgcgatttcggtttattgtaatttttattatttttcgggtttaagtaattattttgttttagttttttgagtagttgggattataggtgagtgttattatatttagttaatttttgtatttttagtagagacggggttttattatgttggttaggttggttttaaatttttgattttaggtgattcgtttattttagttttttaaagtgttgggattataggtgtgagtaattatatttagtttaggagatatttaagtgtgtttggaataatttgattatgtgaatttttatttttaattgtgaattttataaaagtaaatatagatagagtatttatttagaaattgtgaattgagatatgttggaagtatatgagtacgaaaagagtatgtaagatattttattattgattttttttgtatgttatagaattttttaaaattttggtttattgtaatttttgttttttgggtttaagtgatttttatgttttagtttttcgagtagttgggattataggtatttattattatgttgagttagtttttagtagagatggggttttattatgttggttaggttggttttgaatttttgattttagatgatttattcgtttcggttttttaaagttttgggattatagtcgtgagttatcgtgtttggttttattattgatttttaaaatattgattatatgttggaatgataatattttgtatgtattaggttgaataaatatattgttgaaaatgatttttttttttttttaattagaaaatgtagaattatgtgtgtggtttttattttgtttttgttgaatagttgttttagaagtagatgtaaggggtggagaaaagggtggggaagaggtttttaagtgaatttagtttttgatgaattttggagattagggggagtttagggttaatttaggatagttagggttttaaaataattaaataggatggtggttttagttgttattgttatttatttaattttttaaatatttaagatgtgtaagggaattatggaatagataggttaaataaatgtgattaatttagtatagaaaaaaagaggtttagttggtgatagaggttgttaattatttatttagaaatttagtgtttattttttgggcggtagcgttaagttgggtgtgtttgttagttaatagtttttaatagttattaggtattatttaaaaaattgtattattttttgttatttttttaaattaaaaattttgttgatggttagacgcggtggtttacgtttgtaattttagtattttgggagggcgaggtgggcggattatttgaggttgggagttcgagattagtttgattaatatggagaaatttgtttttattaaaaatataaaattagtcgataattttagttattcgggaggttgaggtaggagaattatttgaatttaggaggtagaggttgtagtgagttgagattgagttattgtattttagtttgggtaataagagggaaattttgttttaaaaaaataaaataaaatataattttgttgataatttatgttgtttatataggtaggggtggaagtttaatacgtggtagtttagatagtgtatagaagttaagtaataaatgtttgtttttttagaggagatttaaggattattatggttatatttgtttatttttttagagatgttgggaaatttattttattttttatttttatttattattattattttttgagacggagttttgttttgtcgtttaggtcggagtgtattgggcgattttggtttaatgtaatttttgtttttcgggtttaagcgatttttttgtcgtagtttttggagtagttgggattataggcgcgcgatattacgttcggttaatttttttttattttttttttttttttttttttttttttttttttttgtattttttagtagatattgggttttattatgttggttaggttagttttgaatttcggattttaggtgatttatttttttaggttttttaaagtgttgagattatgggtatgagttatcgcgttttgttaggaaatttattttttaagttttaatttttaagtattggtaattaattttaaagtttttttaaatataatgtgggttaaataatacgtgtgggaagtttaagtttaaagtataaatttcggagagtaatataaatatggtttggacgtggtttgttttttttattttttttaatatatgcggcgtattagttattttgaagggattttttttcgtttttttggtttttgtttagacggtttttttttcgtgaaatattttttattatttttttggtatttttaagatttttattaaatattatgttttttttttgaggaattttttttatttttatagttattttttgggttttttttttttaagtcgtggcgtaattgggttagatatttttttgtattttttaaaggaagaaaggggaattaatttgaagttttgaagattttatttatgttatttttatttaatttttatattaggttcgtaaaatgggcgttatttttattttttttttatagaaaataaagttacgttttagagaggttaggggaattttttaaggttatatagttttgcggagtggggtagaatttggaataaaggtcgggttagtttttaaaagttagggtttttgttgttttagttattttgtagttttgaaagttttatttcgttttaggaaagtatttcgtttaaaaaaatttagttttgaaaatattaggtgtgcgcgcgttcgtgcgcgtaaatatatatatataatatatacgttatatatagatatatatagatatatatattatgtgtatgtatatattagtagatattatttattaatattattgaaataagttatcgtagagaagtgataagtatggagatagtcgtatatttttcggaatcggttttttttattagtttgttttgttttcgttcgtgttttgattcgtagtcgtatcgtaggataaaatgtttttttttttttcggaaagtagaagttagtgtaaatgtaatcgggagaattagagaagggagttgtaaggtcgttttcgtcgggtcgttttgagaaggagcggggtgagttagtttagcgcgcgtattcggagcgatttcggcgtgcgcggcgtttttttgcgtaggcgtgcggcgtgcggttcgcggcgtgcggttcgcggttgttttcggcgcggatatttattgcgcggcggggcgtgtaggtcgtatcgatgtcggtgcgtaggttacggcggtcgtagagtggggttaattttgtcggtcgcgggattcgggtgagggtttgggtttgggttgggttgggtgacgttaggaggtcggttattgcgcggcgttcgagagtttatatgttgtttcgggtttgtcgttcgtttcgttttttagcgttgggtgttgcggcgatttttggtggttattggtcgtaggtatttttttgtgggggagtagttagaggttagattttaggaagaattttttagtttagtattattcgtgtatttaataaaaatggagagtttgttttgtgtaaagtacggagtgtaattaggatttttgatttaagggagattgtagtttggtggttcgtcgtttttaaaattttaaataggaggaatttgggagttgttgttttgttgggaagtgggtgtatgtataaattgaggttgtttggtcgtcggtatgggtttatagtagttgggtatgtggggttaggagacggatgttttgtgtaaatttgtattttgtttattttttagttgtgtgattagagggtaagttaattaatttttttgtgttttgtttataaaatgcgttttataaaagtttttattttataggattgtggtaaggataaaatgagttaagttttgtaaagttttttttggatagggtatgtttttgttaagtgtataataaatattgttaatagattttattgattgattgattgattgagacggagtttcgttttgtcgtttaggttggagggtagtggtgcgatttcggtttattgtaagttttgtttttcggttttacgttatttttttgttttagtttttcgagtaattgggattataggcgttcgttattatgtttggttaattttttgtatttttttttttttttagtagagacgggttttatcgtgttagttaggatggtttcgatttattgatttcgtgatttattcgttttatttatttgtttgtttgagatagagttttattttgttgtttaggttggagtgtagtggtgtggttttggtttattgtaatttttttttttcgggtttaagtagtttttttattttagttttttaagtagttgggattataggtgtgtattattatatttagttagtttttgtattttttgtagaaagggggtttcgttatgttgtttagggtggttttgaatttttaggtttaaacgatttgttcgtttgggttttataaagtgttgagacgataggcgtgagttatcgtgttttgtttattgttgatagattttaaaagagaattttatttttgttatatattataaagggatgtaaattgtgaaagttttttttatattttatatatgttttagaggatgttaaatgtgagtcgagtgtggtagtgtatgtttgtgattttagttatttaggaggttgaggcgggaggattatttgagtttgggagtttaaggttgtagtgagttatgattgtgtttgtgaatagttatagtattttagttcggttattatagtaagatattgttttaaaaaaaaagaaaatgttagttgtgtatattttttatggtagagaagatgggaaggtattaaagtttttttaaagttattttgtgaatcgtgaagagagatatgtttatatatttaggatgttaaatgataagtgttaagaggaatgtaaattaataggtgtgagtgttgagtgggagatttatatagagttagggatgggggaattaaggaagtatttatggaagaagtggtgttggtatagggtttttaaaaatagggtggaggaggtgggatttgattgtttattaaagaggtggtttagggtattttggatgagagatatttttttgtgtttaattaattttaggtagttgtttaaatattgttatgtatatgttaggtttggagaaattattttttttttgtaaagtatttggagatgtttttgattgttataataggtagttgtggggtgggtatgttttattggtatttagtaggtagaggttagggatgaaatattttgtgatgtgtaggatagttttttatttgtgtaataaagaattatttagtttaaaattttgttaagattgagaagttttttttgaaattataaagggagagtttataggtattaaagggtagtgtttttattgttagttatggttttagattttgttatattaatagtgaggtttttttttatattattagaattgtattatatatttagagagagaaagttgtattattagttattattattattattatttgagatagagttttgttttgttgtttaggttggaatgtagtggtgttatttttgtttattgtaatttttattttttgggtttaagagattttgttttagtttttagagtagttgggattgtaggtgtttattattacgtttggttaatttttgtatttttagtagagatggggttttattatgttggttaggttggtttcgaatttttgattttaggtgattcgttcgtttcggtcgtttaaagtgttgagattataggcgtgagttatcgtattttgtgttatattattattagttagtatgtttagtaagttttggtatagaaaggttattagtaaatgttttagttttttgtaaagttgatattattgttttatttttttggttaaagaaatagatatagaatagtatattagagaagacgaaggtttcgtaagaatttgtttttttttatttttttggaggtagttaagaggaattaggtatatttggtaagaagttggggtatcgtggcgtgggtaaagatgttgagggattttgtggtatattgtagttgttttttttttggttgtttttagttttaagtaggtagattttaatagttgttaggttatgggtaggggaggatattattagaatttttttgttttgttattaggatattttgataggatttattagagggttatgattattaaatgtggtcgttgggttagtagttttagtattatttggaaatttgttagaaatataaatttttaggttttattttcgatttattgaattagaatttttggggttttaaggtttagtaatttatggtttaataagatttttaggtgattttaatgtgttttaaagttttagaagtattgtggtagtataggttttgggtaaaattgtgagttaagttagtgttattagggtgattattttaaatttaaaaatttaaattttaaatgtgaatttaattatagttttttgtttttattattattaagataaattttaatttttttagtatgatagaggaagtttttttgtttattttagtttttttagcgtttttattatttttttttgtatattttattttgtatattgggaggtatttagatatttttgtttttttaagttatttgtagtttttagaataagtgatgttttttttttttttggttattttttatgttgttttttagttttttatttttttgtttggtatggaagattggattttttaaagaaggttatattaatatttgttatatgttatatgttgtttgggattttgatatttttgttatttagggatgttatttattttttttttttcgaattcgggtttgggttataattattttaattaatagggtattgtagaagtgttgtttggtgatttttaagtttaggttataaaaatgatgtattttttttttaatttttttttttttttttttttttttttttgggtttttgtttgtttgaaatagagttttattttgttatttaggttgaaatgtagtggtgtggttatagtttatagtagttttgattttttggaattaagtgatttttttgttttagttttttaagtaattgggattataggtgtgtataattatatttggttgatttttaaaattttaaaaatttttggtagagatagagttttattatgttgtttaggttggttttgaatttttgaatttaagtaattttttattttagttttttaaattgttgaggttataggtgtgagttattgtgttcggtattttttttttgggatgttgatattgaggattagttattatgttttgaggaaatttaaattagttaaagtagagaaataatgtagagagagttgaggtttttttagttaatagttagggttaattagtagatatgtaaatgagttattttttagataaattttagtttttagttttttagttttttagttgaatttttagatattatggagtagaaataaggtatgttttatgtgttttatgtgaattttaggtttatagaatttttgggtagaaaagatgtttttatagttttaatttagtatgttttaggtaatttattatatagttatagtaatcggaatatggggttattttttttatattttgtaggatttaatttaaatgttagaggtgattttttttagaatttttttatgaaattaaatttttatatttttataggtgtgttttaggtatttttttttgtttttatagtttgtaatgtaattgttagtttttttgtttatttaatatttttgatatagatattttattggtgaatgagtgatattttttgttggttttttgtttttttagtagtaattattgttgttaagggaatggggtaatataattggttagtttagggatagggtatattatttgatgaagggtagtgagaaattttgtaggatattaaaataaaaataaaataagataaaatttaattttttatagatgattaaattttaagtttttaaatttttatttatttttgtttagttttgggttttagtttagtgttatgatttagtgtttaaagatttaattttttgttaggaggtgattttaattttggggaaaagaaattttattgtatttgtttggattgattggtaagagagattgataaaaggatgttttttgatatttgttaagggtaatttttttttataatgagggaagagaaatagttgtttgttttaggagattgattatggtattagagttaaatttatattttggaatgtaatttgatatattattttaatattaatatagattaaatttataagatatttagtaaagtaattaataattttaaagttaataaatattaaatatgtgaatgatgtagataatgaattaattattgaacgttttagtggttagaaaaaaggaggtttggatttattttttgagagtggttttttttagggttttttgggtagtgtgtgatagtttttgatttgtgatttgatagattaagggagttttaggtagaggttttttttttgtataaaaatattttttttgtttattgttgaggggataagaggaaagaagtatgtgatgtatttgaaatatagtttttagagagttatttttgttttaattaaggaatttgtattaatatgtttaatgaaattatttttgtaaaggttatgatagtgagagaaatttagtttggttgattttattttgtttttagttttataggttggttgtttttatttatttttgggtatataataaaggttacgttaagttaattgtgggaggaatttagtgtatagttttattttgaagtaagaat

SEQ ID NO: 719 - DNA, 7384 bp, Artificial Sequence
  chemically treated genomic DNA (Homo sapiens)
tttaatgaatggaatggtgtttggaataaagataattatagggttaaaaggtttttttttggaggtagggtatagaattttgttgtttgattggaataaaataaaattaattaatattttttgtaattagtggtttttgatttagtcgtttattaatatttattaattattataattttagttttattttttttatttttttttttgttattataaaaatttgtttattttttttttgttagatttatatgtttttttttttttttttttatttaaataattggatattaatttagtatatatagtttaatttattcgaattttatagaatttattgtttttatttatataatttatataattgttaagttgaaattatttttaaatttttttaatttaaaattttaatttaatttaataatatttatttatttattaattaatttattttgaaaataattttaatttgtattttatatttaggggtatatgtgttagtttgttatatgggtatattttataatgttgagttttggggtatgaatgattttattatttagatgttgatttggtatgatttgattttgtgtttttatttaaattttatgttgaattgtaatttttaatgtagggggaatgatatggtgggaggtgattagtttatgagggtagattttttttttgttgtttttagatggtaagtgagtttttatgatatttgatggtttaaatatatggtaaattttttttggtttatttgtttttttttcgttatggtagaacgtgttttgtttttttttttattatttgttatgattataagttttttgaagttttttagttatgttttttgtatagtttgtggaattgtgagttagttaaattttttttttttataaattatttagttttaggtagttttttatagtagtgtgagaatagattaatatatgagtataatatttaataggtagttttttaaattttgttttttttttttttttttttagtagtttcggtgtttattttttttatttttatgtttatgagtatttagtgtttagtttttatttataagtgggattatgtggtattttgttttatgtttttgtattaatttatttaggataatggttttcggttgtatttatgttgttttaaaggatatgattttgttatttttatggttgtatagtatttcgtggtgtatgaaatggtttggaaggtggtttttataaattttatgatgaaatgtaatttttagtgttggaggtggggtttggtagggttatggggatggattttttatggtttgatgtcgtttttgtgatagtgaatttttttaagatttggttgtgtaagggtgtgtggtatttatttttatttttatttttttttgttttttttcggattatgtgatgtgtttattttttttgtgttttttattatgagtaaaagttttttggggtttttataggcgttatgtagatgttattattatgttttttgtatagtttgtagagatgtgagttaattaaattttttttttttataaattatttagttttaggtatttttttatagtaatgtaagaatggtttaattatattgtgtagatgtattatattttattgatttaatttattgtcgatgggtatttaggttgattttatgtttttgttattgtgaatagtgttgcgatgaatatgtaagtgtatatgtttttttggtagaataattgattttttttgggttatatattagtaatggaattgttggtttgaatggtaattttattttaaatgttttgagaaatttttaaatcgttttgaatagtggttgaattaatttatatttgtattaattatgtgtaaatgtttttttttttttatagttttttaagatttgttgttttttaatttttgaatagtagttattttgattggtgtaggatggtatttcgttttggttttgatttgtatttttttgatgattagtgatgttaagattaatttttgttattaaaaaattaggaaaatatagtgttatttgttaaaataaattgttttattttgttttaaaaataattaattgagtagtatattttttttagtaaaattaagaagtaaatatttagaattgtatagtattttgttgttaagttttcgtataagtatattaatcgaatataaaggttattttaaatttttatttgaaatgaaagataatttttaagaggttaagggttagtaattttttaaagttttgaagttaaattagtttaagtaaatgtaaagatttttttttaattaaagatttttaaatgaatattttaaagtatagttggttttttttttaaattttgtttaaagttattgtttataatttagtatattaaagaaggttttagatatgattgtgaagtttttttaatttatagtgtgttatttgtaattttagatgttattattttggtttttttaatttttagtaataataagtatattttttttattttttttttattttgatttatttttttttttatttaatatataattttttttagagtgtttttatatatttttaattgtaaatatgataaaagtatatagtatagtatatttattatatgtataaatgttgtatttagttatataattttttttttaaaaaagaaatattttatttttaaaaagtaaagattttaggaattttttttagttgttagttataaaaatataaatttttggttagttttttaaatttgtttgattataagaattatttgtgatatttgttaaatatatgtatgttgagttttatttatgattttttgaattagaattattaggtgagaggtttgggaatatatattttaaataaatgtttatagtgattatgattagtaaagtttgaaaaatattttattaggatttttatgattgaataattttataaatataggaaagttattggaaaaaaatatgagtagaattttagaattttgtttttgttgaaagtgtttgttttttttttttttatttattaagatttgattgtttatgtaatttttttaaattattaatgggaagagttgaaaatgattttaatgaagaagaaaagttgatgtttaattttaaaattgacggtttgaatagaagggagaggtatgaatttattttgattttaatagaaagtattgtatttgggtttataaacgaaattggttttatttttattttttgtaagttttcgttaaattttgtgtatatatagaggttgggtaagaaagaaagaaatttagaaatacggtatatgttattttttatttatttttttatgcgattagttaatagtttttttatttagtttttgttttaagttgatttttagtttatttttttatcggaaatggagtttttttaaagattgttttaatgttagttatttagaggttttttttttattttgggtttttaaatttttatgatattaaatgatattattttttttggaaattttttttagttttgatttttataatttaattttgttttatttttttttttatagttttttttttttttatttttttattgtagatatattgtacgattttgtttttgattttttgatttttttatatttatttttttagagtatgtatttatttttttggtgttaggttttttgattatttgattattattattatataacgatgttggtgatgagtatagttaatatattttaggtattttttatgtaggttataataagtattttatataattcgtattatttaattttttaattttaaatgatattattattaattatattgtatgagacgaggaaatagatttttattaaaattttggaaagttaacgtgaggagtttttgtgtgttttttttgttaatgatttcgggtattatggtatgtggattgttatggaatggggattaggaagcgtagtattgtgaaaatattagaaaatacgttgatagcggtaaggacgtttatttttgtatattgtgacggttttgtttttgagttaggtttgagatgagttaattttgattttatggtgttattagggattacgaatttaataagattttcgtggatgtttggaatttaattggtttcggttttttattttagggaaagagttatagtttgagtggggtggttttggtgttatatacgcgattaataatatttatcgttgtagaggaattatcgtggattatttttttttttattttatgtttttgcgatggattttttttatttgtttattgattttatttaaattttttagcgattataggatttcgatttgttttttttattttggtttttttattttgttttataggtttggtttgttcgttgttttttatattagcgttgtacggttttttttacgttttcgttttgttttttttattagataggattagttttttttatttttgtcgggtaaatgtttgtttagtttttaagattttttttagatgtcgtttttacgattaggttttttttagatttttgagtttgtaatacgggttattataattttttattttagtttatatttttatagtattcgcgacgttcgcgatttttaatatggcgttttatttttttttagggtattttttgtttgttttttgtatatatagtcgcgcgaggcgtagttttgagtgatttacgtacgagtggttcgcgtttttagtcgcgtcgtcgtaggttagcgagggtagtttgagtcgtttttcgtttcggcgaggatcgtcgttagttcgttgttttagtaggaggcggttttatagcgtattcggtagtttagttatcgttagtatcgcgtttcgggcgggtttttttttttttcgggaggcgcgaatttttaggggttttttgagagggcgttagggagtagttgcgcgcggatgttttttggttttttgcggtcgtcgtagtttttcggtagaaattcggaagtggaattttgagttatttagcgtttgggtgaagacggaggcgggttttatagagacgtaggttgttagggagtgtttatttcgcgttcgtttttgttttttcgcgtttttgtgttgtttcgatttatatattcgtttagaatcggttttagttttttcgcgtagaagtttttcggagttatggtcgagtatttttacgtgaagtttattaagttcgtgtttaagggaattaagacgaagaggtgggttttgtagtttgggcgggagtttttttcgtttttttcggacgtattttattttcgtaatttcggtggaagtcgtggcgcggagagtcggttttgtggttttttaggtttcgttttggtttttgttcgggttggacggaggtcgggtcgcggttttcggcgtttgtgtagagaggggtagtttttcgcgcggacgattttggaaataggatagacgggtaggtgattcgtgatttcgtatttacgagtttgggttttttgaggtatttttttaggtttttgtttggggggtttgtattagtttgatttcgtagtttatgataattttttttattagggattattattttttttattgttttttttttttttagaaaatttattaattttttttaatttaatatgtatagtgaaattaggatgaattatatagtggttgaggtgtatatgggttttagggatatgggttcgaatttgtatttttgttatttattagttttgtaatttgtggtaaattggttaatatgtttgaatttttatttatttattaagagattaaatatttgaattttcgtttatatatttatatttttagacgttttttatatttttagaagattgtgaggattaaatgagagaatatatatgtagaaaataaattgagttaaatgtgaggaggaggtcgtaatggtaatttattagttttttaggaaaaaatatttgtgtatttatattttcgttttttttttaattggtagatttgttcgaggtatatataaatgtcgagtatttttttttggttttcgtgataaatagaggttttgatatttttaggcgagatagaaagtattaaggagtgagttgaagttattggttttgagaattttttcgaggagtttggttttatgaagatgttagaataaatggtaggtttattttgaatgaatgtgagatttttattttgtgaattttttgggaggagaggagagttattttttgaaaattttataatgaaaatgtagatacgggtgttttaagattatcgtaataattataattaatgtttatatagtattgttaatgtgttaagaaattgttgtaggtattttgtatattaatttttttttaaattatttttggttttttatttttttattgagatataatttataattataaaatttatttttttgtatagttaggggtttttagtatatatttaagaggtttattattgtttagttgtttagtatttttattattttagaaggaaatttttttttatttattaaagtagttatattttatttttttttttttttagtttttggtaattattaattcgttttttatgtgaaatcgtttattttgaatattttttaagaaattatgtaatatgtggttttttgtatttggttttttttatttataatattattgaggtttattattgttgtagcgtttgtttttttttatggttgtatagtattttattgtatggatgtattattttgtttatttatttattaattgatgaatatttgggttgttttttttttttggttattgtgattaatgttagtgtgaatatttttatgtaagtatttttgtgggtgtatgtttttattttttttgggtatatatatttaggagtaaaattgttgggttatgtggtaattttaattttttgaggaattttaaattgttttttgtagatgttgtattattttatatttttattaggaatgtgtgaaggtatatattattttttaatttttataatagttttaagagttaggttaagttattattttaattttttaagtggggaaattgatttagagagatttagtattttttttaaaaattacggagttaagaagtgaaagaattaggatttaaaatttggtagtgtggttttataatttgttttgaattttaacgtaatatgtgtaaagtttgaagtaattttttagtattgtatttaagagggtatattaatgtaagtttttttaaattaataatttataaatgaaatagtttaaaagatttttaagttttaattttataatatttatcgtataaattaatatatttaaattcgtttatataaattatgttttgtagt

SEQ ID NO: 720 - DNA, 7384 bp, Artificial Sequence
  chemically treated genomic DNA (Homo sapiens)
attataggatataatttatatagacgagtttaggtatattgatttgtacgataaatattgtaagattgaaatttgaaagttttttaagttgttttatttataaattattgatttaggaagatttatattgatatgtttttttaaatatagtattgagaagttgttttaggttttgtatatattacgttagagtttaaagtagattgtagagttatattgttagattttaaattttgatttttttattttttagtttcgtgatttttggaaaaggtattgaatttttttgagttagtttttttatttaaaaaattaggatagtaatttaatttaatttttaaggttattgtgaggattaagaggtaatatgtatttttatatatttttggtggaaatgtaaaatggtgtagtatttataggaaatagtttggggttttttaaaaagttaaagttattatatgatttagtaattttatttttaagtatgtatatttaagggaaatgaaaatatatatttataaaaatatttatataagaatatttatattagtattagttataatagttaaaaaggggaaataatttaaatgtttattagttgatgaatggatgaataaaatgatatatttatataatggaatattatgtagttataaaaaggaataggcgttataataatgatgaattttaataatgttataagtgaaaggagttagatataaaaggttatatgttgtatgattttttaggaaatatttagaataggcgattttatatagagagcggattagtggttgttaaggattaggagagggggaggatgggatgtgattgttttaatgggtagggggagatttttttttgagatgatgaaaatgttgagtaattagatagtggtgaattttttgaatatatattaaaaatttttgattgtataaaagggtgaattttataattatgaattatattttaataaaaaaataaaaaattaagagtgatttgaaaaaaagttaatgtgtaaagtgtttataataattttttggtatattgatagtgttatatgagtattaattatgattattacgatgattttaagatattcgtgtttgtatttttattataaagtttttagaagataatttttttttttttttaggaaatttatagagtaaaaattttatatttatttaggataaatttgttatttattttggtatttttatgaggttagatttttcgagagggtttttaaggttagtggttttaatttattttttgatattttttatttcgtttaaaaatattaaaatttttgtttattacggagattaggaggaaatattcgatatttgtatgtatttcgggtaaatttgttagttaaaaaagaagcggggatatgagtgtataggtatttttttttaaaaagttaataaattattattacgattttttttttatatttggtttaatttattttttgtatatatgtttttttatttaatttttatagttttttaaaagtataaaaaacgtttgaaagtataaatgtgtaaacggaggtttagatatttgattttttaatgagtaaatggaagtttagatatattaattaatttgttataaattataaaattagtaaatgataagagtgtaggttcgagtttatatttttaaagtttatatatattttaattattgtgtgatttattttggttttattgtatatattagattagaaaaaattaataagttttttagaaagaaaagagataatggagaaaataataatttttaataaaggaaattattatgaattacgagattagattaatgtagattttttaggtagaggtttggagagatgttttaggggatttaaattcgtgggtacggggttacgggttatttgttcgtttattttgtttttagggtcgttcgcgcgggaggttgtttttttttgtatagacgtcgggaatcgcggttcggttttcgtttagttcggataggggttagggcgaagtttgggaggttataaagtcggtttttcgcgttacggtttttatcggagttgcgggggtggagtgcgttcgaaaagaacggaggaggttttcgtttaagttgtaggatttattttttcgttttggtttttttgagtacgagtttggtagattttacgtaggagtattcggttatggtttcgggaaatttttgcgcggagaggttgaggtcggttttggacgagtatgtgagtcggggtagtataggggcgcggagaaatagaagcggacgcgaaataaatattttttgatagtttacgtttttgtagaattcgttttcgtttttatttaaacgttgaatggtttagagttttattttcgggtttttgtcggggagttacggcggtcgtagagggttaaaaggtattcgcgcgtagttgttttttggcgtttttttaaggagtttttgaggattcgcgtttttcggaagggagaaaagttcgttcgaggcgcggtgttgacggtggttgggttgtcgggtgcgttgtggaatcgttttttgttagagtagcgggttggcgacggttttcgtcggggcgggaagcggtttaggttgttttcgttggtttgcggcggcgcggttggaagcgcgggttattcgtgcgtgggttatttaggattgcgtttcgcgcgattgtgtgtgtaggaaataagtaggaaatattttaaaagagaatgaagcgttatgttgagggtcgcggacgtcgcgagtgttgtgggaatgtgggttgaggtggagagttatggtagttcgtgttataggtttaggggtttgaaagaagtttaatcgtggaggcggtatttgaggagggttttgaaggttgggtaggtatttgttcgatagagatggaggaagttagttttgtttgatggaggaaatagggcggaggcgtggagggagtcgtgtagcgttggtgtgaggagtagcgagtaggttaggtttgtaaagtagagtgagggaattaggatagagaaggtaagtcggggttttgtggtcgttgaagaatttgaatgaaattagtaaataggtgagagggatttatcgtaagagtatgggatgaaaggaggagtagtttacggtgatttttttgtagcggtgggtgttattaatcgcgtatgtgatattaaaattattttatttaagttgtggttttttttttaaagtagaaaatcgagattagttgggttttaagtatttacgaagattttattaaattcgtgatttttggtggtattatggagttaggattggtttattttaaatttgatttagaaataaaatcgttataatgtgtagagatgagcgtttttatcgttattaacgtattttttggtgtttttatagtgttgcgttttttaatttttattttatggtaatttatatgttatgatgttcggagttattaataaaggagatatataggggttttttacgttggttttttagggttttgatgaaaatttgttttttcgttttatataatgtggttagtaatagtattatttagggttgaagaattaaatggtacgagttatatagggtgtttattataatttatatggaaaatgtttaggatatgttagttatgtttattattaatatcgttatatgatggtaataattagatagttaggaagtttgatattaagaaaatggatatatgttttgaaggaatgaatgtggagagattagaaggttaagaataaagtcgtataatatgtttatagtaaagggatagagaaaagaaaggttataaaagaaggaatgaaatagagttaaattatagaaattaaagttaaggagaatttttagaaagggtagtattatttaatattatagaagtttaggagtttaagatggaaaaaaggtttttgggtaattgatattgaggtagtttttggggaagttttattttcgatagagaagtagattgaaagttagtttgaagtagggattaggtgaagaagttgttggttggtcgtatggggaaataaataagggatggtatatgtcgtatttttggattttttttttttttgtttagtttttatatatgtatagagtttggcgaaaatttataaaaaataaaaatgaaattaatttcgtttgtagatttaaatataatgttttttgttagaattaagataaatttatgttttttttttttatttaaatcgttagttttgaaattaaatattagttttttttttttattaaaattatttttagttttttttattgatggtttgggggagttgtataagtagttaggttttgatgagtagaggaggagggaataaatatttttagtaaaggtagaattttgaaattttgtttatatttttttttagtaatttttttatgtttgtgaggttatttagttataaagattttagtgaaatgttttttaagttttattaattataattattgtggatatttgtttaaaatgtgtatttttaggttttttatttggtgattttgatttaggagattatggatgggatttagtatatatgtgtttgataagtattataagtggtttttatggttaggtaaatttgggaaattaattaggaatttatgtttttatgattggtagttagaaaagatttttagagtttttgttttttgaaaataaaatattttttttttaaaaggaaaattgtatgattagatatagtatttatatatgtgataaatgtattatattgtgtgtttttgttatatttatagttaaagatgtgtaagaatattttgagaaaaattgtatattaaatgaaaagaggggtaagttagggtgggggagaaatgagaagggtgtgtttattgttgttaaaagttagaaaagttagaatgatagtatttaaggttgtaaatagtatattgtaagttgagggagttttataattatgtttgaagttttttttgatatgttgagttgtaaatagtggttttggataagatttgagggagaaattaattatgttttaaagtgtttatttaaaagtttttaattaaaggaaagtttttgtatttatttgagttaatttaattttaggattttaagaaattattagtttttaattttttaaaaattgttttttattttaaatgaaagtttaaggtggtttttatgttcgattggtatatttgtgcgaagatttaatagtaaggtattgtataattttaaatgtttattttttaattttgttggaagaaatatattatttaattgattatttttaaagtaaagtaaaataatttattttgataagtgatattgtatttttttagttttttggtggtaaagattagttttaatattattaattattagagaaatgtaaattaaaattaaaacgagatattattttatattagttagaatagttattatttaaaaattgaaaaataatagattttgggaggttgtggagaaaggggaatatttatatataattggtgtaaatgtaaattagtttagttattgtttaaagcggtttggaaattttttaaagtatttaaaatagaattattatttaagttaataattttattattggtatataatttaaagagaattagttattttattaaaaagatatatgtatttgtatgtttatcgtagtattatttataatagtaaagatatggagttagtttaggtgtttatcgatagtggattggattaataaaatgtggtatatttatatagtatgattaggttatttttgtattgttatgaagaaatatttgaggttgggtaatttataaggaaaagagatttaattggtttatatttttgtaggttgtataggaagtatggtgatggtatttgtatggcgtttgtggaggttttagggagtttttatttatgatggaaggtatagagggagtaggtatattatatggttcgaggaggagtaagagaaaatgggagtgggggtaagtattatatatttttatataattagattttgaaagaatttattattataaggacggtattaggttatgagagatttatttttatgattttattaggttttatttttaatattgaggattatattttattatgagatttataggggttattttttaaattattttatatattacggaatattatgtagttataaaaataataaaattatgttttttgaaataatatggatgtagtcggaggttattattttaagtgaattaatgtaggaatataaaataaaatattatatgattttatttataagtgggagttaaatattgggtatttatggatataaagatggaaagaataaatatcgggattattagaggggagaaggaggaaggtaaggtttgaaaaattatttattgggtattatgtttatgtattaatttgtttttatattgttgtagagaattatttgagattgggtaatttataaagaaaagaggtttaattgatttataattttataggttgtataggaagtatggttgggaggttttaggaaatttataattatggtagatggtgaagggggaagtaaggtacgttttattatggcggaaggagagtaagtgagttaggggggatttgttatatgtttaaattattagatgttatgagaatttatttattatttaagaataataagggggaaatttgtttttatgagttaattattttttattatgttattttttttatattgggaattataatttaatatgagatttgggtggggatatagagttaaattatattaaattagtatttggatgatgggattatttatattttaaaatttagtattatgagatatatttatgtaataaattggtatatgtatttttgaatgtaaaatataagttaaaattatttttaaaataaattaattaatgaataaataaatattattaaattaaattaaaattttgaattaaaaaaatttgagagtgattttagtttgatagttatgtaagttatgtaaatggaaatagtgagttttgtaaggttcggataaattggattatgtgtattaagttgatgtttagttgtttggatgaaaagaaaagaggagaaatatatagatttaataggaaaaaaatggataagtttttatgatagtaaaaagaaaaatggaggaaataggattgagattatagtgattgatagatattaatagacgattaagttaaaagttattggttgtagaaaatattgattaattttgttttattttagttagataataaaattttatgttttgtttttagagaaaaattttttagttttgtaattatttttattttaagtattattttatttattaag

SEQ ID NO: 721 - DNA, 6063 bp, Artificial Sequence
  chemically treated genomic DNA (Homo sapiens)
gtatatatatattatagattttatatatataaatatatatatatgtataattttatatatatatatatatatatatatattttattattattattattatatttagttaattaaaaattttttttttgtagagatgagggggttttattttgttgtttaagttggttttaaatttttggttttaatttaagcgatttttttgaagagttgggattataggggtaagttattatgttaagtttgaaatttttttttttttgagatagagttttgttgttattgtttaggttggagtgtaatggcgtgatttcggtttatcgttatttttgttttacgggtttaagtgatttttttgttttagttttttgagtagtagggattataggcgtttattattacgtttggttaatttttttgtatttttagtagagaagaggttttattatgttggttaggttggttttgaatttttgattttaagtgatttgtttatttaggttttttaaagtgttaggaatatagtatgtaatttaggaggtagaggttgtagtgagttaagatcgggttattgtattttagtttgagtaataaagtgagattttgttttaaaaaaaaaaaaaggaaaaagaaatagtattgttttttaatatagaaaatttggaaaatatagaaatttataaagaaggtagggtatggtagtttatgtttttaattttaggatattaggaggtttaggtaggaggattgtttgagtttaggagtttagggttggtttggttaatatagcgagattttaatttttatttaaatatatatatatatatatatatatatatatatatatatacgtatatatatagaaagagagatagagaaataaatatttatgatgttattattttaagagaattattgttagtattttggtaaagtttttgtaatatatttttatgtaatatatatatatgtattttgtataaaattggttgtatatataagttgttttttatagttatagatatttttttatattagtagatagttttttataattttattgttagtggttgtagaagattttatggtatagtatttaaaaatgaaaatatttttttttttttgagatagtgtattgttttgttgttttggttggaatgtagtggtgtaaatatagtttattgtagtttcgatttttaggtttaagtaatttttttgttttagttttttgagtagtttggattataggtgtatattattacgttttgttaatttttgtcgtttttgtagagacgagtttttattatgttgtttagtttggttttaaatttttggttttaagtgatttttttgttttgattttttaaagtgttggaattaaaggtatgagttattgtgtttagttaaaaagaatttttttttttttgattaggtaatatgtttattgtgaaaaatttagatgaggtaaaaaatatagatattatatagtttacgtaaattattagtttattttttggaaatattttttaataatatatggaaatattaatttttagattttatatatgtatatatatattgtatatatattttaatatgattatgtatggtgttttgtgatattttttaaagtgaatatttttttatgatgatgaaaatagatttatattaaaattttaaagtttgtgtaatgttttattttgaatattatatggaggttgtaaatagttattgatgtggtattggaaatggaaagtaagagggtttaaatcgtagttttgatatttatagtttgtttgattttatatgtgttattggttgttatagggtttagttgtttaattgaaattacgaagtttatttagaagaagtagtaaagtgttggttgggttttaaatttaaatgttttcgttatgtaaggtttgaagagggataatatttattttttagagtttaggtagtatgagatgttttggtttgtgtttaagtggaattttcgtatttatatttaaaattatttatattgagaataaataaaaaatatattgaaagttaaaatagagagagagagaggagagaagagagaagagaaaaggaagagaagggaggggaggggaggataggaaaggagaggggaatttataaagaaaagtatattgggatttttatatattgttggtgggaatgtaaataatgtagttattttggaaaagtttggtaattttttaaaaggtttaaatatggagttattacgagttagtaattttatttttagttatatatttaagagaaataaaaatatatatttgtttatattaaaatatatatagtaatttttatagtagtattatttttaatagttaaaaagtagaaataaagtaaatttttattaattgatgaattaataaataaaatgatgtggtatatttatataatagtatatttgataaaaaggaatgagtagtaatatattttataatatggatgaaattataatatattatattaaatgaaagaagttaattataggttaggtgtagtggtttatatttgtaattttagtattttgggaggttgaggcggaggtagtggataatttgagtttaggagttcgagattagtttgggtaatatggtgaaattttatttttataaaaaatataaagattaggttaggcgggcgtggtgggtggtgtttgtatttttagttatttgtggggtagggggttgaggcgggagaattattttagtttaggaggtggaggttgtggtgagtggagattaagttattgtattttagtttgggtaatagagtgagattttgttttaaaaaaaaaaaaaaaggaaaaagaaaaaagaaagttagttataaaataatatatatttcgcgattttatttatattaaatatttagattaggttaatttatataggtagaaaataggatagtgattttttagggtttggggagttggggttaaatttagagtgaacgttaataggtatggggttatttttgtagtgatgaaaatgttttaaaattgattgtggtgatggttgtataaatttgtgaatatattaaaaattattgaattgtatattataaatgggagaattatatttaaagaaaattttttaagaaagtaaatgggatattataattttgaaggattataatgagatataatatagagtgttagtataaggtgtttttaataaatggtggttattatttattgatgggtatttagttgtttatattttttttatgatgattaatattttaaaaagaatattttagtttagtgtgggatggttaagagtttaaggttatagtgagttatgattgtgttattgtattttagttttggcgatagagattttgttttaaaaaaaaaaaaaaaaataggtcgggagtgaatatataggttgggtacggtggtttatgtttgtaatttcgaggtaggtagattatgaggttaggagttttagattagtttggttaatatggtgaaattttatttttattaaaaatataaaaagattatttgggtgtggtggtgcgcgtttgtaattttaattatttcggaggttgaggtaggagaattatttgaattagtaggcggaggttgtagtgagttgagattttattattgtattttagtttgggcgatagagcgagattgtttaaaaaaataataataaataaaataaaataaaataaaataaatattgtagttttagttattcgggaggttgaggtggtagtattatttgagtttgggaagtttaggttgttacgtaattacgttattgtattttattttgggtaatagagtgagattttgtttttaaataaataaataaatagaatattttgtatataataatagtgagtatttttatagtttttatttttttttagaatttttagagatgtagacgtgtttataaaatgttgtgtatattttatttttttagaatttgaaaaattgggttagtgggcgttttatgggaagtatagaatgttagtaaagtatttttttttaagtttttttgcgaaaacggtaataatgtaagtataataaggagtatttatagtattattttttaaagtttttgtttagggaaggagttttagtattaagttgttaaaatttatatttaaagtatttgttatgtttataaaattggagatggttttgttttgattttatttgcggaaatttgtatgtatttaatagaggaaaacgtggttttttgttttattaagtttgtttgattatttttaataaggcgaatttatttaaattttgttttagggtgtgaatataattatttgttttgaaaatatttagtttgatttttaaagagttaaagtggtaataggtggggagagggttaggttaaattgtttgagggggtgtggaattgtggaatttgagtgaagagaaggtttaattttttttaaaaaaagagcggggcgaaataatttggggtataatagtatgtttattttgtaggtattttttttttttagggtaattggagtttaaaaagtgggtgagaaagttattttagggtagttagtatttttagaagtttaaggttaggatgtcggagtttaggggaatgtcgatgcgtcgggtaggttgtgtttgggtagtttattttgtggtagttggaggtattattcggtcgtcgcggtgcgaattgcgggtattgtggggcggagatttaggggcgggttaataaaggtcgggcgattgtgtttggaggtaaattcgacgtagacggcggtaggcggagtttaaagtcggtgatgtagggtgcgtagggattttatttggagagtcggggcggtacgttgagattttaggggtgaagggcgggggattttaattttagttttgtttttttttttttttttttcgtttttttttcgttttttttttttttttttttttggttggaaagtttttagaatttttttttagcggtttttgcggttttaatatggcggagttgacggtggaggttcgcggttttaacggggttttttataaggtattgatcgttttgttattttgtcgagtgttttgggtgttggagcgcgtttgagggagggttggtggttttagagagtgaggtttggggtcggaaaggtagttaggttaaagttcgaggtcgttggattttttgttttttttttttttattcgcggtttaacggtttcgggggtcggggtttcgttatgttttgaaataatacgtcggatattttttgtatttttttagttatgaatttttttggttgttagtgcggtttttggcgggtcggtgggaagtaattgagtggttgttgggcggcgggagttttttcggagtaggttcgagttttgggaggtgggggagtcgtgaaaggaggcggtgggattgtgtggttttattcgttttttcgtttttcgaattgggtcgggcgggagttttttagttcgttttttcgatttttttttattttttggggcgggtgtatcgcggaatttttggaatttatttttgtatttgagttttgggttaataaatttttagtgtttgaggagaatgggggtatcggattgagggttaggattaaatatagaaaagtagaaaattttgaattgtggcgggttggaatatttttgcggtttgggaaattgggcggcgttttagtttttttattacggaagaaaaggagagttgtgagttttaaagtaagatttaaaatgcgaaatggattagggagataggtggagaggtgattaatttttttatattattgtttttgtttttggagggaggttttgttttgttttgtttttttttttacgaggttttttgtttgtttgtttgggaggaaggatatttattattatggaatcggggttgaaaaacgtaagaggaatagagtagaggaatttggtggggtatttagcgtttatatatttgaaaatgaaattttaatagtttattttttgttattatagcgtttttttttttttattttttcgaaatacgttaggttgtta

SEQ ID NO: 722 - DNA, 6063 bp, Artificial Sequence
  chemically treated genomic DNA (Homo sapiens)
taataatttggcgtatttcgggaaaataaggagaaaagaacgttatagtggtaaaaaataaattattaggattttatttttagatatgtgaacgttgaatgttttattaaatttttttattttattttttttacgttttttagtttcgattttatagtaatggatgtttttttttttaagtaaataaataaaaaatttcgtgggagaaaaaataaaataaaataaaatttttttttaaaaataggggtagtgatataaagaaattagttatttttttatttatttttttgatttatttcgtattttaaattttattttaaagtttataattttttttttttttcgtaatagaggggttaaggcgtcgtttaattttttaggtcgtaaaaatattttaattcgttataatttaaggttttttgtttttttgtatttgattttaatttttaattcggtatttttattttttttagatattaaagatttgttggtttaaaatttaaatataagggtgaattttaaagatttcgcgatatattcgttttaaggggtggggaggggtcggaggagcgggttgaggagttttcgttcggtttagttcgaggggcgggggagcgggtgagattatataattttatcgtttttttttacgatttttttattttttagagttcgggtttgtttcgaaggagttttcgtcgtttagtagttatttagttgttttttatcggttcgttaagaatcgtattagtaattaagagggtttataattaggaaaatgtaagaggtgttcgacgtgttgttttaaaatataacggagtttcggttttcgagatcgttaaatcgcgggtggaggggggagaagtaaggaatttagcggtttcgagttttggtttggttgttttttcgattttaaattttattttttgggattattaatttttttttaaacgcgttttagtatttagaatattcgataaagtggtaaaacggttagtattttgtagaaagtttcgttagagtcgcgaatttttatcgttagtttcgttatgttggaatcgtaaaggtcgttgggaagagattttagaaattttttaattagaggggaggaggggggaggggcgagaaggaggcggggaaaggggaggggaaaatagggttgggattgggatttttcgttttttatttttggggttttaacgtgtcgtttcgattttttaggtgggatttttgcgtattttgtattatcggttttgggtttcgtttgtcgtcgtttacgtcggatttgtttttagatataatcgttcgatttttgttgattcgtttttaggttttcgttttatagtgttcgtagttcgtatcgcggcggtcgagtagtgtttttagttgttatagaatgaattgtttaggtatagtttgttcggcgtatcggtatttttttgagtttcggtattttgattttaaatttttggaagtgttggttgttttggaatggtttttttatttattttttgggttttagttgttttggggaagagggatgtttataaaatagatatattgttgtgttttaagttatttcgtttcgttttttttttaaaaaaagttgggttttttttttatttaaattttatagttttatatttttttaaataatttggtttagttttttttttatttgttattattttagttttttaaaagttaaattgagtatttttagggtaagtaattgtgtttatattttagaatagagtttaggtgaattcgttttattaaaagtagttagataaatttaatagagtaggagattacgtttttttttgttaaatgtatgtaaattttcgtaaataggattaaagtagaattatttttagttttgtaagtataataaatattttgggtatggattttaataatttaatattgaagttttttttttaagtaagggttttggaaaataatattataagtgttttttgttatatttatattattatcgttttcgtagaaaaatttaagaaaggatattttgttaatattttatattttttatgaaacgtttattgatttagttttttagattttaaaaaaataaaatgtatataatattttatgagtacgtttgtatttttgaagattttgggaaaaaatgagggttgtgaaagtgtttattgttgttatgtataggatattttatttatttatttatttagagatagggttttattttgttatttaagatggagtgtagtggcgtgattacgtggtagtttggattttttaggtttaggtgatgttgttattttagtttttcgagtagttaggattataatatttattttattttattttattttatttattattatttttttagataatttcgttttatcgtttaggttggagtgtagtgatgagattttagtttattgtaattttcgtttgttggtttaagtgatttttttgttttagttttcggagtagttgggattataggcgcgtattattatatttagataatttttttgtgtttttagtagagatggggttttattatgttggttaggttggtttggaatttttgattttatgatttgtttgtttcgggattgtaggtatgagttatcgtgtttagtttatgtatttattttcggtttatttttttttttttttttaagataggatttttatcgttaaggttgaagtgtagtggtataattatagtttattgtaattttgaatttttggttattttatattgggttgggatgttttttttaaagtgttgattattatgagaaaaatgtaaataattaaatgtttattaatgagtaatagttattatttattaagggtattttatgttaatattttatattgtattttattgtgattttttagaattataatgttttatttgtttttttaaaaagttttttttagatataatttttttatttataatgtataatttagtagtttttagtatatttatagatttgtgtaattattattatagttaattttagaatatttttattattgtaaaaataattttatatttgttagcgtttattttagatttaattttagttttttaggttttaggaaattattattttgttttttatttatatagattggtttagtttagatatttaatataaatgaaatcgcggaatatgtgttgttttatgattggttttttttttttttttttttttttttttttttttgagatagagttttattttgttgtttaggttggagtgtagtggtttgatttttatttattataatttttattttttggattaaagtgattttttcgttttaattttttgttttataagtagttgggagtatagatattatttattacgttcgtttagtttaatttttgtattttttgtagagatggggttttattatgttgtttaggttggtttcgaatttttaagtttaagttatttattgttttcgttttagttttttagagtgttaggattataaatgtaagttattgtatttggtttatgattggttttttttatttagtataatgtattatagttttatttatgttgtagaatgtattattatttatttttttttgttaaatatattgttgtatggatatattatattattttatttattaatttattaattgatagaagtttgttttgtttttattttttggttgttaggaataatgttgttatgaaaattgttgtatatgttttggtatagatagatgtatgtttttgttttttttgggtatatagttagaaatggaattgttgattcgtgataattttatgtttaaattttttgaggaattgttagatttttttaaagtggttgtattatttgtatttttattaatagtgtatgagggttttagtgtgtttttttttatgggtttttttttttttttttgtttttttttttttttttttttttttttttttttttttttttttttttttttttttttttttgttttggtttttagtgtattttttgtttgtttttaatgtgagtgattttgagtatggatgcgaaagttttatttgggtataggttaaagtattttatattgtttgaattttaaagaataagtattgtttttttttaggttttgtatagcgaaaatatttgaatttggaatttagttaatattttattattttttttaggtagatttcgtgattttaattaagtaattgagttttatagtaattagtaatatatgtaagattagataagttgtaagtgttagaattacgatttgagtttttttattttttatttttagtgttatattaatgattgtttgtagtttttatataatatttaaaatgggatattatataaattttaaaattttgatgtagatttatttttattattataaaaagatgtttattttaaagaatgttataaaatattatatataattatattaaaatatatatgtagtgtgtatatatatatataaagtttgaaagttaatatttttatatattattagaggatatttttagaagatgggttaatgatttacgtaaattatataatgtttatattttttgttttatttgaattttttataatgagtatgttatttgattaaaaaaaaaaaagttttttttggttgggtatagtggtttatatttttaattttagtattttggaaggttaaggtagggggattatttgaggttaggagtttaaagttaggttgggtaatataatgagagttcgtttttataaaagcgataaaagttagtagggcgtggtggtgtgtatttgtagtttaggttatttaggaggttgaggtaggaggattgtttgagtttggaggtcgaggttgtagtgagttgtgtttgtattattgtattttagttagggtaatagagtaatatattgttttaaaaaaaaaaagatatttttatttttaaatattatattatggaattttttatagttattagtaatgaaattatagaagattatttattgatatgagaagatgtttataattgtaaaaagtagtttatatatgtaattaattttgtataggatatatatatgtatattgtatgaaaatgtattataaagattttattaaaatgttaatagtggtttttttagggtagtggtattatgaatgtttatttttttgtttttttttttgtgtgtgtgcgtgtgtgtgtgtgtgtgtgtgtgtgtgtgtgtatgtatgtttaaatagggattggggtttcgttgtgttaattaggttaattttggatttttgggtttaagtaatttttttgtttgggttttttaatgttttgggattagaggtataagttattatgttttgttttttttgtgagtttttatattttttaagttttttgtattgaaaagtagtattattttttttttttttttttttttttgagatagagttttattttgttgtttaggttggagtgtagtggttcgattttggtttattgtagtttttgttttttgggttatatgttatatttttagtattttaggaggtttaggtgggtagattatttgaggttaggagtttaagattagtttggttaatatggtgaaattttttttttattaaaaatataaaaaaattagttagacgtggtggtgggcgtttgtaatttttgttatttaggaggttgaggtaggagaattatttgaattcgtgaggtagaggtggcggtgagtcgagattacgttattatattttagtttgggtaatgatagtaaaattttgttttaaggaaaaaaaaattttaggtttggtatggtggtttatttttgtaattttagttttttaggaggatcgtttgagttgaggttagaagtttgagattagtttgggtaatagagtgagatttttttatttttatagaaaaaaaatttttaattagttaggtgtggtggtggtgatggtggggtgtgtgtgtgtgtgtgtgtgtgtgtagaattatatatatgtatatatttatatatataaaatttatgatgtatatatgt

SEQ ID NO: 723 - DNA, 7165 bp, Artificial Sequence
  chemically treated genomic DNA (Homo sapiens)
aatttaagagtaatagaattagtttagggttttttaattttggtattatttatattttggattgataatttttttttgtgggaggttttcgtataggatagatgtgtagtatttttggtttttatttaattttttttttggttggttattttcgttaaaaatgtttttagatattgataaatatttttaggggggaaatttttcggtttatttttatattttagttaagaattagtagattagtataatatttaagaaatatttaaaattatgagtaatataataataaaattaaaataaaataaaattttgtttttaataatagagataatatatttttagttttttaaatgaaattatgtagatgaattgattataaaagggacgattttttttttaggaatagaaaagatgggatgtttgttttttatgttattttagtttttaattgtttatttggtttattatttttatgtagattgttaaaatttaaaaagattttttgaaaattgggtttgttaattgttaatttggaggttgtaacgaaagtatttttgttaatagatatttttttaaggtttgtggtaaatgtaaaagtttatattattgaagagatataattttgaggaaaggtaaaatatatgggggttaaaggaaattaatttttatgaagagattttttattattaaatttgtgtttgtgagtaatgtttgtgagtaatttggattaagtattatatggatatatagtaggtagaaataataataaattgttttaaatggttttggaaaagaaattgtaaatgaatttgaatttgtaaatttaaattgtaaattgtaaattgaattttataatttgatgttttttagattgtgaaatatattttttgatgaataagtagaagtttaattttgatattagtaagttaaaaaggttttgtaaataatacgtattaatatgatttaattagtaagggaaaaaagtagggttaatattgaaaatatttaataattggaattgatataggtattaaataattttaagggttgttgattatatatttatttgtattggtgtatatttattaaatattagttttagaaaaaggtaaggtgtagagtagaggtttttatttgtgtgaaaagtgggagaaggaagggtgtttgtttgtgaatatgtgtgtgtttatgtttgtatatgtatcggttagtaatatatataggaaattggtgatagtgattgtttttagagagaattagggaaggttattatgtagtttattatttgaggaagattagtttgagattaaaacggaatattgttaattattattttagaataataggtataaatttatattgtattggtaaatgaggatattagcgtagtttagaattggggaattaagttaaggagttatagaaggtttattttttattttattatttaagaatatattatttttatttttttttaagtaaaaataaaagtattagataattgaatagatatttaatttataatgaaattagaatgagagaatgtttattttaaaaattatttttgttttttttattattacgtttaaagaaaaaaattatttattattgttacgattaagggtgagtttgggtgttgaatattttatttattaaatttattaatagttattatgattaaataatttttaaagttaagaagttaatattagtgattatatagttgtagagtttaggttattgatttgttagatatattagtggttaaggggttttaagatgttttgtataggaatatgttgttttttttttttttgttttttaatatttagtgaaaagttttatagtgtaggtaaattaaatttaaatattataattttattatgttatttaggagtatattagttttagttattttgatttaaaattcggatataatattaatgattgtaatttcggaatttggttatatagagaaataatgttttgtgattagtaaattagaaaaatagagatggtagataattattatatatatattacgtgtaatttttatttaagaattttatatgtttttgtttatttaatttttattttaaaataaaaattttgtgagttataggtattgttattatttttattttaaagatgtagaaaattgagttttagagaggataattattatgttagattacgtggttagtaaaatggtaaagttaaggtttgaatttaagttataattttagagtttgtgttattaattttgatattgtattgttttttgggtttgggttggtagttgagagatttacgttttaatttaaatttattatttttatattttttaaattaaagttaggatattgagtttgattatgggttagggtattttatgggtttttttttatgaaatttaagatataaagttgttatttaagtaggatattatttaaaatttttgttttttatttttttatcgatgtagcgagagaagggattatagaatgattaatattttatttgatttataaaaattagaaattttttaatgtgttaggtattttttaaagtgttttatatatagtaagttgtttaatttttttaatagttttatggttatatattattatttttattagggaggtgagaaaattaagtttaaagaattttgatgttttttgtttaaggttatatagcgagtaagatttaaatttaggttatttggtttttaagtttgtgtttagttatttagttatgtagttttttgttataaatttgggatatatattatatgatatggaattaagtttagaataaaaggtattttttatagagatagattttttttagttagggggtaaatttttgtttttggtattgttataattatgttttttgtagtgacgtttggggttttttgtaattttgatttttttgaaggtttagggaagaatttatttttttttatttttttttttaagtatttaaatttttttttgttttgttgtttttttgttttttgtttttaggaattgtttgaggatttgaggaagttaggggtggtagaaaagtggtaaagggaggaaaggtagaaaataagtagtttttaataatttagataagggaggtaaattaaagttataaaatttaagttggaatttgttgttttgtgttagtttttttgtttttgtttaaatttttagttttttattttgttatagtttggtatggatagaaatttttgttgagggtattattttttgtaaaattattatgtatagtattaattttagtgtttgtttttattttttaagtatatattagaattttgagggagttaggttttggtttaggtgatgtagggatataaaaagaaatgagatattttttggattttagagttttagatatatttgagtttgtttgtttgtgtttatagtttttataattgttaggtagtatgtttaaggtttggagttgttatataatagttttaataataatttttatatattgaatttatattgtatattagataggtattttataaattttatgtttaaagtatatgataattttggttaggatttaaatttagtttttatgtttggttatgttatttttttgtagttttagttttattttttttttttgtgaaatggggttaaataatgttatttttttagaattattgtaagaatgagacgggatgatatagaataaagtatatgtatttattttttattaaatggtagtttttattattttaagaggaaatagtataggggtttatagaagtatttgaagtgtgtatgagttaggaggtgggagtaatttttttagttggagggatttggttttgtattttgaaagatgaaatgtgtttgggtatggggtaatgaaaggtgggggatgagaggtaggaaagtatgttatgggtgaattttaaagtatgaaaagggaaattgttatggttatattggttaattttagtgatttttttgaagtttttaattttgaaatatttttaaaagaattaaaaatttaaattttttgtttttgagataaagagtaaatatattattaatttttttaggtaaaatgggattatatttatagagaaaaatgaatgtttattatttttgttaagtaatatttaaattttagataagtaggggagatttagtaaaagtatttttgagaaaaagggatgattgtggaaagaaaggtttggaaataagattgatagtttgtttttattattttttttttatttttttttttgtgtttttagattataatttttaaatagaataattttgaaagtgagtataatcgtttgttagtatggatataggtgaatttttagtgttaaataattataaataaggagaagaagttattttattatttatttataaaaatgagtaaggtttttttgttatatttttttgttaataaatagaattttaatgtggatagaagtaaaaaaaaatatttttgtaaattatagagatgtatgttaaatatggttatgttgtatgaagtatatagttttaatttatagaagaatttatttttattttttaaaggtagtttttatttaagagttttaattataaaatatggaagaaatttttttttagttatttttatatttttttaagtgaaattttaaaaataaataatattaagttagagtaaatttaataagatagttagagaaatagtgagaataaagaaaggatttgttttttaagtaaaaataagtaagttagttcgagataagtaaaagaaaaagtatatgtataattatagttttttttttttaagaaattttcgtaatttattttgttagagaggaagataaatgttataatattttgttaattaattagtaacgttgtaggttttaaattaggaagttttgtaaggtatagtattttaaattgtgtaagtaagatttttgttttttagttattttttgttttttatgtttgtaggatggaaaggtagatgtaaagttttttatggcgaaatataatacggggggtaattcgatagaggatgttttagttaatagtcgattttttagagttatagggttaaatttatttttaggaatataagtaagaaagaatttatttaataattaaggaaatgttagtttttttgtaggatttagtaatgtatttaagtttgggtttttaaagttatttgtggtagttaaatttttttttgaggaaaagtttgataaggaatttaagttttcgtttttaaagtttattggagtaggttaaagattcggaatattagttagtttgattattagagatttcgaggcgaaagtgggatttttgaaatttgtaggttttaagtttattaatttgtttaaagaagattttaaatttatatttttttggttttttggaaataagttatttttttatagtgtaaattaagattatgatttaaagttattaggttcgaaatttgggtttatttttttaattttagaaaatgaatagaagtaagcgttttttaaattgattggggttaaagggaaatttatgttagtattataagattttgaatttaagttttttttttttaaattcgtttttggttagaagtcgtttttaagtatcgagaatttttatgaagacgaaagttttatgaagaatgtgtttttattaaaagggtttttagtttttttgggagttaggtttaaaagcggttttttaaaattagtaagggaagatttagaaaataaagattatgtaggggagattttaagtttgtttttttttggagtggttttgaaatttgttgcgagtaggggaggtttaggtttttttaaaaatggtgaagaaaaaaaggaagataggaagatagatgttgttaagaatattttttagagtaaaataaattaggaagagttggttttagggattttttttgttaggttttttaaggttttttttaagttgatagtgggggggttatggggttaaagttaggaaaaggaaaagggagataagaatttagttatttcgaaatagaagttattgttttttttgtttattttgggtttatttttattaaaatttaatagattattaaatgttgatttgacgaaattttataaaattttttttggaaatagtgagtttttttttcgtttgttatttagtatggtttattttaaggtagagaatgttttagtttttggggaaagttttgtaataaggaatgattttttatatttggtatttatatgtgtataatgaattttttttgttttgttttttttttttatgtgggaggtttgggaaagtaggaagtttttattttgtgagaaaatgttttggttagttggggttttgttgggggaagggagagggaatgtatttattttattgatacgtggttttgtttaatgataattattgtatttattttttttgttgggttttatttttgttgaatgagattgaggtatgttatttttattaatatagaggagttagatagaaaatgagttattttgtaggttagtagtttttaaagggaataattttgatttttaggggatatttggtaatgtatggaggtatttttgattgttataattggagggtgttattggtttttagtgagtagaagttagggatgttattgaatattttataatggttaggatagttttataataaagaattatttaggttataatgttaatagtatagagatgataagtttttttttaagtgattgtaaatatttatataatttattatgttttttaagtttagtatttaaatgagaaaggagtagtatttatgaaatggtattttgtgttttatattttagttattttttattttttagtataaagttttttgaatttttatgatttataaagtaatatatagttaggaaaatgagttagataaaggagtattttatttttttttcgggtaaatagtttaaatttttattagagatattattgtaatttttttggatgtggtattgagtgattgtatgtaagaagtttatatatgtttgagatgattaatattttaggtaaatgatgtgtaattgttgtttattgtgagggggaaataagatgtttataggtgattatattatttgtagtcgt

SEQ ID NO: 724 - DNA, 7165 bp, Artificial Sequence
  chemically treated genomic DNA (Homo sapiens)
gcgattataagtagtgtggttatttgtaggtattttgttttttttttataataaataatagttgtatattatttatttaaaatattaattattttaggtatgtgtgagttttttatatgtagttatttagtattatatttaagagaattgtagtgatatttttggtagaaatttaaattatttattcgaaaggagagtaaagtatttttttgtttggtttatttttttaattatatattattttatgaattataaaagtttagaaaattttatattgagaaatggaaaatagttaaaatgtgaaatataaagtattattttatgagtattgttttttttttatttgaatattgggtttaggaaatatgatgaattgtgtggatatttgtagttatttaaaggagggtttgttatttttgtattattgatattatggtttgaataattttttgttgtgggattgttttggttattgtaggatgtttaatagtatttttagtttttatttattagaggttagtagtattttttagttgtggtaattaaaaatgtttttatatattgttaaatgttttttgggggttaaaattgttttttttgggaattgttgatttataggatagtttattttttgtttaatttttttgtgttgataggggtaatatattttagttttatttaatagaaatgaaatttaataaaggaagtaaatataatggttattattaagtaaaattacgtattaatgaagtggatgtattttttttttttttttttaataaaattttagttgattaaggtatttttttatagaatgaagattttttatttttttagattttttatatgaaagaaaaaaataagataaagaaaatttattatatatatatgagtattagatatagagaattattttttgttataaaattttttttagaagttaaaatattttttgttttggagtaaattatattgaatagtaaacgagaaaagaatttattgtttttagaagaggttttgtggaatttcgttaggttaatatttggtggtttgttgggttttggtggaggtggatttaaggtaaataagggaggtaatggtttttgtttcggggtggttgaatttttgtttttttttttttttttttgattttggttttatggtttttttattgttagtttagaaggggttttagggaatttggtaggaggagtttttgaggttaattttttttgatttattttgttttggaaggtgtttttagtagtatttatttttttatttttttttttttttttattatttttggagagatttgggttttttttgttcgtagtaggttttaaaattattttaggaaagggtaaatttgaaattttttttgtatggtttttattttttgagtttttttttgttggttttaaagggtcgtttttggatttgatttttaggggagttggggatttttttgatgaagatatattttttatggggttttcgtttttatgggagttttcggtatttaggggcggtttttggttaaaggcgggtttggggaagaggggtttgggtttaagattttgtgatgttgatataaatttttttttaattttagttaatttgggaaacgtttgtttttgtttattttttgaggttggaggagtaggtttagatttcgggtttagtggttttaagttatggttttggtttatattgtgaagagatggtttgtttttaggaggttagggaaatgtaggtttggaattttttttgggtaagttgatgggtttggggtttataggttttagaaattttattttcgtttcggggtttttggtggttaagttggttggtgtttcgaatttttggtttgttttagtgggttttagaaacgggggtttgggttttttgttaggtttttttttagaagaaggtttgattgttataggtggttttggggatttaaatttaggtatattgttgggttttgtaggagggttggtatttttttggttgttgaataagtttttttttgtttgtatttttgaagatgagtttggttttgtgattttgaagggtcggttattgattgagatattttttgtcgggttgtttttcgtgttatatttcgttatgagggattttatatttgtttttttattttataaatatagggaataaaaaatagttgagagataaaagttttatttgtatagtttaaaatattatattttatagagttttttggtttgaggtttgtagcgttgttgattggttagtaagatattgtaatatttatttttttttttggtaaaataagttgcgagagttttttgaaagaggaaggttatggttgtgtatatatttttttttttgtttatttcggattgatttgtttatttttatttaaggaataaattttttttttatttttattgtttttttagttattttgttggatttattttaatttggtattatttatttttaaagttttatttgaaaaaatatggaagtgattaaaaaaagattttttttatattttataattgaaatttttaagtagaaattatttttaaaaaatgaaagtaagtttttttgtaaattgaggttgtgtgttttatatagtatggttatgtttaatatatatttttgtggtttgtaagagtatttttttttgtttttatttatattgaagttttgtttgttaatagggagatgtggtagaaaaattttgtttatttttataagtaagtaataaaatgattttttttttttatttgtaattatttagtattaaagatttatttgtatttatattagtaggcgattgtatttatttttagaattgttttgtttagaggttatggtttggaggtataagggggaagataaggaagaggtaatagggataggttgttagttttatttttagatttttttttttatagttattttttttttttagaggtgtttttattgagttttttttgtttgtttagaatttaggtattatttagtaaagataataggtatttatttttttttgtgaatgtaattttattttatttgggaaagttaatggtgtgtttgttttttgttttaaaagtaaggagtttaaatttttagtttttttagaaatattttaaaattggaggttttaaaaaaattattgaagttaattaatgtggttatgataatttttttttttatgttttaaagtttatttataatatgtttttttattttttattttttattttttattgttttatatttaggtatattttattttttaaggtgtaaaattaggtttttttagttggaaaggttgtttttattttttgatttatgtatattttaggtgtttttataagtttttatgttatttttttttagagtgatgagaattattatttagtggggggtaaatatatgtgttttgttttatattatttcgttttatttttatagtagttttaaaagaatgatattatttaattttattttataagaaaggaaaatgaggttggaattgtaggaggatggtatggttagatatgagaattgggtttaaattttagttagaattgttatgtgttttaaatatggaatttgtaaaatgtttgtttggtgtataatatgggtttaatatatggaaattattattagaattgttatgtagtaattttaggttttgaatatgttatttaatagttgtaggaattgtgagtataggtaggtaaatttaggtgtatttggggttttgaagtttagaaaatgttttatttttttttgtatttttgtattatttagattagggtttggtttttttaggattttaatatatgtttggagaatgagggtaggtattgagattaatattgtgtatagtgattttataagaaatggtgtttttagtaagagtttttgtttatattaaattgtagtagggtaggaggttagggatttaggtaggaatagaaaagttaatatagagtagtaaattttaatttgaattttgtaattttaatttattttttttatttgagttgttggaaattgtttgttttttattttttttttttttgttatttttttattatttttgatttttttaaatttttaagtaatttttgaaggtaagaggtaggaagatagtagaataagggagaatttgggtgtttgggggagggaataggagagaatgggtttttttttgaatttttagagagattagagttgtagaggattttaaacgttattataaggggtataattatggtagtattaagaataaaaatttgttttttaattgaaggaagtttgtttttgtggaagatgttttttattttagatttaattttatattatataatgtatattttagatttataataggaggttatatagttgagtgattaagtatagatttaggaattaggtggtttgggtttgaattttattcgttatgtaattttggataaaaggtattaaaattttttaggtttagtttttttatttttttaatgggaataataatgtgtagttataggattgttaggaaaattaaataatttgttgtgtgtaaaatattttaaagagtatttgatatattggaggatttttgatttttataaattaagtgaaatgttagttattttgtagttttttttttcgttgtatcggtgaggaaatggaaagtaagagttttaagtggtattttatttaggtggtaattttatgttttggattttatggaggaaaatttatgaaatattttagtttatgattaaatttaatgttttggttttggtttagaaaatatggaagtggtagatttggattggaacgtaagttttttagttgttaatttagatttaggaagtagtgtaatgttaaagttaatagtataggttttggggttatgatttgagtttaaattttgattttgttattttattaattacgtgatttagtatggtagttattttttttgaggtttagttttttatatttttaaaatgagaataataatagtatttatagtttatagggtttttgttttaaaataaggattaaatgggtaaaggtatgtaaaatttttagataagaattgtacgtaatatatatgtaataattatttgttatttttgtttttttaatttgttagttataaaatattatttttttatgtgattaaatttcgaagttataattattaatgttatgttcgaattttaaattaaagtagttagaattaatgtatttttgaataatataatagagttatgatatttaagtttggtttatttatattgtgagattttttattggatgttgaaagatagggaaagaaagagtaatatgtttttatgtaggatattttagagttttttagttattaatatgtttggtaaattagtagtttgaattttgtaattatgtaattattaatattggttttttagttttagagattgtttaattatgatgattgttaataagtttagtagataaaatgtttaatatttagatttatttttaatcgtaataataataggtagtttttttttttaagcgtaatgatagaaaaagtaaaaatgatttttaaaatggatatttttttattttgattttattgtagattgaatatttatttaattatttagtatttttatttttatttaaaaaagggtaggggtaatatatttttgagtgatagagtggaaagtaagttttttataattttttaatttagttttttagttttaggttacgttgatgtttttatttattagtatagtatgagtttatatttgttgttttggaataatgattagtaatgtttcgttttaattttaaattgattttttttaaataataaattatatggtgattttttttagttttttttagaggtaattattgttattagttttttatgtatgttgttaatcggtgtatatgtaaatataaatatatatatatttataaataaatattttttttttttttattttttatatagatggaaatttttattttgtattttgtttttttttagggttgatatttggtagatatatattagtataggtggatatatgattagtaatttttgggattgtttggtatttatgttaattttagttgttagatatttttaatattaattttattttttttttttgttagttggattatattggtgcgtgttatttgtagaatttttttaatttattgatattaagattgggtttttatttatttattagaggatgtattttataatttggaagatattagattgtgaaatttaatttgtaatttgtaatttgaatttgtaaatttaaatttatttgtaattttttttttaaagttatttgaagtaatttgttattatttttatttgttatgtatttatataatgtttagtttagattatttataaatattgtttataaatatagatttaatagtagaaaatttttttatagaaattaattttttttagtttttatatattttgtttttttttagaattatgtttttttagtggtataaatttttatatttgttatagattttgggaaaatgtttgttaataaaaatgttttcgttataatttttagattgatagttaataaatttagtttttagaaaatttttttgagttttagtaatttgtataaaagtaatgaattaagtaaatagttaaaggttgagatggtatgaaggatagatattttattttttttgtttttagaaagaaaatcgttttttttgtagttagtttatttatatagttttatttggaaaattaaaaatatattatttttattattaggaataggattttgttttgttttagttttattgttatattatttatggttttaaatattttttggatattatgttaatttattggtttttaattggggtgtgggggtgggtcggggaattttttttttggggatgtttattaatgtttggaagtatttttgacgaaaatgattagttagggaaggggttgggtagaggttagggatgttgtatatttgttttatacgagagttttttataagaaagaattattagtttaaaatgtggatagtgttaagattgagaaattttgagttaattttattgtttttgaatt

SEQ ID NO: 725 - DNA, 11131 bp, Artificial Sequence
  chemically treated genomic DNA (Homo sapiens)
tgggaaaatggagattaagaggtatgattataaatttagattgtaagtggtatatatatattgaatttagtttttttttttatttaaatttgaaatatttggtaaaggatgtttttataaattttaggaaggtatttattttattttaattttaaaggaacgtattatatagaggtggtattttaaaatgatagagaacgcgagttttggaagttagattgtttgtgtttataatttagttttattatttagtagttttgggatttggggtaaattttttaatattttattttttaggttttttaattaagaaaatggaggtaataataggatttattttataaagttgtggtgaggattataatgtacgtaaagtatttagaaaaaaagggtttgatatatggtaagtttttaataaatagtggttattaatatatttttagaatttattataaaaattaggaaataaattgattttttaaaggtttaaatgtatttaggaatgggaaattaatatatggttatttatagtattgggatatatttaattttaagatttgtgttgtttgaatgggatgaattagtaagattatgtttattttttttaagtgtttaattttagaaagtaatgattattagttttgttaattttttttttattaattttgtaaaaggtataaaagtaatatggaaaaaagaggtagagaagatagaagtagattagtatataaggtgatttttttagattagaatttgatgtgtttaatgaatgggtgatgtttttatgtttggttgaggtattttaggattttatatttatataaaagggcggggagtgggaagggggtaggtttattattttatttttagttatagtatttttttttttatttattatattttataaaagtttttttttagttttagtattaggttagatttttttttgttttagggttttggtaggttgattttttttttatttggaatattgttatttttttattatttttttgtggttattttttttttattttaaatttttatttttaaagttattatttttgatatttttatttaaaataggtttttttattgggtgtagtggtttatgtttgtaattttagtattttgggaggttgaggcgggcggattatttgaggttaggagtttaagattagtttggtaaatatggtgaaattttgtttttattaaaaatataaaaattagttaggtgtggtggtatgcgtttgtaattttagttattttggaggttgaggtaggagaattatttgaatttgggaggtagaggttgtagtgagttgagattattttattgtattttagtttgggtaatagagtaagattcgtttaaaaaaaaaaaaaaggttttttttgttattttttattatagtatttagtgtgttttttgtgtagaaggtatttatgtaatttgtaattaattatttatgtatttatttttaatgttttttttattagatagttttatgatggtaaagaatatttttgtttattatattaattttatttattttaatacgttgattagtatagagtagacgtttaataaatatttgttgaatgaatgaaataatgatttttaaggttttttttagttgtttaataattattaggtaataggataaaaaatatttagtgtaaagggggaggttttacgtggggtataggaaatatttgattttttattatgataaaaaaataaataattaaatggttttattttaagaagtttagttaaaatttgattgatgtgggttgggtatggtggttgacgtttgtaattttagtacgttgggaggttaaggtaggcggattataaggtgaggagatcgagattattttggttaatatagtgaaatttcgtttatattaaaaatataaaaaattagtcggttgtggtggcgggcgtttgtagttttagttattcgggaggttgaggtaggagaatggcgtgaattcgggaggcggagtttgtagtgagtttagatcgtgttattgtattttagtatgggtgatagagcgagatttcgttttaaaaaaaaaaattaataaaaaaaaaatatttgattgatgtaatttattaatgagtaatagtttttttagtgattttgtaagttttgtttttagatgtgttttaattattttaataattggttatttaggtttaaatttttgttaaataatgggttggttatataagaattagttgataagtttattaaaaatatagatttttggattaaaattttaggagattttgatttagtatttgtgaagttttagaatttatataattaaaatttttttattttaaatagatattatgtgtatgtaatatataggtttagaggtaagaaatagtttatagtaaagttttttttttatttttgtttttttggtattaagtttttttttttataagttattgttgttattaattttttgtgtatttttacggataattatttgtttaagtaagtatatatatattttttgatttgtatatttaaagagttattttaattttgttttttttaattttatttataatatatgttggaaatgagggtatttgtatttttaataagtattttagatgattttgatgtgaagttaaatatagaaataatttatggatttacggttgtgagattaagtttaatttattacgatatattagaaatttaaggatattgaaggatgtttttaaaagtagttttttttatttgatttttgttttttcgttttatagagatgaattaaattattcgttagtgtttttatagaagttaggaaaaattagttatttaaatggatgttgttaaagttttaatttttaataattggaatttttttttgtttattgttattcgaaattataaatttgataatttttgtgttatataagatatttttgtatttaagttgaaataaggtgtgatcgttattgaatgagggttggttttttttttgttagttaagtagtttaatggagtataatcgaaatattttttttattaatttttatttatatagttttatttaaattttttttaaaattgtttttttgttatttgagtaaaagtaattaatttagaaattgtggggagaagattgtttggtgaattttggagttcggggttttttttattttgatttgatttatttgggggcgatggttgggtttttaggtagttttattttttttattttatttatttttgggattgtaaagggagtttttttttggtattgagataaggtttttcgagagttattcgattttcgtagtgtttttgttattacgaggggtatcgcgcggtaggtatttttattttttttatatcgcgttaaggaggtaggagtgtattgggttattcgagcgaggtagagaattcgtcgggatttagcgttggtttattttatattttcgtcgaaggggttttcgagggttcggtttttgtttaagttttttgtaaggtggaggtatgatttttttattttttttttttgaatttaaacgtgaggatggtatttgcgaggttaaagcggggtttagatggtttaaattttagattatttttttttttattcggttttttttttatttttttggttatgtgttttttcgtgagtcgtggtttaagtttttttatttcggttagtcgttattttttggtttggttttcgtttttttgtttatttggtttttttttttttatttagtatgatggggttgagtcgtcgggttaggtttttggataggtcgtatacgtagagttttatcggatagagattcggcggttttattgggattcgtggcgacggcggttacgacggttttcgggtattcggtagcggtttggattttttcgtattcgacgggagtgcgaagcggagggagagggggggatcgagttcgggttcgggttgaggggtgggggagaggtcgttttgcgttgttcgcgtttttatattcgttatcggtaacgattattgtgaggtgatagagaggggatagggagggtttatacggaagagggggcgggggtagggatgtatttttgcgtatgtgtttatagttttgacgtaggaaggggcggggttttgtcgaagggggcggggttttcgttgatgggttggttttcgttagggatataggtagaagttggttggggagtgtgcgtgttagtttgacgcgatatagtgcgtatatgcgtgatgacgtagagggcgttgattgggatcgagtatagggttcgcgtatgcgtggattgtcgttttttgtttaagttggtcgtttttttgcgttaaaggtaagcgggtcgttatttatttgtgttgttcgttagttaggtttggtttcgtttcgtttcgttcggtcggtttcgcgcgtttttatagttttgttagagggttagcgttagttttaagtgtgcgaattcgaggagtagcgatagattcgagattacgtttttttttcgggaaggaggcggtatttcgcgtttgaggttcgtttgcgtttgaggttcgtttgcgtttgcggttcgtttgcgtttgaggtttgtttgcgtttgagattttattgggcgtgattgaggaatttggggaggtttttgggcggtattgaggacgagggggttcgttagttagtatagaattttggagcgggaattttttatcgtttaaatggcgtcgggggcgggattttcgggatttggttttcgcgggtcgtcgtcggttttgaaacgtgagggatagttgagatgaggtagttattgggatggtttttatgcgtatttatatgtagttcgattgtcgagttttcgaggtagtaggatttatcgtttatattttttattattaattaagtttttagaatagattttataagaatttagaggtcggtattttttcgatttaaatttgtttgttattgacgttaacgtttttcgtttagtgagtagtagttaatatgttagggtgggagttatattataaaatcgagggcgatgaagaagtagaggaagaataagaagagaattttgaagtaagtggtaagtgattttagtatgtagtgttattcggtgtgtggaagaaagattttttttgtttatttttgttggatggattttgttgtttgatggtttgtttttttttttttagataattttgaaatttttttttttttttgaatttcgtagagttattttaggtttttatatgtagattttattttagtgtgttttaagttttttttggatattggtagtttgatattttttggtttttgataaatggttatgattataggtattttttgttattttaagtggtttaggtgagattttttttatttaggaaagtagtgttattattttaggattttagtgtaaaaatgtttttattttgtaataattatattaattaaagaataaacgtaagtaatatagttataggaaagtgattgatttttttattatagtttttacgtttgggagtgtatgtgtaggtaatatagtaatatataaaataaaggaagagaaataggggtatatgtaatttttatattggttaatttaatttttgagtagaaaaattttgaatatttttattaaaaatgagaaacggttaggcgcggtgttttaagtttgtaattttagtattttgggaggtcgaggcgggcggattacgatgttaggagattaagattattttggttaatacggtgaaatttcgtttgtattaaaaaaaaaatataaaaaattagtcgggcgtggtggcggtcgtttgtagttttagttgttcgggaggttgaggtaggagaatggtgcgaatttgggaggtggagtttgtagtgagtcgagatggcgttattgtattttagtttgggtgatagaatgagatttttttaggaaaaaaaaaaaagtgagaaatataggaaatataaaaaagaaaaaaatttgttataatttattattttaatataattattattagtattttgatatttttgtattttttttttaagtattttttaatatttattttttaatgaaatatatatattttttaattttttaatagagataggttggagtgtagtggtgagattatcgtagtttattgtaattttaaattttcgggtttaagtgatttttttgttttagttattttagtagttgggattataagtgtcgttaatttttaataattttttaattttttgtagagataggattttgttatgttgattaggttggttttaaatttttggttttaagcgatatttttaagttttggttttttaaagttttaggtttatagttatgagtttttatgtttagattgtatttgatttttttttttttttttttggagatagttttgttttgtcgtttaggttggagtgtagtggcgcgattttggtttattgtaagtttcgtttttcgggtttatgttatttttttgttttagtttttcgagtagttgggattataggcgtttattattacgttcggttagttttttgtatttttagtagagacggggttttattgtgttagttaggatggttttgattttttgattttgtgattcgttttatttagtattttaaagtgttgggattataagtgtgagttattgcgtttggtttatttgattttttgtattgtaacgatagtgtatatatatttatttatttattgagatagagttttgttttgtcgtttaggttggagtgtattgatttaatttcggtttattgtaattttcgttattttagtttaggttatttttttattttagttttttaagtagttgggatgataggcgtgtgcgttattatattcggttaatttttgtatttttagtagaggtagtgttttattatgttggttaggttggttttgaatttttggttttaggtgatttatttatttcggttttttaaagtgttggaattataggtgtgagttattgtgcgtggtttatagtttattttaaatatattataatttggtcgggtgtggtggtttatatttgtaattttaataaatatattgtaatttgtttgggtgtggtggtttacgtttgtaattttaatattttgggaggttgaggcgggtagattatttgaggttaggagttcgagattattttggttaatatggtaaaattttatttttattaaaaaatataaaagttagttgagtttgtggtggtatgtatttgtagttttagttgtttgggaggttgaggtacgagaattgtttgaatcggggaggtagaggttatagtgagttgagattgtaatattgtattttagtttgggtaatagagtgaaattttattttaaaaaaaataaaataggggtcgggcgcggtggtttatttttataattttagtattttgggaggtcgaggtaggtggattataaggtcgggagatagagattattttgattaatatggtgaaatttcgtttttattaaaaaaatataaaaaattagttaggcgtggtggtaggcgtttgtagttttagttattttggaggttgaggtaggagaatggcgtgaattcgggaggtagagtttgtagtgagttgagattgtattattgtattttagtttgggcgatagagtgagattttgttttaaaaaaataataataaaataaaaaataaggtcgggcgcggtggtttatatttgtaattttagtattttgagaggtcgaggcgggtggtttacgaggttaggatatcgagattattttggtaaatacggtgaaattttgtgtttattaaaaatataaaaaaatagttaggcgtggtggtaggcgtttgtagttttagttattcgggaggttgaggtaggagaatggcgtgaattcgggaggcggagtttgtagtgagtcgagattgcgttattgttttttagtttgggcgatagagcgagatttcgttttaaaaataaaataaaataaaataaaataggttaggtacggtggtttatgtttgtaattttagtatttttggaggttaaggtgggtagattatttgaggttaggagtttaagattagtttggttaatatggtgagattttgtttttattaaaaatataaaataagttaggcgtggtagcgtatgtttgtaattttgttatttaggaggttgaggcgggagaatcgtttgaatacgggaggtggaggttgcggtgagttaagatcgcgttatcgtatgtttaaggtttttgatatatattgttattttgttttttaggagatagttaattaaatttattaagaagtagtaggttatgtatagtggtttacggttgtaattttagtattttgggagtaggaggttgaggtaggttattatttgaggtcgggagtttgagattagtttgattaatatgatgaaattttatgtttattaaatatagaaaatttgttgggtatagtggtatatgttcgtaattttagttatttggagatgattagatattatatatttttttaggaaaaaatatgttatttatgataaagttatgttgaagaaagaaaatttgaattagattaagtttttttaggtttttagtaggaaggatagaggattttgttaatttatattaaaagaggttaatcggtaggttaggtaaggtggtttatgtttgtaattttaatattttgggaggttacggtagaggatcgtttaagtttagaagtttaaggttgtagtgagttatgattgcgttattgtattttagtttgtgtgagagaataagattgtttttaaaataattaatttaataattttatttttttatttgagatggaatttttgtcgttaggttggagtgtagtgattaatttcggttcgttgtaatttttgttttttaagtttaagtgatttttttgttttagtttttttagtagttggaattataggtatgcgttattatatatagttaattttttgtatttttagtagagatggcgttttattatgttgtttaggatggttttaattttttgattttgtgatttatatgtttcggtttttgaaggtgttgggattataggtatgagttatcgtgtttggttatttatttatttttattttttttgagacgggttttcgttttgttacgtaggttggagtgtagtggcgcgattttggtttattgtagtttttgcgttttagatttaagcgatttttttattttagtttttatagtagttgggattataggtatgcgttattatacgtagttaatttttgtatttttagtagagatggggttttattatgttgtttaggatggttttaattttttgttttcgtgatttatatgtttcggttttttaaagtgttgggattataggcgtgagttattgtgtttagttaaaataattttttattttttatttatttttttgagatagagttttgttttgtggtttaggttggagagtagtggtgtgatttttgttttttgtaatttttgttttttaggtttaagtgatttttttgttttagttttttgattagttgggattataggtgggtattattatatttggttaatgtttgtttgtttttttttttgttttttttttttgagatcgagttttattttgttatttaggttggagtgtagtggcgtgatttcggtttattggaagttttttttttcgggtttatgttatttttttgttttagtttttcgagtagttgggattgtaggtgtttattattacgtttagttaatttttttttgtatttttagtagagatagggttttatcgtattagttaggatggtttcgattttttgatttcgtgattcgcgcgtttcggttttttaaagtgttgggattataggtgtgagttattgcgtttagtttaatgtttgtatttttagtagatatagggtttaattatgttggttaggttggtttcgaatttttgattttaagtgattttttcgttttggttttttaaagtgttgggattataggtatgagttattgtgtttcgtttaattaatttttttaaaaaggtaattagtaaaatttagaatgtggaaaagtgtataatataaagtattttggttttttagaagataaattataagggaaaaaagagagggtatttgtagatgaagaggttttagaaaattaagttaaagttaatgtttagaaatgtaggtttgggtgataaaattataaagaaacgtaaggggtgggtgtgtggtagattatgtttataattttagtttttaggttagggcggggtggggtgcggtggtttacgtttataattttagtattttgggagtttgaggtgggtggattatttgaggtcgggagtttaagattaatttgggttaatatggtaaaattgcgtttttattaaaaatataaaattagttgggagtggtggcgggcgtttataattttagttagttgggaggttgaggtaggagaatcgtttgaatttgggagacggaggtcgtagtaagtcgagattgtgttattgtattttattttggtaatagagcgagatttcgttttaaaaaaaaaaaaaaaaaaaaatagaggtttggtggggaggattgtttgagtttagaagttttagattagtttgggtagtgtagtataatattatttttatagtaaatttaaaaaattagttggttatggtggtatatatttgtagttttagttgtttaggaggttgagttaggatgatggtttgagtttaggagttcgaggttgtagtgagttattatcgcgttattgtattttagtttgggtgatgggagtgtgattttattttagaaaaaaaagttaggatattgatttttttggggaggtgggtgttgtaattgggagggaatgtaagagggatttttggggtgtttggtaagatttaattttttgatataggtggagattttatggttgtttattttataataatttattaggttatatttttttttatggtttttatttattttatatggtaaataaatacgaaaataaggataaatatttttttttatttttttttttatagg

SEQ ID NO: 726 - DNA, 11131 bp, Artificial Sequence
  chemically treated genomic DNA (Homo sapiens)
tttatggggaaaaaaatggaagaaaatgtttgtttttgttttcgtatttgtttattatataagataaataaaggttataaaggaaagtataatttaataaattattataaggtgaataattataaaatttttatttatgttaggaaattgagttttgttagatattttagaaattttttttatatttttttttaattataatatttatttttttaaaaaagttaatattttgatttttttttttgagatagggttatatttttattatttaggttggagtgtagtgacgcgatgatagtttattgtaatttcgaatttttgggtttaagttattattttgatttagttttttgagtaattgggattataggtgtgtgttattatgattagttaattttttaagtttattgtagagatggtattgtgttatattgtttaggttgatttaaaatttttgagtttaggtaattttttttattaggtttttatttttttttttttttttttttgagacggagtttcgttttgttgttagggtggagtatagtggtataatttcggtttattacgattttcgttttttaggtttaagcgatttttttgttttagttttttaattagttgggattatagacgttcgttattatttttagttaattttgtatttttagtagagacgtagttttattatgttggtttaggttggttttgaattttcggttttaggtgatttatttattttagatttttaaagtgttaggattatagacgtgagttatcgtattttatttcgttttggtttaagagttgggattataggtatgatttattatatatttattttttacgtttttttataattttattatttaaatttatatttttaaatattagttttgatttaattttttaaagtttttttatttatagatattttttttttttttttttgtaatttattttttgaagagttaagatgttttgtgttatatatttttttatattttgaattttgttgattgtttttttaaaaaaattaattaggcggggtatagtggtttatgtttgtaattttaatattttgggagattaaggcgggaggattatttgagattaggagttcgagattagtttagttaatatggttaaattttgtgtttattgaaaatataaatattaggttgggcgtagtggtttatatttgtaattttagtattttgggaggtcgaggcgcgcggattacgaggttaggaggtcgagattattttagttaatacggtgaaattttgtttttgttaaaaatataaaaaaaaattagttgggcgtggtggtggatatttgtagttttagttattcgggaggttgaggtaggggaatggtatgaattcgggagggggagtttttagtgagtcgagattacgttattgtattttagtttaggtgatagagtgagattcggttttaaaaaaaaaaaataaaaaaaaaaataaataaatattagttaggtgtggtggtgtttatttgtaattttagttaattaggaggttgaggtaggagaattatttgaatttgggaggtagaggttgtagggagtagagattatattattattttttagtttgggttatagagtaagattttgttttaaaaaaataaataaaaaataaaaaattattttggttgggtatagtggtttacgtttgtaattttagtattttgggaggtcgaggtatgtggattacgaggataagagattgagattattttggataatatggtgaaattttatttttattaaaaatataaaaattagttgcgtgtagtggcgtatgtttgtaattttagttattatggaggttgaggtgggagaatcgtttgaatttgggacgtagaggttgtagtgagttaagatcgcgttattgtattttagtttgcgtgatagagcgagaattcgttttaaaaaaaataaaaataaataaatggttaagtacggtggtttatgtttgtaattttagtatttttagaggtcgagatatgtggattataaggttaagagattgagattattttggataatatggtgaaacgttatttttattaaaaatataaaaaattagttgtgtgtggtggcgtatgtttataattttagttattagggaggttgaggtaggagaattatttgaatttgggaggtagagattgtagcgagtcgagattagttattgtattttagtttggcgatagagattttattttaaataaaaaaataaaattattgaattaattattttagaaatagttttgtttttttatataggttggaatgtagtggcgtaattatagtttattgtagttttgaatttttgggtttgagcgattttttgtcgtggttttttaaagtattgggattataggtatgagttattttgtttggtttgtcgattgattttttttggtgtagattaatagagttttttgttttttttattaaggatttagagaggtttaatttgatttaggttttttttttttagtatgattttattataagtaatatatttttttttaaaaaggtatataatgtttggttatttttaagtagttgggattacgggtatgtgttattatgtttagtaaattttttgtatttagtagatatggggttttattatgttggttaggttggttttaaattttcgattttaggtgatagtttgttttagttttttatttttaaagtgttgagattatagtcgtgagttattgtgtatggtttgttgttttttaataagtttaattagttgttttttggagaataaaatggtaatgtgtgttaagaattttaaatatgcgatgacgcgattttggtttatcgtaatttttatttttcgtgtttaagcgattttttcgttttagttttttgagtagtaggattataggtatgcgttattacgtttggtttattttgtatttttagtagagataggattttattatgttggttaggttggttttgaatttttgattttaggtgatttgtttattttggtttttaaaaatgttgggattataggtatgagttatcgtgtttgatttattttattttattttattttatttttgagacggagtttcgttttgtcgtttaggttggagagtagtggcgtaatttcggtttattataagtttcgtttttcgggtttacgttatttttttgttttagtttttcgagtagttgggattataagcgtttgttattacgtttggttatttttttgtatttttagtagatatagggttttatcgtgtttgttaggatggtttcgatgttttgatttcgtgagttattcgtttcggttttttaaagtgttgggattataggtgtgagttatcgcgttcggttttattttttattttattattatttttttgagatagagttttattttgtcgtttaggttggagtgtagtgatgtaattttagtttattgtaagttttgtttttcgggtttacgttatttttttgttttagtttttagagtagttgggattataggcgtttgttattacgtttggttaattttttgtatttttttagtagagacggggttttattatgttagttaggatggtttttatttttcgattttgtgatttatttgtttcggttttttaaagtattgggattatagaggtgagttatcgcgttcggtttttattttattttttttgagatagagttttattttgttgtttagattggagtgtagtgttgtaattttagtttattgtagtttttgttttttcggtttaagtaattttcgtgttttagttttttaagtagttgagattataagtgtatgttattatagatttagttaatttttgtattttttagtagagatggggttttgttatgttggttagggtggtttcgaatttttgattttaagtgatttgttcgttttagttttttaaagtgttgggattataggcgtgagttattatatttagataaattatagtatatttattgagattataagtgtgagttattatattcggttaaattatggtatatttaaaatgagttataggttacgtatagtggtttatatttgtaattttagtattttgggaggtcgaggtgggtgaattatttaaggttaggagtttaagattagtttggttaatatggtgaaatattgtttttattaaaaatataaaaattagtcgagtgtggtggcgtatacgtttgttattttagttgtttgggaggttgagatgggagaatagtttgaattggggtggcggaggttgtagtgaatcgagattgagttagtgtattttagtttgggcgatagagtaagattttgttttaataaataaataaatgtatatgtattatcgttataatataagaaattagataggttaggcgtagtggtttatatttgtaattttagtattttgggatgttgagtagggcggattataaggttaggagattaagattattttggttaatatagtgaaatttcgtttttattaaaaatataaaaaattggtcgggcgtggtggtgggcgtttatggttttagttattcgggaggttgaggtaggagaatggtatgaattcgggaggcggagtttgtagtgagttaagatcgcgttattgtattttagtttgggcgatagagtaagattgtttttaaaaaaaaagaaaaagaaattagatatagtttgggtatggaggtttatgattataaatttagaattttgggaggttaaggtttgggggtatcgtttgaggttaagagtttgagattagtttgattaatatagtaagattttgtttttataaaaaattaagaaattattgggagttggcggtatttgtagttttagttattgaggtagttgaagtaggaggattatttgagttcgggagtttgaggttatagtgagttacgatgattttattattgtattttagtttgtttttattaaaaaattaaaaaatatatatattttattaggaaataaatattgaaagatatttgaaagaaaaatataaaaatgttaaaatgttggtagtggttgtgttagagtggtagattatagtaaattttttttttttttgtattttttatgttttttattttttttttttttttgagagagttttattttgttatttaggttggaatgtagtggcgttatttcggtttattgtaagttttattttttaggttcgtattatttttttgttttagtttttcgagtagttgggattataggcgatcgttattacgttcggttaattttttgtattttttttttagtatagacggggttttatcgtgttaattaggatggttttgattttttgatatcgtgattcgttcgtttcggttttttaaagtgttgggattataggtttgagatatcgcgtttggtcgttttttatttttaataaaaatatttaaaatttttttgtttaggagttaaattaattagtatgaagattatatgtatttttatttttttttttttgttttatgtgttattgtgttgtttgtatatatatttttaaacgtggaggttatagtgagggaattaattatttttttgtaattgtgttgtttgcgtttattttttggttggtgtagttattgtagggtgggggtatttttatattgaggttttggaatggtaatattatttttttggatgagaagggttttatttgaattatttaagatgataaaaaatatttatggttatggttatttattagggattaaaagatgttaaattattagtgtttaaaaaaaatttagggtatattagagtaagatttgtatataagagtttagggtagttttgcgaagtttaaaggaagaaaagaattttagaattatttgggaggagaagggtaggttattaaatagtaaagtttatttagtagagataggtagggaaggttttttttttatatatcgaatggtattatatgttgaagttatttattatttgttttaaggttttttttttgttttttttttgtttttttatcgttttcggttttgtaatatgatttttattttgatatgttggttattgtttattaggcgaaagacgttaacgttagtaataggtaaatttaaatcgaaaaaatatcgatttttaggtttttgtgagatttgttttaaaagtttggttagtagtgaggaatgtggacggtaaattttgttgtttcgaaagttcggtagtcggattgtatgtaaatgcgtatgggggttattttagtagttgttttattttagttattttttacgttttagggtcggcggcggttcgcggaagttagatttcggaggtttcgttttcgacgttatttagacggtgagggattttcgttttaggattttatgttgattaacggattttttcgtttttaatatcgtttaaaaatttttttaaattttttaattacgtttaatgagattttaaacgtagataggttttaagcgtaggcgggtcgtaagcgtaggcgggttttaaacgtaggcgggttttaaacgcgaggtgtcgtttttttttcgaggaaggagcgtggtttcgagtttgtcgttgtttttcggattcgtatatttaaggttaacgttaattttttagtaaggttatgggggcgcgcgagatcgatcgagcgaagcgggacgaggttaggtttagttggcgaataatataaatggataacggttcgtttatttttggcgtagggaagcgattaatttggatagaagacgataatttacgtatgcgcgggttttgtattcggttttaattaacgttttttacgttattacgtatgtgcgtattatatcgcgttaggttggtacgtatattttttaattagtttttatttatgtttttgacgaaagttaatttattagcgagagtttcgtttttttcggtaaagtttcgtttttttttacgttaggattgtaagtatatgcgtaaaagtgtatttttgttttcgttttttttttcgtgtgggttttttttgttttttttttgttattttatagtagtcgttgtcggtagcgggtgtgggggcgcgagtagcgtagggcggttttttttttattttttagttcgggttcgggttcggttttttttttttttttcgtttcgtattttcgtcgggtacgggaaggtttaagtcgttgtcgggtgttcgagggtcgtcgtggtcgtcgtcgttacgggttttaatggagtcgtcgaatttttattcggtgaagttttacgtgtacgatttgtttaaaggtttggttcggcggtttagttttattatgttgggtgagggggaaggggttaggtgggtaggagggcgggagttaggttagagggtggcggttggtcgaggtggggagatttgggttacgatttacggggagatatatggttaggaggatggaagaaaagtcgagtggagaagagagtggtttgaagtttgggttatttgagtttcgttttagtttcgtagatattatttttacgtttgaatttaaggggaagggatggaggagttatgtttttattttgtagggggtttgggtagaaatcgagttttcgagagttttttcgacgagggtgtggggtaaattagcgttggatttcggcgggttttttgtttcgttcgggtagtttagtgtatttttgtttttttggcgcggtgtaggaaaggtgaggatgtttgtcgcgcggtgtttttcgtggtgatagagatattgcggaggtcgggtggttttcggagaattttgttttagtgttaaaaggaagttttttttgtagttttagggataggtgggatgggggagatagagttgtttagggatttagttatcgtttttaggtaggttaagttaggataagaggagtttcgaattttagaatttattaagtagttttttttttatagtttttaagttaattgtttttgtttaaatggtaagaaagtagttttgggggaagtttggatgaggttgtgtgaataaggattagtaaagaaagtatttcggttgtgttttattaaattatttaattggtaggagaaaaattagtttttatttagtgacgattatattttattttaatttaaatataggaatgttttgtgtaatataggaattgttaggtttgtaatttcgggtaataatgagtaggaaagaattttaattattgaaaattgaagttttgatagtatttatttgaatggttagttttttttggtttttgtggagatattggcgaatgatttagtttatttttgtgagacgagggggtagagattaagtaagggaggttatttttgagggtattttttaatgtttttgagtttttaatatgtcgtagtgaattgaatttaattttataatcgtgggtttatgagttgtttttatatttggttttatattaaaattatttagggtgtttgttaaaaatgtagatatttttatttttaatatatattgtaaatgagattagaaaaaataaggttagaatagttttttaaatatgtaaattaaaggatatatatgtgtttgtttaggtaaataattattcgtaaggatatataagaaattgataatagtagtagtttatggaaaggggaatttgatgttaggggaataggggtagaagagaaattttgttgtaaattgttttttatttttggatttgtgtattatatatatataatatttatttaaaatgagaaaattttaattatatggattttaaggttttataaatattaaattagaattttttggagttttggtttaaaaatttgtatttttaatgagtttattagttaatttttatgtagttaatttattatttgatagggatttgggtttagataattagttgttaaaatgattgaggtatatttgaaagtaaaatttataaagttattgaggaagttgttatttattaatagattatattagttaagtgttttttttttgttggtttttttttttgagacggagtttcgttttgttatttatgttggagtgtagtggtacgatttaggtttattgtaagtttcgtttttcgggtttacgttatttttttgttttagtttttcgagtagttgggattataggcgttcgttattatagtcggttaattttttgtatttttagtatagacggggttttattgtgttagttaggatggtttcgatttttttattttgtgattcgtttgttttggttttttaacgtgttgggattataggcgttagttattatgtttagtttatattagttaagttttaattaaattttttggaatggagttatttagttgtttgtttttttattatagtgaggaattagatattttttatattttacgtaaaatttttttttttatattgggtattttttattttattatttaataattattgggtagttgaaaggagttttaggagttattattttatttatttagtagatgtttattgagcgtttgttttatgttagttaacgtgttaaggtaaatgaggttgatataatgaataaagatgttttttgttattatggagttatttaatgggggagatattaaaaataaatatataaataattagttataaattgtataagtgttttttgtataggaagtatattgggtgttgtgatagaaaataataagagagattttttttttttttttagacgagttttgttttgttgtttaggttggagtgtagtggggtgattttagtttattgtaatttttgttttttaggtttaagtgatttttttgttttagtttttagagtagttgggattataggcgtatgttattatatttggttgatttttatatttttagtagagatagggttttattatgtttgttaggttggttttgaatttttgattttaagtgattcgttcgttttagttttttaaagtgttaggattataggtatgagttattgtatttagtgaagagatttattttaaataagggtattaagggtagtgattttgaaagtgggaatttaggatgaggaagaagtagttataggagggtagtaagggagtaatagtgttttaggtaggagaaagattaatttgttaaagttttgagataggaaagagtttggtttgatattggaattgaaagaaggtttttgtggagtgtagtgggtgaaggggaaagtgttgtaattgaagatggagtaatagatttgttttttttttatttttcgtttttttatatagatgtaaagttttggaatgttttagttaaatatgggaatattatttatttattgggtatattagattttgatttgaggaaattattttgtgtgttaatttatttttgttttttttattttttttttttatattgtttttatattttttgtaaaattaatgaagaaagaattagtaaagttagtagttattattttttagagttgaatatttaaggaaaataggtatggttttattgatttattttatttagataatataaattttgaagttgggtatgttttagtgttataagtagttatatattgattttttatttttaaatatatttgaatttttaaaaaattaatttgttttttgatttttatgatgaattttagaagtatattaatagttattatttattgagagtttattatgtgttagattttttttttttgagtattttgcgtgtattataatttttattataattttgtgagataagttttgttattgtttttatttttttgattgaagaatttgagaagtagagtgttaaggaatttgttttaggttttagagttattaggtggtagagttgggttatgaatataggtagtttgatttttagagttcgcgttttttgttattttgagatattatttttgtgtaatacgtttttttaaaattgaagtaaagtagatgtttttttgaagtttgtaaaggtattttttgttaaatgttttaagtttggatgagaaaaaaagttgggtttaatgtgtatgtgttatttataatttagatttatgattatgttttttagtttttattttttta

SEQ ID NO: 727 - DNA, 8073 bp, Artificial Sequence
  chemically treated genomic DNA (Homo sapiens)
atgtttattttttttttagttttttagttcggtttttgattattttttgttgttttgggtattttttgagttttttgttaggattttatgtttattttttattttttgtttgttttaagttatatttaagttttttagttttaggttttgcgttttatacgacgttattattgatgggtttttgtttttatttttgttagttttattttaaagatttttcgtgtttttagttagttttgagagttattgtgttttttgtattattttttggattatgttagttgttaaatattgtttgttcggttttttttttttttaattgtgttgtttttttcgaaggcggaacgaatattatatagatggttttagtttcgttttttttttagtagaggtttttattttttttttttttaggttttttagtttgtttttcggtttttatagttttagttttgtttttggtatacggttgttgaattgtgttagttttttgtttggggatagatttattgtacggggagttttagaattatttaggtttttatttttttgttatatttgttttaaaggagtagtgtgtagtgtgggttggttgggtttggtattttttaggtttcgtttttttagtttttttatttttttttgggagtttttttggatggagtgtgtggaaggtgtttggtaggtttttttagtttgatttttttttggtcgttaagtagtcgggttgtaggggtttagtatggttttgtgtttttttagtttttcgatgagtgtattaaattcgttttggaacggaagaaaatttaaagaaatgtgagtagtttttttttagagaagtaggaaaagttgtcggtgatttagttagatttcgatatattcgaggtcgattttattcggtttggggtttttaaacgataggtaaacgtgttttaggaggtttttggggatgacggttatggaatatgttatttatatagaggttttgcgttttttttgtgcgagttacggttttttttgattaggttacggttttttttgattttaggttagtaatagtattatcggttgtttatatgtttgtggttttgtgatttgttttattgataaatgttgatggagtatttgttatgggttgggtttatgtttagcgtgcgagggttataaaatagaatataaaaaataaatatttttgtgtttttagaggttattttttggggtaggaggatagatgatgagtaaaataattttaaaagatatagtgtgttgtagttaggtatggtggtatatatttgtggtgttagttatttaggaggttgaggtgggaggatcgtttgagtttgggaggtcgagattgtagtgagttaaggttgtattattgtattttagtttgggtgatagagggagattttgttttaaaaagaaaagaaaagaaaagaaaagaaaagaaaagaaaagaaaagaaaagaaaaagggaaatggtgtgttaggtggtggtaaatgttttgaaggaagataaattagagaaagaagcgttagggttattggggtgaattgagggattgatattttgagttagggtgatgcgggaaggttttgcggagtagatattggagtttagatttgaaggaggggatagtttataaaattattttaggtggataggatagttcggtaaggtagaagtttgagattgcgtaagggttattagaggttagtggggtaggttggggaggttagggtatgtaagatttaggtagagaggggcggtttagattgtgtgcggttttagggagagtataattatgattttggattttttttttggggaggtgggtatatagaggagggcgttgggtttgagaggtgatttgggttttagcgggttttcgcgcgttttaagattgtatgtggatgaagtatggatgcggggggtatttggggttatttgtagtgttttagggcggtttttgtggggttggcgagaagttattaggttttgtatatgcgttatgttaatatcgttcgatgggatttttgttgggttggttgtggtgtgagtagagacggaggtggagaatggttttaaggttttggtttggttaattgagatgatgaggggaacgtgtttggtattgggtttgatatacggtaggtgttaagaaggttgtttaagtcgggtacggtggtttatgtttgtaattttagtattttgggaggtcgtagtaggtggattatttgaggttaggagttcgagattagtttggttaatatggcgaaattttattttaattaaaaatataaatattagttaggtatggtggcgggcgtttgtaattttagttattcgggcgtggtggtgggggtgggtgtttgtaattttagttagttgggaggttgaggtaggtgaatcgtttgaagtcgggagttagaggttgtagtgtgttaagattgtgttattgtattttagtttaggtaatagagcgagatagttttaaaaaaaaaaaaaaaaaatgtcggcgggttatagtggtttatatttgtaattttagtattttgggaagtcgaggtaggcggattacgaggttaggagatcgagattattttggttaatacggtgaaattttgtttttattaaaaaaaaaaaaaatataaaaaattagtcgggtttggtgacgggtatttgtagttttagttatttaggaggttgagataggataatggcgtgaattcgggaggcggagtttgtagtgagtcgagatcgtatcgttgtattttagtttgggcgatagagtaagattttattttaaaaaaaaaaaagaatgttttttagatggtgatgatgggtgatttataaagtatcgatttagtgttttttagttttttttttgagatttaggggcgtaatatttttacgtcgtttttttttaggcgtaggtttcgtttttttttcggtattttttggaatttgagtttgtggggggttagtaggtgttttttttttggtttgtatagttttatatggagtttttttttttatttagaattttttagagatcgtggttttgtagatacgttttaagtatttgtaggttgtgaaggaggggcgttacgtgtttttgtttcgttttaagtagtttttagtgttggagcgttagcgtttggataagcgattggtttttatcgttattattttggatcgcgtgcgggacgagtatttttagttttaggaggttttgtataaggttagttagatgatcgttaataagttcgagttattagggtttttttagggagtagtttggatttcgttttgtaaggtttttaggaagagattcggaattgtgtttgttatgagggatttggaattttttgtgtttttaaaaattatatgtatttttagaagggtatcgtttaagagaaataagttagttttatttataggaatttttttagttatttagtaatttaataaattaggtaaaattttagcgttttttatggtattttatcgtaaagatagagtttgtgattgtagatttatatatttatatttttatattgggtttattcgtttaggtaatattttggtttgtagtatttttaaatttgtacgtgttttttataatataacgttgttataggtttataagttggtgggttgagtagaggtgggaaagttaaggtagttttagttagtttggttcgggaggttggtttttttagtatttttttttattaggtgtatttgaaaatttataaattattttttttattagtttttttatttttattttttagaatttttaggtttttttttttgtttttatgtttttatttgagttaaatttagatttatagtttgtaggagaaagttagtggttttagatatacgtaatagggtgagtattgaaataagagtacgttggggcgtttatattaagggattacgttttagtttgtttatttattttttttttattattaatttagcgttttttttttttggatttttaagtattaatgattttggggtttttttgtagtttaaagggaaaatgttttataaaataattttatttttaaatattttagtagaagaataaaattttttttttgaatatttagtaagtttttttgagttagttttatttattttaaaatattgtagaaatatagaaattataatagaggtggaagggaggtttttgtttttttttttttgagacggagtttcgttttgtcgtttaggttggagtgtagtggcgcggtttcggttcgttgtaagttggaaagggggtttttaatgtttttatgtttttatttaggaataatatttttgtgttttggtgtggttttttttgtatttttttgtatatatattttattaggtaagttaaggttatattgtgtgttttttgtattttatatgtaaaaatgtgttttttttaatgtaagtatttttttattttatgaaaaaattttttttgtgttagtttaatgtttttttaattgttagttttatgggttattataatgttttgattatttttttttggaataattgtgagttatggagtatatttaaggattttttaaatgttggttgtttttaatttggcgttgagcgtttttggtcgttttttcgatgatgttttcgggacgcgttggtaggaggaatttttgggcgtaaggcgcggttgggttagttttttataaagttttacgagttgcggggatttaggtcggggtagcgggggttacgttttattttcgattttacggggatcgggtcgggattgcgttagcgggggtttcgtttcgtttttgattttagaggaatcggtagcgggtagtacgcgtgggttttttttcgcgggacgtcggacgcgtagttagacgcgttttttaggtttttttcgagagcgaggacgcgtttaggttcgttttgtcggagtcgttattggggggcgtagcgcggacgcgtatttttgtttcgggcgtttgcgcgggaggtcgcgttacgtgatttatcgcggtttcgtttcgcgacgagttttcgtcggttacgtgattcgtttttgcgcgttttcgggtacgatttcggagttttcgcgggcggttagggcgcgcgtgcgcggaggtgagtcgggtcggggttgcggggtttttttgagcgcgggtcgggtcggtggggcggtcggttgttcgcgcggttttttagttgggaaagttgaggttgtcgtcggggtcgcgggtggaggtcggggatgaggtagtaggtaggatagtgatttcggtgacgcgaaggatttcggttatttttaggtttttttcgttcgttcgttgtttagcgagggaggttttgcgcgtgtcgtagttgacggggaaattgaggtacggagcgggtgagatatttgacgtttgtttcgcgttgtcggcggtaatattttagaagcgggtttgaacgtgtttagtcgtgtttttagtttttttttttgagcggagtttgagttttagatttttagttttttcggtttttatttgagtttagtttagagatgaacggggagtcgtttttttgtgttgggtttggggttggaggttgtattttttcgtttttagggttttttttttttttttgatcgacgtagtgtttagttttggtcgggattcgagttattttttttgtttttgtaggacgtatatggttgggtttgaatttttggggtgaggagtatcgtggtttgagagggggtttttgggttagttttgaaatttgaatgttttaattataaagatttttttaggttaggttaggggtgattgtttttggtttttgtttttggttgttggtatatagtattcgaaatttttggaaatcgagtgatgagagagttttttgtttatgaggtgattgatgatcggggatattaggtggttttaggatggaagtagatggttagaaagattaaggtttgatgacgggttgggatggaaaaggggtgaggggttggagattgagtgaattattagtggtttagttaattatgtttgtataatggaatttcgtaagaaattatagggattagagggtttttcgtcgggttgtggaatatattaaggtattggagggtggtgcgagtagagagtatagtattattgtttttattttatattaggttttacgtattttttttatacggttgtttgagttttattttttgtaataaattagtaattgtaagaaacgtatttttttgagttttgtgattttgaagagggagttttgggaatttttgaatttataattagttgatcgaaagtataagtgataatttgggatttgttattggtttttgaagtgaaggtagtgttgtgggattgagtttttaatttgtggagtttgtgttgattttaggtagtgttaagattgaattgaattgtaggatatttagtcgtgtttagaaagttgtagaattgatgggtgtgagaaaaattttatatatttaatgttagaagtgtgggtaaaatgttttattttttagtttagagagttttaatttattagtggtttacggtggaatattacgttcggtcgggggtagagcgtttttagttaagttttttgtaatatgatatgataggttagattttttcgggttttgagtttatttttttttggtatgtgattagtttttagtattagagaaggttgtatagttttttgttttaaggagttttattggttaggggttgttttttgaaatttttgtttgtttttgttttaaggttcgttttttagagacgtagatttttttgatggttgattttggtttgaggatttttttgtattttttttttatggttttgtttttaggatatttttttttttttttttttggggttagatttgtttaggtgcggtggtttttttagttttttttacgttttttttatggtgtattatatatattaaagggatttttttattgaaatttatgtatattgaatcgtatgtgggtttcggttgtttttgggaggagttaggttaatagaatgtttgttataaaatattaatgtatagagaagcgaaataaaggtcgttggtatttgttaattttattagtagaataatgaaagcgaatttttatattttatttgtacgcgatatttttgttgtgtttgtattcgaggttttaggtgtagttattgttatagagattgtgttttttttttatgtatttcgggggtcgggaggggttttgatttgtaaagtcgttagaggttaagtttttttttttttgtggttttgttatttttggagtgttatttttagttgcggtgtttaggattttttattgtggtatgttcgtgtattagttaataggaaagggagtaaggaaaggtattgggtttttttaaggatatacgagttgttagaattattttcgttgatatttagtggattaagtcgtatttttatgtagaagtggggtttttagttaggcgtggttatttttgaaattttagtatttcggaaggttaaggggggtggattatttgagtttaggagttcgagattagtttgggtaatatggtaaaatttcgtttttataaaaatatagaaaattagttgggtgcggtggtgtgtgtttatagttttagttatttaggaggttgaagtgggaggattgtttgagtttgggaggtggaggttgtagtgagttaggattttattatagtattttggtttaggcgatagttgtttggtttgttttaagtgtttatttgttttgttggtttttttggggatattttaagcgtgtttgatttgtaatattttagtagattgtgtaagtgttttgtatttttttgttggagtttttttcgtttttttttttggttttttttttagtttagatagtagggtaatatttattttggttattttattttatttgtttgggtgttgtagtgttagtcgcggttgatgttttagagttgttttgagagtttcgtgagtgtcgtttttttcgtttttttgttgagttcgtttttttttttcgtagg

SEQ ID NO: 728 - DNA, 8073 bp, Artificial Sequence
  chemically treated genomic DNA (Homo sapiens)
tttgcgggagaagaaagcgggtttagtagggaggcgggaggggcggtatttacggggtttttaaagtagttttgagatattaatcgcggttggtattgtagtatttaggtaggtggggtaaggtggttagggtgggtgttgttttgttgtttagattggggagagggttagaaggaagggcgagaaaagttttagtaggggagtgtagagtatttgtatagtttgttaaaatgttataaattaaatacgtttagaatgtttttaggaagattagtaaggtaggtagatatttgaaataggttaaatagttgtcgtttgggttagagtgttgtggtgagattttggtttattgtaatttttattttttagatttaagtaatttttttattttagttttttgagtagttgggattgtaggtatatattatcgtatttagttaattttttgtatttttgtagagacgggattttgttatgttatttaggttggtttcgaatttttgagtttaagtgatttattttttttggtttttcgaagtgttgggattttaggagtgattacgtttggttgggagttttatttttgtataaaggtgcggtttggtttattgggtgttagcggaagtgattttggtaattcgtatgtttttagggggatttagtatttttttttgtttttttttttattgattggtgtacggatatattatagtggggaattttgggtatcgtagttgagggtgatattttaggggtggtaaagttataagagagaaaggatttaatttttggcgattttgtagattagaatttttttcggttttcgaggtatatggggaagaaatatagtttttgtaatagtggttgtatttggagtttcgggtatagatataataaggatgtcgcgtgtagatgagatatgggggttcgtttttattattttgttggtaaggttaataagtattaacgatttttgtttcgtttttttgtatattaatattttatggtaaatattttattagtttggttttttttaggagtagtcggaatttatatgcgatttaatatgtatggattttaataggggagtttttttggtgtgtgtaatatattatggggagggcgtggggaaggttgggagagttatcgtatttaggtaagtttgattttagggaaaggaggaagaaggtgttttaggagtaaggttatgggggagggatgtagagaggtttttaaattaaagttagttattagaggggtttgcgtttttgaggaacgggttttggagtagaggtaggtaaggattttagaaagtagtttttggttagtgaagttttttggagtagaggattgtgtaattttttttggtattgggagttggttatatattaggaagaagtgaatttagggttcgagggagtttgatttgttatgttatgttatagaaggtttggttgggaacgttttgttttcggtcggacgtggtgttttatcgtgggttattggtaaattagggttttttgggttggagggtgaaatattttatttatatttttgatattaaatgtgtagggttttttttatatttattaattttgtaattttttggatacggttgggtgttttataatttaatttaattttgatattatttggagttagtatagattttataggttaagggtttagttttataatattgtttttattttagaggttaatggtaaattttaggttgttatttgtattttcgattaattagttataaatttagaggtttttaggattttttttttagggttatagaatttaggaaagtgcgttttttatagttgttggtttattataaaggataaaatttagatagtcgtatggaagagatgcgtagggtttggtgtgaggtgggggtagtgatgttgtgttttttgttcgtattattttttagtgttttggtgtgttttataattcggcgggaagttttttgatttttgtggttttttacggggttttattgtgtaggtatggttgattaagttattggtgatttatttaatttttagttttttattttttttttattttaattcgttattaggttttggtttttttggttatttgtttttattttgaagttatttggtgttttcggttattagttattttatgagtaaaaggtttttttattattcggtttttaagggtttcgggtgttatgtgttagtaattagggataaagattagagatagttatttttggtttggtttaagggggtttttgtgattgagatatttagattttagagttggtttaggggtttttttttaggttacggtgttttttattttagggatttagatttagttatgtgcgttttgtaggagtaggagaggtggttcgggtttcggttaggattgagtattgcgtcgattaaaaggggaaaggaaattttagaaacgggaagatgtagtttttagttttaagtttagtataggagggcggtttttcgtttatttttaagttgaatttagataaagatcgggaggattagaggtttggggtttaagtttcgtttaggggaagaggttgggggtacggttaggtacgtttaaattcgtttttgggatgttatcgtcggtagcgcggggtagacgttaggtgttttattcgtttcgtgttttagttttttcgttagttgcggtacgcgtagagtttttttcgttgaataacgggcggacgaggagaatttagaggtggtcggggtttttcgcgttatcgaggttattgttttatttgttgttttattttcgatttttattcgcggtttcggcgataattttagtttttttaattgagaggtcgcgcgggtagtcgatcgttttatcgattcggttcgcgtttagggaagtttcgtagtttcggttcggtttattttcgcgtacgcgcgttttggtcgttcgcggagatttcggggtcgtgttcgggggcgcgtagaggcgggttacgtgatcggcgggagttcgtcgcggggcggggtcgcggtgggttacgtgacgcggtttttcgcgtaggcgttcgaggtaagggtgcgcgttcgcgttacgttttttagtggcggtttcggtagagcgggtttgggcgcgttttcgttttcggagggggtttggggagcgcgtttggttgcgcgttcggcgtttcgcggggagaggtttacgcgtgttgttcgttgtcggtttttttggggttagagacggggcgaggttttcgttggcgtagtttcggttcggttttcgtggggtcggagatggggcgtggttttcgttgtttcggtttgggttttcgtagttcgtagggttttgtaaggggttggtttagtcgcgttttgcgtttagggattttttttgttaacgcgtttcgagggtattatcggaaaggcggttaaaggcgtttagcgttaagttagaaatagttaatatttggaaagtttttaagtgtgttttataatttatagttattttagaaaggaataattaaaatattgtgataatttataaaattgataattgagaaaatattaaattgatatagggggaatttttttataaaatgagaaaatgtttatattaagaggagtatatttttatatgtgagatataaaaaatatatagtataattttaatttgtttaataaaatgtatgtgtagaaaaatataaaaggagttatattaaaatatagaggtgttgtttttgggtaggggtataggggtattaaaagttttttttttagtttgtagcgagtcgagatcgcgttattgtattttagtttgggcgatagagcgagatttcgttttaaaaaaaaaaaaataaaagttttttttttatttttgttgtggtttttgtatttttataatgttttaaaataagtaaggttgatttagaaaggtttattagatatttagaaaaaagattttatttttttgttgaaatgtttgaaagtgaaattattttgtagagtattttttttttaaattgtaaagaagttttaaggttattggtatttggaagtttagggagaaagagcgttgggttaatgatggagaaaagataggtgggtagattggggcgtagttttttggtgtggacgttttagcgtgtttttattttagtgtttattttgttacgtgtgtttggggttattgatttttttttgtaagttgtggatttgaatttaatttaaatggggatatgggggtaggaaaagggatttgagagttttaaggggtggggatgggaaaattggtaaagaaggtggtttgtgggtttttagatgtatttagtagagggaagtgttggggggattagtttttcgggttaggttggttggagttgttttaatttttttatttttgtttagtttattagtttgtggatttgtggtagcgttgtgttgtgagaggtacgtgtagatttgggagtgttgtaaattaaagtgttatttggacgagtaagtttagtgtgggagtgtgggtgtgtgggtttgtagttataggttttgtttttgcgatgggatgttatgggaaacgttaggattttatttggtttattaaattgttgagtggttaaaaagatttttatgggtggggttggtttattttttttaaacgatgtttttttgagggtatatgtggtttttaggaatataaaagattttaagttttttatgataaatataatttcggatttttttttggaggttttgtaaggcggagtttaggttgttttttaggagggttttggtgattcgagtttgttggcgattatttggttgattttgtgtagggttttttggaattgggggtattcgtttcgtacgcggtttaggatggtggcgatgagagttagtcgtttgtttaggcgttggcgttttagtattagggattgtttggagcggaataggaatacgtagcgttttttttttatagtttgtaggtgtttaaggcgtgtttgtagggttacgatttttgaaaggttttgggtaggaaaagagattttatatagggttatgtaaattagaagaaagatatttgttggttttttataaatttagattttaggaaatgtcgaagaggaggcgagatttacgtttgaaaagggacggcgtgaaggtgttgcgtttttggattttagggaagaggttgagaggtattgggtcggtgttttatgggttatttattattattatttaggaggtatttttttttttttttgagatggagttttgttttgtcgtttaggttggagtgtagcggtgcgatttcggtttattgtaagtttcgtttttcgggtttacgttattattttgttttagttttttgagtagttgggattatagatgttcgttattaggttcggttaattttttgtattttttttttttttagtagagatagggttttatcgtgttagttaggatggtttcgattttttgatttcgtgattcgtttgtttcggttttttaaagtgttgggattataggtgtgagttattgtgattcgtcggtattttttttttttttttttgaggttgtttcgttttgttatttaggttggagtgtaatggtataattttggtatattgtaatttttggttttcggttttaagcgatttatttgttttagttttttaattagttggaattataggtatttatttttattattacgttcgggtagttgagattataggcgttcgttattatgtttggttaatatttgtatttttagttgagatggggtttcgttatgttggttaggttggtttcgaatttttgattttaagtgatttatttgttgcggttttttaaagtgttgggattataggtatgagttatcgtgttcggtttaggtaatttttttgatatttgtcgtgtgttaggtttagtgttaggtacgttttttttattattttagttggttaggttagaattttggagttattttttattttcgtttttgtttatattatagttaatttagtaggaattttatcgggcgatgttggtataacgtatatgtagagtttgatggtttttcgttagttttataggggtcgttttgaagtattgtaaatagttttaggtgtttttcgtatttatgttttatttatatgtaattttagagcgcgcgggagttcgttaaagtttaagttattttttagatttaacgtttttttttgtgtgtttatttttttaagagaaaagtttaaagttatgattgtgttttttttaaggtcgtatatagtttgggtcgtttttttttgtttgggttttatatattttaatttttttagtttgttttattggtttttagtagtttttgcgtagttttaggtttttgttttgtcgggttgttttgtttatttggggtggttttgtgggttgtttttttttttaggtttggattttaatgtttgtttcgtagggttttttcgtattattttaatttaaaatgttaattttttagtttattttaatgattttgacgtttttttttttggtttatttttttttaaagtatttattattatttaatatattattttttttttttttttttttttttttttttttttttttttttttttttttttttttttttttgagataggatttttttttgttatttaggttggagtgtagtggtataattttggtttattgtagtttcgattttttaggtttaagcgatttttttattttagttttttgagtagttggtattataggtgtgtattattatgtttagttataatatattgtattttttaaaattattttgtttattatttgtttttttgttttaggaggtaatttttaagagtataggaatgtttgttttttgtgttttattttgtaattttcgtacgttgaatatgagtttagtttataatagatattttattaatatttgttagtggaataaattataaagttataaatatgtgagtagtcggtggtgttattattggtttgggattaggagaggtcgtgatttgattaggagaggtcgtgattcgtatagaggggacgtaggatttttgtgtgagtggtatgttttatggtcgttatttttagggattttttgggatacgtttatttgtcgtttgagggttttaagtcgggtgaggtcggtttcgagtgtgtcgaagtttgattgaattatcgatagttttttttgtttttttaggagggagttgtttatatttttttgggttttttttcgttttaggacgggtttggtgtatttatcggggggttaggaaaatataggattatgttgggtttttgtagttcggttatttggcggttagggaagagttaggttgggaggatttgttaggtattttttatatattttatttagggaggtttttaaagaggaatgggagggttggagaggcgaggtttgggagatgttaggtttagttagtttatattgtatattgtttttttaaggtaggtgtggtagagagatgggggtttgagtggttttggggtttttcgtgtagtgggtttgtttttaggtaggagattggtatagtttagtagtcgtgtgttaagggtagggttgaggttgtaagggtcgagaggtaggttggggagtttgggagagaggagggtgggggtttttgttgagggaggagcgaggttggggttatttgtgtggtgttcgtttcgttttcggggaaagtagtataattaagagaaagaaaagtcgggtaggtagtgtttggtagttgatatggtttagggggtgatgtaggagatatagtgatttttagggttggttggggatacggaagatttttggggtggggttggtaggggtgaggataaggatttattagtgatggcgtcgtgtggggcgtagggtttggggttggagaatttgagtgtggtttggagtagataggaggtgaggggtgggtatggggttttggtaggggatttagggggtgtttagggtagtaaggagtggttaggggtcgggttaggaagttgagggagggatggatat

SEQ ID NO: 729 - DNA, 5945 bp, Artificial Sequence
  chemically treated genomic DNA (Homo sapiens)
ttgttgagaattatcgtagatacgtttggttattatttagtcgtttcgattgtgttttttttaaatgttcgcggttggtagaacgtgggaggaagaggattcgtttaattcggggtaggtggggacgcgttgtttattgtggtgaggttgatatttgggttttgggttttatttgtaggtgttgggcggcggagagtttcgagaaggaggaggagagagagttagtagttaatttttacgattttaggaggtttttgcgtaaaattttttagcgtcggcgtttcgtttagtagttttaatcgtttaacgaggtagttatcgtcgtcggaaggcgttggagtttgcggggtagtaggggttaagtaggtattttggggttggtattagtaggtattgaagttgcggttttgattttcgtagaggttgtttgttgcgttcggtttttaagtgttcgggtcggttttcgtgtttcgaaataagagatttgggagttttcgggaaatttttttcgacgttttttttcggaattttcgtattttttttttttattagttcgttagttgtggtaattttgtttttgtttttttaatttattattttgttttttttttttgtgatttttgtggattttattgcgtttgggatttcgttaattttttttttatttggggtgattgaatttatagatttttttttttattggaaacggttttttttggttaatagaatatttgttagcggttgaattttagagaaaaaagttcgggaggggtggggagaatttcgaagatgtattttattttaagtttgttttttttttttttttggttattaaggttattaaataaaggaagtgttttggaaaattcgtggtttgcgtgattgattttttatttttttttttagggtttttgaggggtttttgttataaggttgtgttggtgacgggtttaaggaggggcgttgaggtgtttttattagcgaatttttagtattatttagttattttagataaatataatttaagttaaaattttttgttatataaacgtagaggtttttaatgtttaaatttttaatatattatacgtgttcgtttgtacgatgtttttttaatttgcgtgattgtttttggttttatttataaagatgttagtgtttttattgggtggaattgttagattttaggttttttcggtttgtagatttggggttatttttgttatttcgattttgtgtgtatttaaaatgggggaggttagtgggtggatagaagtttgtatttttgggttgattgtattttattttaaaattcggtttaagttgttttatgaaattgatatttttatttaagtaatttggagagggtgaggataggtgatgaggtcgttgtatggaattggaagaagggttttgattacgatggggtttattttttgtgtgggtgtttttggtttttgtatttataagtcggagttaaaagattttggggaaatattcgaggagtgagtgagggtatgtgtagagggtttagagcgtttgttgcgtcgttggtttatagggtatagtaatttcgttaatttaaagagttggtattaaaaggtttttagagttaattcgtgtaatttttttattttatagatgtaatgtggttaagggaaaatttgtagttatggtatggtagagtttaagtgttttttaggttttttttttttttgggttagcggtatagttttgttggggttgcgattgaaagtaaggagtaatttttagttgtgcgaatgtattgaggagttgagtatggtttagtatttaggaaattagtatagtaggttattagagagaggggtttgggaggggtaggggtgtttaaagtttaaagtggtttggtttttttttatttttagttgtttgtttatttgtttttagaaggtttgggtttgtggggagggcggagtaggggttaggggtaaggagtagtaagttaagtttagtttttttgtttggttattttttaatttaggcgttttttttgggtggtttttgaagataagagttttggtatttagttttttttgttatttttgttggtgtagggagaatttatggagggaggtaatagattttttttttaaattttttttgtattaatgttttaagtgagaatagaaaagagaatggtaaaggtttggtgaatgtttggttgtaatatttttgtgttttttcgtggttgttttttttttttttttttatttttttttttttttttgttttttgatatttaagtacgggaaggatataggaaaatgtgtgttagatatttttttttgggttagtttgagatttatatgttggtaaattagatatttaaggaaattgtttttataagtcggaggattgggtttttcgttttttatttgaggaagggttttttaaagcggtcgttttttttttttatttattggttgttttttttgtgaattaatgattgtaattattattttttagagtttttttgttatttttaattttaagtttcggagagggggaatgggttttttagtgaaatgaaagttattataaagtaaattatcgtttagggagggatagtttttaggaaagataaattagatttttatttgtatttgaagtagggtgtgtttaaataaaaaatgtaaatattattattagatttaaagtattttagagttgtgggatttaatggagtttaaacggtagtatttgaagttattgttttattaaaaagaaaaaaaaattagttaaatttaggtgttttaattcgttttttttttgggggttttgtgtgatttaaacgtttgtttttaagaatttttatgtttttaattatttatttatagtagaaaagttttgtaattttagattgttggtttgaaggaaaatttttgtaggatttgatatggattttaataaagaattagtttttgcgaggttggagagagttgcggagttgttatgtttgaagtgtagatggttgaattataagtttttaggttttcggagttgttattgtggtgatttagagtgttagagttaggagagtaagaaagaggagttaaattgagttttgagttttcgattattcgggtttttatagtttggaatagattttatttagtacgtttagtgttagttttcggtaggacgttattaacgttcgattggttttttgtttttattttggcgtttgggtttagttgttatagtgtggattttatgattttttagggaatttttggatttaggtacgcgagaagaagatagcgttttgtggagagaattgattagggatagttatgttcgagtatataggatttgggtttgtatgcgtttagtatgggttttaggatgttttttttaagcgagggtcgaggggtgttcgtttagacgggattttcgggtttttgttttgttagtagttttggtggttggtttaggaggttagagaaataaaacgatttgtgaatataatggaaatgataggcgttttggttaggcgcggggaaggtagtcgtttcgggaagtcgattttagttttttttttttttttttttttttcgttttttttagagtttcggagtttcgaggtgtatttgaagtttatttttattgttaggagaacgtagcgtaaattgttaaagggtttttaatttttagggcgttttttttgtttgtaatagttttttgtagaaaggaaattattagaacgattttgattttttttttttttttttattagaaaaagagaaatcgttttttaatacgttttagagagaattaatttcgcgttttcgggttattcgttatcgcgaagattttttgggggcgagggggggtattggtttgaagttttttaaaacgagggttttgtaggcgatgtttttttttttattcggatttgtaaagtcgagattgtttagttggaaattttgttttttttttttaggcgtatatagattttttttatacgtaagtagcgggcgtttttacgttttcgcgggttaaggttattaaatgttttgattttattttttattcgttattaattttgtcgattttggtcgttttgttttatttttttttaagaagtttttattcgttttatttttttttttttagttcgaggtttttagtagattttagcgtggattttaattgttttaattagtagttattttttttagtcgttatttagagtttggacggtgggtttcgcgatttagtttttggttacgtaggaacggtgcgttttcgggtacggcgcggtttagtaggtaggcgttaggttttattaaggcgttgaaatgagtttattagcgggtaggagtttttttttcgtcgttttttttttaggttcgtgaacggcgtttgatgttcgttcggggcgcgagttttcgaggtcgtagtgattttagtatttgtttggaggaaaacggcgcgggaatttcgtttttttttttttagttggagttagattttaaataaaattttaatcgatgtatatagaaaatttttttgggttacgtttttcgtttcgtcgaggtttttttagtttgtttttcgttgacgttggcgcgtagcggttgtggtagtattcgggatagcggtcgttcgtatttttcgtttttggttcgttcgaggacgcgttggtacgttttttatttttttattttgattttagttggcgtgtatggtttgtttcgtatttttacgatttagttttttttttttttcgtgtttttttttttcgtcgtttttttatttatttttattgggtttttttttttttaaatgttttggggtttttcgcgtttttttgagttcgggtttcgaggatttttaggtagtttcggttttttttaaagtttttcggtttttaaagggttgttacgtttttaaattttgtttttagttcgtatatatatacgtatagatacgtacgttttttgtttttgcgtgatattcgttttcgtcgttcggtttcgtcggttttcgcgcggtgtttttttttcgttatacgggtacgtacgcgcgcgtagggttaagttcgaggtagttcgttcgtagttcgtattcgtaggcgatttgttttagtttttaaagtcgatggtattttcgggttttggtttttggtttttcgggtcggaagatggttttggggatttcgagaatttcggtataggtaggaaggagaacgggggtttgcggcgggcgagttttgcggtggtttggggtttgcggaattacggagaagacgaaggaggtttttttatttgtaataggaaattttttcgggcgtttttttttgtttttgggttaagtttttgacggtttaagagtttaagatttttatagttttttgtattttgggaagacgtttaaatagttttaggttcgttttatagaaggttggaagagttttttaaagatcgcggtgtttcggggatatggaatttcgtggttttggggcgttgttaagattcgggtgtttggattttggggtgggacggagtgatcgtgaagatagaaaaaaaaaatgggaaaggtgagagatttttttatttagaaagatagtttgcgaaaaaatggatagttttagtgtttaggaaaattcgtttaaggtaggtagggagaggaatttgtttgagtcgattggtattggaagggtagcggtgtgggttttttttcgggaaatagataaaggaaatgagggttggttcgggtcgttagtttttcgtttgttttttgtatttgtcggttttatcgagttttgagcggtttttaggaggaaggcggttttttttaggatttcggattgattgatttttatatagaacgaaattttatacgttcgtttgttgttttttttttgtttcgttgtttgtttgtttatttttttttgtagt

SEQ ID NO: 730 - DNA, 5945 bp, Artificial Sequence
  chemically treated genomic DNA (Homo sapiens)
gttgtaaggaagaataggtaggtagatagcgaggtagaaagagaataatagacggacgtgtgaaatttcgttttatgtgaaaattaattagttcggggttttaggaggggtcgttttttttttgggggtcgtttaggattcggtgaggtcggtaggtgtagaaggtaagcgggaggttggcggttcgggttagtttttattttttttatttgtttttcgaggagaagtttatatcgttgtttttttagtgttaatcggtttaggtaaatttttttttttgtttattttggacgagtttttttaaatattgaagttatttattttttcgtagattgtttttttagataaagaaattttttattttttttattttttttttttatttttacggttatttcgttttattttagggtttagatattcggattttagtagcgttttaggattacggaattttatgttttcgagatatcgcggtttttggggggtttttttaattttttgtggaacgggtttgagattatttgggcgtttttttagggtataagaggttgtagaggttttgagtttttgggtcgttaaggatttagtttaaaagtagggagaagcgttcgaagaagttttttgttgtaggtggaaaaatttttttcgtttttttcgtagtttcgtaaattttagattatcgtaaaattcgttcgtcgtaggttttcgtttttttttttatttgtgtcgggattttcggaatttttagagttatttttcgattcgaaagattaaaagttagagttcggagatgttatcggttttggagattggagtaggtcgtttgcgagtgcgagttgcgggcgagttgtttcgggtttggttttgcgcgcgcgtgcgtgttcgtgtggcgggaggagggtatcgcgcggggatcggcggggtcgagcggcgagggcgggtgttacgtaggaatagaaaacgtgcgtgtttgtgcgtgtgtgtatgcgagttggagatagggtttagggacgtggtaattttttggaagtcggggagttttaaaagagatcgggattatttaagggttttcggagttcggatttaggaaagcgcggagagttttagagtatttgagggaaagggagtttagtggggatgaatgagggggcggcggaggaaaaaaatacgagagagggagggagttgagtcgtgaggatgcgaggtagattatgtacgttagttggagttagagtgagggggtgggaggcgtgttagcgcgttttcgggcgagttagaggcgggaagtgcgggcggtcgttgtttcgggtgttgttatagtcgttgcgcgttagcgttagcgaggggtagattggggagatttcggcgaggcgggaagcgtggtttagaggagttttttgtgtgtatcgattggggttttgtttgaggtttggttttagttgaggggaaggaagcggggttttcgcgtcgtttttttttaagtaggtgttgaggttattgcgatttcgagagttcgcgtttcgggcgggtattaggcgtcgtttacgagtttggggaggggacggcgggggaagggtttttattcgttgatgggtttattttagcgttttggtagaatttgacgtttgtttgttgaatcgcgtcgtattcgggggcgtatcgtttttgcgtagttaagggttagatcgcgggatttatcgtttaggttttgagtgacggttggggagaatgattgttgattgaggtaattaaaatttacgttggagtttattgaggatttcgggttggggaaaaaaaaataaaacgaatggaaattttttggaagagaatgaggtagagcggttagagtcggtaggattgatggcgggtgggggatggaattagggtatttggtgattttggttcgcggaggcgtggaagcgttcgttgtttgcgtgtaagggggatttgtgtgcgtttgggaggggagaatagggtttttaattaagtaatttcggttttataaattcgagtaggaaagaaggtatcgtttgtagggttttcgttttaaggggttttaaattaatgttttttttcgtttttagagaattttcgcggtagcgggtgattcggaagcgcgagattggttttttttgaggcgtattaggaggcggtttttttttttttaataaagaaaggaggagaaagttagaatcgttttgatgattttttttttataaaaagttattgtagatagggaggacgttttaaggattgggagttttttgatagtttgcgttgcgtttttttggtagtggagatgaattttaagtgtatttcggagtttcggggttttgggggagacggagggagggagagagaggaaagggttgaggtcggtttttcgaggcggttgtttttttcgcgtttggttagagcgtttgttatttttattgtgtttataagtcgttttatttttttgattttttgaattagttattaaagttgttaataaagtagagattcggggatttcgtttgggcgagtatttttcgattttcgtttagaagggatattttggggtttatgttggacgtatataggtttaagttttgtgtgttcgagtataattgtttttggttaattttttttataaagcgttgtttttttttcgcgtgtttgagtttaggggttttttgaggagttatgggatttatattatggtaattgggtttaggcgttaggatgagagtaggaaattagtcgggcgttgatagcgttttgtcgaaggttggtattgagcgtgttaggtgaagtttgttttaggttgtgggagttcgggtggtcgaaaatttagggtttagtttggttttttttttttgtttttttggttttgatattttaggttattataataataatttcggaaatttaaagatttgtggtttagttatttgtattttaggtatggtagtttcgtagttttttttagtttcgtagaggttggttttttgttgaaatttatattaaattttgtaaaggtttttttttaagttagtagtttagggttgtagaatttttttattatggatgagtggttgaaaatataaaggtttttaaaagtaagcgtttaaattatataaaatttttaaagaagaaacggattaaaatatttgaatttaattgatttttttttttttttggtaaagtaatggttttaagtgttatcgtttaaattttattaaattttatagttttggagtattttggatttaatggtgatatttatattttttatttaaatatattttattttagatgtagatggagatttgatttgttttttttgaaggttgtttttttttagacggtaatttgttttgtaatgatttttattttattaaagagtttatttttttttttcggggtttggggttggagataataaaagagttttgggaggtaataattatagttattagtttataaaggaggtagttagtgaatgggaagggaaggcggtcgttttggaaggtttttttttagatgaggggcgagagatttaatttttcgatttgtagggatagtttttttaggtgtttggtttattaatatatgggttttaggttgatttaaagaagagtgtttggtatatatttttttgtgtttttttcgtgtttaaatgttaaaggatagagaaagaagggaagatggaaagaaaaagaggaaataattacggaagaatataaaaatattgtaattaagtatttattaagtttttgttatttttttttttatttttatttaaaatattggtgtaggaaaaatttagggagggagtttgttgtttttttttataaattttttttatattaatagaaataatagaaggggttgagtgttagggtttttgtttttaggggttatttaagaaggacgtttagattgaagggtggttaggtagaaaagttgagtttagtttattgttttttatttttggtttttgtttcgttttttttataaatttaggttttttggaggtaagtggataggtagttagaggtggaagggggttaggttattttgggttttagatatttttgttttttttaagtttttttttttggtgatttgttgtgttggttttttgggtattgggttatatttagttttttagtgtattcgtatagttgagggttattttttatttttagtcgtaattttagtaagattgtgtcgttaatttagggaaaaagaaggtttggagggtatttggattttgttatgttatagttgtaggtttttttttggttatattgtatttgtaaaatgaagagattatacgagttggttttggggattttttggtgttaattttttgagttggcgagattattatgttttgtggattagcggcgtaataaacgttttgagttttttgtatatgtttttatttatttttcgaatatttttttagagttttttgatttcggtttgtgggtgtaggagttaagggtatttatataaggggtgagttttatcgtgattagaattttttttttaattttatgtaacgattttattatttgtttttattttttttaggttgtttagatgggaatgttagttttataaaatagtttaaatcgggttttagaataaggtgtagttaatttaggaatgtaaatttttgtttatttattagttttttttattttaaatatatataaagtcggagtagtaaagatggttttaaatttgtagatcgggagaatttgaaatttgatagttttatttagtgggggtattagtatttttatagatggggttaaagatagttacgtagattgggaaggtatcgtgtaggcgagtacgtgtggtgtgttggggatttagatattggaggtttttgcgtttgtgtggtaaggggttttagtttagattgtgtttgtttgaagtggttgggtggtgttgggagttcgttgatgaaggtattttaacgtttttttttgggttcgttattagtatagttttatagtagaagttttttagaagttttagaggggaaaatgagggattagttacgtaaattacgggttttttaaggtattttttttatttagtgattttaataattaaaggaagagaaagagtaagtttgagatgaaatatattttcgaaattttttttatttttttcgggtttttttttttaagatttaatcgttagtaagtgttttgttggttaagaaaagtcgtttttaataaaaaaaaaaatttgtgaatttagttattttaaatgagagaggggttggcgagattttaggcgtagtggagtttataggagttataaaaaaaaagaataaagtgatagattaggggaataaggatagggttgttataattggcgggttggtgagaaaggagggtgcgggagtttcgagagagagcgtcgggggaggtttttcgagggtttttaggttttttgtttcggagtacgaaggtcggttcgggtatttgagggtcgagcgtagtaggtagtttttgcggagattagggtcgtagttttagtgtttgttggtgttagttttagagtgtttgtttggtttttgttgtttcgtaggttttagcgtttttcgacggcggtgattgtttcgttgaacggttaggattgttggacgaggcgtcggcgttgggaggttttgcgtaggagttttttgaagtcgtaggggttggttgttggttttttttttttttttttttcggggtttttcgtcgtttagtatttgtaagtgaaatttagggtttaagtgttaattttattatagtgagtagcgcgtttttatttatttcgagttaggcgggtttttttttttttacgttttgttaatcgcggatatttaggaaaggtataatcgaaacgattggataatggttaaacgtatttgcgataatttttaatag

SEQ ID NO: 731 - DNA, 5238 bp, Artificial Sequence
  chemically treated genomic DNA (Homo sapiens)
atttagtaaaaagaaaaattgagattaatataaagataggaataatttgtttttgtagaattaattgtggggaaagtagtaaatttaaaagttgtacgatagttatataggtatgttatttatgttattatttatataataagtatttatataatatataggatgtgtgggttatttttttaagtgttataaaaatattagtttgtttaatgtttatattaatgtattgttattattatttttattttatggatgggtaaattgaagtttaaagaagttatataatttaattaaaattatattgttgttaagtaataggagaaagatttgaagttaggagatttggggttttagagttagtattttaattattatattatattgttttttgttatagaagtttttatttgtagttatatttaagaaaatgtttagtaagtaatttataatttattttattaggtggattttgttttttgatttatttttattttgtttatataaaattttgaatgaatagagttttataatatattttagagagaagttatttagtagggtagtataattaatagttgttattaagaaatacgtttagagttgaaagattagataaatggtagatgttggatatatattgaaaggaatataagttatttttttataaagatatatgtaagtggatggttattttagtattatttgtaatagtaaagttatggaattaatttaaatttttattagtggtttattaatggataaagaaaatgtgttatatatataatttggaatattatgtagttataaaaaagaatgataggttaggtgttgtggtttaggtttgtaattttagtattttggaaagtcgaggcgggtagattacgaggttaggagttcgagattagtttgattaatatggtgaaatttcgtttttattaaaaatataaaaattagttaggtgtggtggtatattttgtaattttagttatttaggaggttgagttaggagaatcgtttgaatttgggaggtagagattgtagtgagtcgagatcgtattattgtattttagtttggatgatagagtaagattttgttttaaaaaaaaaaaaaaaaaaaaaaaaaagaatgagattatgttttttgtagtaatatgaatggagttggaggttattattttaagaagattaatataggaatagaaaattaaatattgtatatttttatttataagacggagttgaatatcgagtatatatggatataaataataataaaataataggtattggggtcgatttaagggtggaggatgggggatggggaaggattaaaaaattatttattgagtattatgtttattatttgggtaatgaaataatttgtatattaattttaggatatgtaatttatttttgtaataaatttgtatatgtattttgaatttaaaataaaaggtaaaaaatatagtagatgttataggatagtttaagaaaatattttatatttttatgttttaggggatttttattttaagaaacgtttttaattttttttgtaaataattttttattcgtatttttttatgtgattatttagtgatttgttttttagtttaatttaattaatatttattgagtatttagtatagtttgggtattgtgtttaagatatataaagaagaaataaatttggtttttgttttggaatttttgatagtttaatagtaaaaatatggaattaatttaaatgtttattaatggtagattgaaggggaggtggattgatttataaaagtaaagtttttttttgaagtgagataatagattgttattatatcgttttatgatagttttggggaaataaaaaaaaaaatttagattgttattagagtttattaataaatttttattaaaaggtaagatttttgattttttttaagagattatttgattttgattatattattttatttagaaaaaggagagatttggggtggttgaagtatagttgtgatatttagaaatatttgttatttaagagaaaaattatcgtgttttttttggtagtatatttataaatattggaatgttatagagattagtgtggtttttgagtaaggatgatatgtaaatttttgaagtgttttagattaaaaagatagagagagaaatattgttattattttttaaatttatttaaaatttgaaaattgggattttttttttttatcgttttattttattgattttgatttatagacgtaagggaagttaagtatatgattattcgtggggtaattgttatttttttttattttatattttgagtatatttgagtgtcgtgtttagtattttaaggatttttgttagtatgtatttattggttttttattagaaatttttttattttatgtttgtttttatgaatatagattagaaattagaaataaaaaatatttatttggtaagtaatttttttggtaattgaattaataggaattattgggattttttggaagtgaggttattttttttattagagtttatgtttttttttttgtagattttatatattgtttaaatatttgtggcgtgtattttaattataaggtgtaattgagggacgagaaaagggaaaatttagttgggtagatagttaaagttggtttttggtaaaatttttttaaatagaaagatagtttgaaaaattaagttataggtatatatagagtggtttggggaaaatttaggtaatagttgttttgataagaaaggaaggtttaatatagaagttttttgttttttgtgtgattagtaggtttttaggaaaaagtttttttttttttttaggtatatatatggtgggttttgtgggaatttgtatgggggtggagagggtgattatttagaatttatagttatataaataagagaagttgaattttatttttatttaagatatatttatagttgtatagataaggggagttgtatagatagttttataagtaagttatataaatagttatagagatgagaggagttttttataaaagtttttggatttaattgtaaaagtggtaaaatggtaaagaaagaaagttttttttttttatataataaattttttttttaattttattttggtgtttatattttttaatttttttggttgtgagataataagtttggataatattttagataacgagattattgattattgattcgttttataatgacgtattataggatggtgtatgttgggtatttatatatcgttatgtaattttttagttttatgtgtaaggtagttttttttgttattattttggtattttttatttagttacggtattaagtgggttttatgcgtttgttaagagttggtaagagaagtttaatatttatttgatggaatggttattgtggtttgtatttataggagttttagtttatgtttaaaatattgtgttagaataaatggattagagtgaattttgtaatagtaaatttatagaattgaaaattattgatttgtattataaattggttgtagtggtaaggtagagagtttagattcgtgttgtattggggaaagaagaaattaaagaaaataagtggtttatatataggggattatttaattgatttaagttagaagattattgagggtgaaaggagtattattagtaattatgtttagataaaagttgtgattgtttttagtaaattaggatagacgtagagttaatttaaaaagaaagaaagaataaatatatttaatgtatattaagaatttagggatatcgggtttttaatgtgtatatttattggattgtttagagttttgatttttaagtataattgagtttttgaaatttagatttaggtttgtggttaaggggtaaaataattagattttaaatagggttttgtagataaattttataggttttaaagtttttgggttttttttttgttattgtggtattttaggggtttgtgtaggtaatgataattagttttatatttttgttaagagaaatttggggattagaaaatttttttttgtagttttttagagtttttttaatttattttaataataaggaaattagaaattttaggatagtgttggatgtggtagaaatttagggtaatttataatttttttattaatttagagttatttgtttggaattattttaattgatagtggaagatagtttataaaattgtaggggaggtaaaattttattttcgtttttgtagggttttagtatggttttagtattaaattgatttaagatattaatagattgataggagataattatataaatgtttattttatatagtacgggggtttttattaaaaaaaaaaaagatttaaagtagtagttaagagttaattgtttatagagtgaaatggataaaaaatagtagttgtgaaatatgataaggcgaaggggtttggggtaaagaagcgattagaaagatagggattaataaattttgtttggatagatttttttcgattttaattttttgtttttgaagataataatgttattttatagggaagatattttttatatgggaattttattttttttttttaagatatataatatttatgatagtgattttgtatttgttgtttttaagtgtttttaatttaaaatagttaatatgttatagtagtatattttgaggtggtatattattaatttttttaaggttaaaagttttgaatatgtcggggtagttattagattggagaatttttttagttatttgttatttgtggaatgtatttaaatgtattgagtgtttattaattttttttttagttttttattttgttgtttttttcgttttattttatataagggaaaatttaggttttaaaagtaaagtgattttattaagatgataatggaatcgggatttggtgtttaagtttggttttcgtacgaggtagatattttttgagatgttggggaagagttatggtagggttatttatggttttttttttttggcggattttggaatttattttttttgcgttaaagtgttttattaggtgacgtcggaagagaagttagtagtaagtatatgtgaaatttagtagttgattatagatacgcgagcgataagaaaaagttcgttgtttttttttttaatatttcgttagttgcgttagaggtttttgattcgtatttaaaatg

SEQ ID NO: 732 - DNA, 5238 bp, Artificial Sequence
  chemically treated genomic DNA (Homo sapiens)
tattttgagtgcgggttaagggtttttgacgtagttggcggagtgttgagaaaagaagtagcgagtttttttttatcgttcgcgtgtttgtggttagttattggattttatatgtatttattgttggtttttttttcggcgttatttggtggagtattttaacgtagggaaggtggattttaaggttcgttaaaggaagagggttatgagtggttttattatggtttttttttagtattttagggagtatttatttcgtgcgaggattaggtttggatattaggtttcgattttattgttattttggtggaattattttgtttttggagtttgagtttttttttatgtgagatgaggcgagaagagtagtagagtgagggattgagagaaaagttaataagtatttagtatatttgaatgtattttataagtggtaaatagttgagaaggttttttagtttggtaattatttcggtatatttaaagtttttagttttgaaggagttaataatatattattttaaaatatgttgttgtggtatattgattattttaaattaaaggtatttaaaaatagtaggtgtaagattattgttatggatattatgtgttttaaaaggaggagatgaaatttttatgtgaaagatgttttttttataaaataatattgttatttttaaggatagaaagttgaagtcgagggaaatttgtttaaataaaatttgttaatttttatttttttagtcgtttttttattttaagttttttcgttttattatgttttataattattattttttgtttattttattttataagtaattggtttttaattgttgttttaggttttttttttttttaatgagggttttcgtgttatgtaaaataaatatttgtgtggttgttttttgttagtttattaatattttaaattaatttaatattagggttatgttgggattttatagggacgaaggtgaaattttgttttttttataattttataaattattttttattgttagttgaagtgattttagataggtaattttaaattggtaggaaagttgtgaattgttttgaatttttgttatatttagtattgttttgagatttttgatttttttgttattgaagtaaattaaagagattttgaagagttgtagagaaagattttttgatttttaaattttttttagtagaagtatggaattggttattattgtttatataagtttttgagatattataatggtaaggaaaagatttagagattttaggatttgtgggatttgtttgtagaattttatttggaatttgattattttgttttttaattataaatttaaatttaagttttaagaatttaattatatttgaaggttaaagttttgggtaatttaataaatatgtatattaagaattcgatatttttgggtttttaatgtatattagatatgtttgttttttttttttttttgaattgattttacgtttattttggtttattaaggatagttataatttttgtttaaatataattattgataatgttttttttatttttagtagttttttggtttggattagttaaatagttttttgtgtatgaattatttattttttttggttttttttttttttagtataatacgaatttgaattttttgttttgttattgtaattagtttatgatgtaagttagtaatttttagttttgtggatttattgttatagaatttattttgatttatttgttttaatatagtattttaagtatgagttggagtttttgtggatataagttatagtaattattttattaagtgaatgttaagttttttttattagtttttaataagcgtataagatttatttaatatcgtgattagatgggaaatattaaggtgatgatagaggaaattattttatatataaaattaggaagttgtatgacgatgtatgaatatttagtatatattattttgtagtacgttattgtgaaacgggttagtggttagtggtttcgttgtttgaggtgttatttaagtttgttgttttataattaagagaattaaggagtgtggatattagagtgaggttgaagagaaagtttattatatgaaagaagaaagttttttttttttgttattttgttatttttatagttgaatttaaaagtttttataagaaattttttttatttttgtagttgtttgtgtaatttatttgtaaagttatttgtgtagttttttttatttgtgtagttgtgggtatgttttgggtaaggataaagtttagttttttttgtttgtgtaattgtgggttttaggtaattattttttttatttttatgtaagtttttatagagtttattatgtatgtgtttgaaaaggggaagaaatttttttttgggaatttgttaattatataaagaataaaaggtttttatgttgggttttttttttttattagggtagttgttgtttgagttttttttaggttattttatgtgtgtttgtagtttgattttttaggttgtttttttgtttaaaagaattttattaaagattaattttagttgtttgtttaattaagtttttttttttttcgttttttaattgtattttgtagttggaatgtacgttataaatatttgagtaatgtgtgaagtttataaaagaggaagtataaattttaatggaaaaggtagttttatttttaggaagttttagtagtttttattagtttagttattaaagaaattgtttattagataaatattttttgtttttaatttttgatttatatttatgagagtagatatgaggtaagaaagtttttaataaaaggttaataaatatatgttgatagaaatttttggagtgttgggtacggtatttaaatgtgtttaagatgtgagataaagaaaaatgatagttattttacgagtgattatatgtttagttttttttgcgtttgtggattagggttagtgagataagacggtaagaaaggaaggttttagtttttagattttaaatgagtttaaaaagtaatgatagtgtttttttttttgtttttttaatttgaaatattttaagaatttgtatgttatttttgtttagaggttatattgatttttgtaatattttagtgtttgtaaatgtgttgttaaaggaaatacgatgattttttttttaaataataggtgtttttaagtattataattatattttagttattttaaattttttttttttttaaataaaataatgtgattaaaattaaatagttttttgagaaggattagagattttgttttttaatgaaaatttattgataaattttaatagtagtttggatttttttttttatttttttaagattattataaaacggtatgatagtagtttgttgttttattttaggaaaaggttttatttttataaattagtttattttttttttagtttattattgatgggtatttaggttgattttatgtttttgttattaggttgttagaaattttagggtagaggttaagtttattttttttttgtatgttttaagtatagtgtttaaattgtgttaagtatttaataaatattagttgaattgaattaaaagataaattattgaatggttatataaggggatacgaataaagaattatttataaaaggagttggaaacgttttttaaagtaggaattttttgggatataagagtgtggagtgtttttttgaattgttttgtaatatttgttatattttttattttttattttaggtttagggtgtatgtgtaggtttgttataaaggtaaattgtatgttttagggttgatgtatagattattttattatttaggtaataagtatagtatttaataggtagttttttgatttttttttattttttattttttatttttaagtcggttttagtgtttgttgttttgttgttgtttgtgtttatatgtattcgatgtttagtttcgttttataagtgagaatatgtagtatttggttttttatttttgtgttagtttttttagggtaatggtttttagttttatttatgttgttataaagaatatgattttatttttttttttttttttttttttttttttgagatagagttttgttttgttatttaggttagagtgtagtggtgcgatttcggtttattgtaatttttgttttttaggtttaagcgatttttttgatttagttttttgagtagttgggattatagggtgtgttattatatttggttaatttttgtatttttaatagagacggggttttattatgttggttaggttggtttcgaatttttgatttcgtgatttgttcgtttcggttttttaaagtgttgggattataggtttgagttatagtatttggtttgttatttttttttatagttgtatggtattttaggttgtatatgtaatatattttttttatttattaatagattattgatggagatttaggttgattttatggttttgttattgtaaatagtgttgaaatgattatttatttgtatgtgtttttatgggagaatgatttatattttttttagtatatatttaatatttgttatttgtttggttttttaattttggacgtgttttttgatggtaattgttagttatattgttttattgagtgatttttttttaaaatatgttataaggttttatttatttaagattttatataaataaaatgaaaataagttaaaggatagaatttatttaatgaaataaattataaattgtttattgaatatttttttaagtataattataaataaaaatttttatagtaaagagtagtgtagtatagtagttagaatattggttttggagttttaggttttttggttttaaattttttttttattgtttagtagtagtgtaattttggttaagttatgtaatttttttgggttttagtttatttatttataaaatagagataatgatggtaatatattaatgtgaatattggataagttaatatttttatagtatttagaagagtgatttatatattttatgtgttatataagtgtttattatataaataataatataaatgatatatttatataattatcgtataatttttgagtttattgttttttttataattaattttgtaaaaatagattatttttgtttttgtattggttttagtttttttttttgttgggt

SEQ ID NO: 733 - DNA, 6114 bp, Artificial Sequence
  chemically treated genomic DNA (Homo sapiens)
tagttatttgggaggttgaagtaggagaattgtttgaatttggtaggtagaggttgtagtgagttgagattgtgttattatattttagtttggcgatagagcgagattttattttaaaaaaaaaaaaaaaagttacgttgttaattaaaatgaattaatggaaataaagataagggtgtggatttttaattggttagaatttttgttttttttttttttatttagaaagttttatttaatatttatcgtagatagagggggttagatttgtgattgtttgttttttaattagatcgtgagagtttgaggtatttatttttttggttaattgtatataggagagtattataatgtttgttgaattaatggataattgataagaatagtaaatatttattttgtgcgtattaagtgttagttgttgggttgggtattttatgaagatgattttatttagttttttttataatagtatgtttgggagtaatttttagttttattttatatataagaaattgaggtttagaaaggttattttatttatttgagattatataataggaagagtggagatgagggtttagtattgttgggtgttagaggtgaggtgagtaaaaggtatgtagagaaggggttgtttcgtttatttttgttttgatagaatgggtttttgtagggaggtatggtttgtgagttttattttattttaattagtttaagggttatttatggtatgatttgtttggtgttggttgtgttaaaaaatgttttattgaagtgtgtttaaaaggagtaggttattcgatgatatttggaattgtttgggttggagtgtagtggcgtgatttcggtttattgtatttttaatttttgggtttaggtgatttttttgttttagttttttaagtagtcgggattataggtatatattattaagtttgattaatttttgattttttttttttttttgagacggagttttagtttgttgtttaggttggaatgtagtggtgtgatttcggtttatcgtaattttcgttttttgggtttaagcgatttttttgttttagttttttgagtagttgggattataggtttgtattattatatcgggttaatttttttattttttagtaaagatggggttttattatgttggtcgggttggttttgaatttttgattttaagtgatttattcgtttcggttttttaaagtgttgggattatatgtatgagttatcgtgttcggttaatttttgatttttttggagagatgaggtttttttttgttgtttaggttggttttgaatttttggttttaagcgatttgtttattttagttttttagtgttgggattataggcgtgagttattatatttgggttttattttttttttaatagttttattgagatataatatatattatataatttatttatttaaaatataaaatttaatagtttaggatatttataggtatgtgtaattattattatagtttattttagaatattttttttattatagagaaatttgttattttttggttttgattttgttatttttttaggtttaagtaatcgttaattaattttttatttgtagagatttgtcgattttggatatataataggtggttttgtgtgattggttttttttatttattataatatttttaaagtttatttttttttttttttttttgagacggagttttgcgttgttatttgggttggagtgtagtggtacgatttttgtttattgtaagtttcgttttttaggtttacgttatttttttgttttagtttttcgagtagttgggattataggtgttcgttattacgtttagttaattttttttttgaaggttttatttatgttgttatacgtattagtattttatttttttttatggattaatatttttattgtatagatatattatttgtttttttttttcgagattaagttttattatgttatttaggttggagtgtagtgacgagatttcggtttattgtaaattttatttttcgggtttaagtgatttttgtgttttagtttttcgagtaagttggtattatatatgtgcgttattatgtttggttaatttttgtgtttttagtagagatggggttttattatgttggttaggttggtttggttttgaatttttgtttttaagtgattcgtttatttcggttttttaaagtttgggattataggtatgaattattatatttgatatttgagtatttttttatgtgtttattggttatttgtatttatattatttggaaaaatgttttttgaaattttttgtttttttttttttttttttgatatagggttttttattttttgagtagttgggattataggtgtgtgttatttaatttggttaatttttttttttttttttgtagtagtgaggtttttttacgttgtttaagttggttttaaattttaagtttttgagatatatatgatttgtaagtatttttttttattttgtgagttgtttttttatttttttgataatgtttttgttaggtttttgagtttaagttaagttattatagttttcgtgatttgtacgtatatatttagatggtttgaagtaattgaatatttataaaagaagtgaaaatagttttaattgatgatattttattattgtgatttgtttttgttttaatttaattgattaatgtattttgtaattttttttatttttaagaaggttttttgtaattttttttatttttgagaatgtattttgtgagatttatttttgttcgtaaaatattgtttttaattttattatttattttaaaatttataagaattaatgataattttattattttttgtttattttttttagatttagttcgtttgtatttaggtgaaataaatagttttgttgtttatataaagtttgtttggtggtttgtttatacggatacgcgtgatagttttttgttgtagaaaaatattttattttgatgaagtatagtttatttttttgttgttatttgtgtttttgatgttatatttaaaaaattattgtttggtcgtattggtttatatttgtattttagtattttgggaggttgaggtaggtaaattatttgaggttaggagtttaagagtagtttggttaatatggtgaaattttgtttttataaaaattatttaggtatggtggagggtgtttgtaattttagttattggggaggttgaggtaggagaatcgtttgaatttgggaggcggaggttgtagtgagttaagatcgcgttattgtattttagtttgggtaatagagtaagatttgtttaaaataaataaatacgtaaataaataaaaataaaaaaatatgattaggtgtggtggttaacgtttgtaattttagtattttgggaggttaaggtgggtggattatttgaggttaggagtttgagattagtttggttaatttggtgaaattttagtttttattaaaaatataaaaaattagtcgggtatggtggtacgtgtttgtaattttagttatttcggaggttgaggtaggagaatcgtttgaattcgggaggtagaggttgtagtaagttgagattacgttattgtattttagtttggataacgagagcgaaatttcgttttaaaaatagaaattaaataaatattttttaattaatgttataaaattgtatttttatgtttttttttaagagtttttagaattgtttttggaatgtagttttttattttttgggtatatttttgagtaggttttaagttaaatttttggttataattttttatattatttttattttaattttaagtaagttgtttatattttagttttttagttttaaggttttatgtagggtgggtagttgtggataggtattaaggtagtagttggggtcggttagtaggtttaggatgtaggatagtaagagaagagtgtttgattgggaataaggttacgtttttgagataagggtttttgggttgaagtagtgtttgttggggttaatagtataatttatttggatagttgtggtaggtttttaagggaggggttgggtttattgttggttatcgttattttagtttaattttttattgttaggagttgttgcgtattatttagaaaaggagtttgtaaaattgattttttggttattattaaatttgttttttttttttttgagatagagttttgtttttgttgtttaggttggagtgtaatggtgtgattttagtttatcgaaattttcgttttttaggtttaagtgatttttttgttttagtttttcgagtagttgggattataggtatgagttattatgtttagttaattttgtattttttagtagagatggggtttttttatgttggttaggttggtttttaattttcgattttaggtgatttgtatatttcggttttttaaagtgttgggattataggcgtgagttattgcgttcggtttaaatttgtttgtttttatttttatttatagtgagtgttaggttatttttttggagatcggtgattagaggttgatgattttttatagttgttggttttggggatttaggggatttttttgggaattttaggttaatcgggtgttagttttattgttttggttgtgtgggtggtggtgggtggtgaggtatatagaaagttattagcgttagggaagggtagtttagaaattttggttatgttaagtgttatttagggttatttttattttagtgagtgtttattggtttttttcgaagtttagagggaaggatattatcgggggcgttgtattttattcggtattattagtttttgttatttattatttagtagttggatttttacgggagttgcgggtgggggcggaatcggttgaggtttgggggcggggcgttcgggcgcggggcggggttggcgggaatgtgcgtattttcgcgcggggtttcgttcgagtatttcgcgtcgacggggttgtgtcggagtagttgtgtagagttgtaggcgcgcgttatggttgttttgagatagttttaggtcgcggagttgttggtcgaggttcggcgagtttttcgggaggagttcggggtcgagttcgagttggtcgtgttagcgtcgggtcgcgttaattttatcggggaatatacggattataattagggtttggtgttgtttatggtgaggggttgtacggggagtttttagttcgtcgtcgtttgtttcggtcgtcgaggagggcgggtttcggggacgttgggggcgagtttttttcgcgggagatgtggggcgggtagttgcgtttggagtatcggtgtacggaagagttttcgggataggttgttttttacgttggaagggaggaagcgaggaagtggtcgggagagggtgcgcggtcgttttttggtttaagttcgttttttgggggttggggtttttcgtttttaatttgggagtatgttttttttaaattgtgaggttttgtgtgttacgtagaaggggatatttcgcgttttcggttatcgtggggttttaatcgtagatttgggcgaacgtagttttttggtttagttcgtttaatttatagaggaggaaattgaggtttagagaggtttagtgaattgttggaggttatatagtaggtttttggcggggttgcgatttgggagtgaggatttttagtttttagcggggggcgtttttcgttttatttgtagtttggggagtgtataggtataggatgtttagagttattttaaaatgtaaaggttttggagttttagtgatttgttttttttttgggttagtttttttttttgttttatagtttagggtagagtttaggtttgtgttttagttgtagtcgtttcgtttttgaagatttaagggggtagggtttaagtttttaaggttagttggtttttaggattttttttgcgacgttgaatttggaggtttagaatttgatgattgtggaggtattagaatttcggttggaggtagtgttattggagaggtttattttagttggcggaagttttacgtattgtttgttttttttgttagg

SEQ ID NO: 734 - DNA, 6114 bp, Artificial Sequence
  chemically treated genomic DNA (Homo sapiens)
tttggtaggagagataagtagtacgtgaggttttcgttagttggagtaagtttttttaatgatattgtttttagtcgaggttttgatgtttttatagttattaggttttgaatttttaggtttagcgtcgtagggaagattttgagggttagttgattttgggggtttgagttttgtttttttaggtttttaggggcggggcggttgtagttggagtatagatttggattttgttttgagttgtggggtaagggggagagttagtttaaagggaaaatagattattggagttttaaagtttttatattttggggtggttttggatattttgtatttgtgtattttttaagttgtagatggggcggaaagcgtttttcgttgaaagttgggagtttttatttttaagtcgtagtttcgttaagaatttgttgtgtgatttttagtagtttattgggtttttttaggttttagtttttttttttgtaaattgaacgggttgggttagaaggttacgttcgtttaggtttgcggttggggttttacggtggtcggaggcgcggagtgtttttttttgcgtggtatatagggttttatagtttaaggggaatatgtttttaggttgaaggcgaggagttttagtttttagagggcgggtttgagttaagaggcggtcgcgtattttttttcggttattttttcgtttttttttttttaacgtggggaatagtttgtttcggggattttttcgtgtatcggtgttttaggcgtagttgttcgttttatatttttcgcgggaagaattcgtttttagcgttttcgaggttcgtttttttcggcggtcgggataggcggcggcgggttaggggtttttcgtgtagttttttattataggtagtattaggttttggttgtagttcgtgtgtttttcgatgaggttgacgcggttcggcgttgatacggttagttcgggttcggtttcgaatttttttcggaaggttcgtcgggtttcggttagtagtttcgcgatttggggttgttttaaagtagttatgacgcgcgtttgtagttttgtatagttgtttcggtatagtttcgtcggcgcgggatgttcgggcggggtttcgcgcgggggtgcgtatattttcgttagtttcgtttcgcgttcggacgtttcgtttttagattttagtcggtttcgtttttattcgtaattttcgtgggaatttagttgttgggtggtgggtggtaggggttaatggtgtcgggtgggatatagcgttttcgatggtgtttttttttttggatttcgggaagaattaatgagtatttattagagtgagaatagttttgagtggtatttggtatgattaggatttttgagttgtttttttttggcgttggtgattttttatgtgttttattatttattattatttatatagttagagtaatggagttggtattcggttgatttgggatttttaaagggattttttaggtttttagggttagtagttgtgagaggttattagtttttgattatcggtttttaagagggtgatttgatatttattgtaagtagagataaagatagataagtttgggtcgggcgtagtggtttacgtttgtaattttagtattttgggaggtcgaggtgtgtagattatttgaggtcgggagttggagattagtttgattaatatggagaaattttatttttattaaaaaatataaaattagttgggtatggtggtttatgtttgtaattttagttattcgggaggttgaggtaggagaattatttgaatttgggaggcggaggtttcggtgagttgagattatattattgtattttagtttgggtaataagagtaaaattttgttttaaaaaaaaaaaagataagtttggtggtgattagagagttaattttataagttttttttttaggtaatacgtaatagtttttagtaatggagaattggattagggtggcggtggttagtagtgggtttagttttttttttaaggatttgttatagttgtttaggtaggttgtgttgttggttttagtaggtattattttagtttagaagtttttgttttagaggcgtggttttgtttttagttaggtattttttttttgttattttgtattttaaatttgttggtcggttttaattgttgttttgatatttgtttatagttgtttattttatatggaattttgaaattgaaagattgaaatgtaagtagtttgtttggggttagggtgggagtagtgtggggagttatggttagggatttagtttggggtttgtttaggggtgtgtttaaagagtggggaattgtattttaagggtaattttgaaaatttttagaagaaaatataggggtatagttttgtgatattggttaggaaatgtttatttggtttttgtttttgagacggagtttcgttttcgttgtttaagttggagtgtaatggcgtgattttagtttattgtaatttttgtttttcgggtttaagcgatttttttgttttagttttcggagtagttgggattataggtacgtgttattatgttcggttaattttttgtatttttagtggagattggggttttattaggttagttaggttggttttaaatttttgattttaggtgatttatttattttggttttttaaagtgttgggattataggcgttagttattatatttagttatgtttttttatttttatttatttacgtatttatttattttagatagattttgttttgttatttaggttggagtgtagtggcgcgattttggtttattgtaattttcgttttttaggtttaagcgatttttttgttttagtttttttagtaattgggattataggtattttttattatgtttggataatttttgtaaaagtagggttttattatgttggttaggttgtttttgaatttttgattttaagtgatttgtttgttttagttttttaaagtgttgggatataggtgtgagttaatgcggttaggtaatggttttttagatatgatattaaaagtataagtgataatagaaaaataaattgtattttattaaagtgaaatatttttttgtaataaagaattgttacgcgtgttcgtgtgaatagattattaaataggttttgtgtgagtaataaggttgtttattttatttgggtgtaggcgggttgagtttgaaaagagtaagtaaagggtggtgggattattattagtttttataggttttgggataggtggtggagttaggagtaatgttttgcgggtagggatggattttataaagtatatttttaagggtggggagaattataaagaatttttttaagggtgggggagattataaagtatattgattagttaggttggggtaggaataaattatagtggtggaatgttattagttaaggttatttttattttttttgtggatatttagttgttttaggttatttggatgtatacgtgtaggttacgggggttatgatggtttagtttgggtttagaggtttgataagaatattgttaagaaagtgaaaagataatttatagaatggaagaaagtatttgtaaattatgtatattttaggggtttggagtttgagattaatttgggtaacgtgggaagattttattgttataaaaaaaaaaaaaaaaattagttaggttgggtggtatatatttgtggttttagttatttagaaggtgagagattttgtgttaaagaagaaaaaaaaaaagtaaaagattttaagagatatttttttaaataatataaatataaatggttaataagtatatgaaaagatgtttaaatgttagatgtggtggtttatgtttgtgattttagattttgggagatcgaggtaggcggattatttgagagtaggagtttaagattagattagtttggttaatatggtgaaattttatttttattgaaaatataaaaattagttaggtatggtggcgtatatgtgtaatgttagtttattcgggaggttgagatataagaattatttgaattcggggggtggagtttgtagtgaatcgagatttcgttattgtattttagtttaggtgatatagtgagatttggtttcgggaaaaaaaaataagtgatgtatttatataatagaaatattaatttataaaaagaaatgaagtattgatacgtgtaataatatggatggagtttttaagaaaaaaattagttgggcgtggtggcgggtatttgtagttttagttattcgggaggttgaggtaggagaatggcgtgaatttgggaggcggagtttgtagtgagtagagatcgtgttattgtattttagtttaggtgatagcgtaaaatttcgttttaaaaaaaaaaaaaaaagaatgaattttgaaaatattatggtgagtgaaggaagttagttatataagattatttgttgtatatttagaatcggtaaatttttatagatggaaagttaattagcggttgtttaggtttgagggaatagtagggttagagttaaaggatggtaggtttttttgtggtaaggaaaatgttttaaaatggattgtggtgatggttgtatatgtttgtgaatattttaaattgttgaattttatgttttaaatgggtgaattatatggtatgtattatattttaataaagttgttaagaaaagaatggggtttaggtgtggtggtttacgtttgtaattttaatattgggaggttgaggtgggtaaatcgtttgagattaggagtttaagattagtttgggtaataaagggagattttatttttttaaaaaaattaaaaattagtcgggtacggtggtttatgtatgtaattttagtattttgggaggtcgaggcgggtggattatttgaggttaggagtttaagattagttcggttaatatagtgaaattttatttttattaaaaaatagaaaaattagttcggtgtggtggtataagtttgtaattttagttatttaggagattgaggtaggagaatcgtttgaatttagggggcggaggttgcggtgagtcgagattatattattgtattttagtttggataatagattgagatttcgttttaaaaaaaaaaaaaaaattaaaaattagttaggtttggtggtgtgtgtttgtggtttcgattatttgggaggttgaggtaggaggattatttgagtttagaggttgaaggtgtagtgagtcgagattacgttattgtattttagtttaagtaattttagatgttatcggatgatttgttttttttgagtatattttagtaaagtattttttggtatagttaatattaaataaattatattatgagtggtttttgggttggttgaaatggaatgaaatttataaattatatttttttataagggtttattttattagggtagaggtgagcgaagtagttttttttttgtatgttttttatttattttatttttgatatttaatagtgttgagtttttatttttattttttttattatatgattttaggtaaatgaagtgatttttttgggttttagttttttatgtgtaaaatggggttagagattgtttttagatatgttgttgtaaaaggaattgaatgagattatttttataaagtgtttagtttagtagttggtatttggtacgtatagaataaatgtttgttatttttattagttgtttattaatttaataggtattatggtatttttttatatgtaattggttagaaagataaatgttttaggtttttacggtttgattgggaggtagatagttataaatttgattttttttgtttgcgataaatgttgagtagagttttttgaataggagaagagagagtagggattttgattagttagaagtttatatttttatttttatttttattgatttattttaattgataacgtgatttttttttttttttttgagatggagtttcgttttgtcgttaggttggagtgtagtggtataattttagtttattgtaatttttgtttattaggtttaagtaatttttttgttttagttttttaagtagttg

SEQ ID NO: 735 - DNA, 5313 bp, Artificial Sequence
  chemically treated genomic DNA (Homo sapiens)
ataggtgtgagttataatgttcggttttttttttttttttttttaaatagggtgaaaaattatgtattttatttatataattttgtattaaatatttgtattttaaaatagttatattttaataagataattatttataataaagttatgttttatgaatatgtagtatagtttaggtattgaattgtttgtttttgtaaataaagttttattggaatatagttatgtttatttgttgatgtattgtttgtggttgtttttttattgtaatggtagagttgggtatttggaatagatgtttgttagtttaaaatatttagtattttataatgtggtttgtaataatattgtagttaaaagtagttcgtgataaatagttttagtaatagtatatttttttatttgaatattttttttaagttttagtataagtatgttttataggtttaaagattttttatttttagatataaatgttgtataaaggttttttttttataaaaaattatgttttttagaaatattttaattttaatttatttgatatgtggtgttataatttgataaagtagtaaattttataaagtatttttaggtgaggattagttttttattgaaaggggatataatttaatatagaatgagaaaatttggatttgaagtatagaaagggttaatttttttagagcgtttttttttattttagaggattatttataaatatagtaaattttaaagtttatatttatttttttagataattgtagaaaggattattttaggttatttatttttaatttatttatatttattttttggaaatatgaggattaataattgttttaattacgtgggattttgggaagaatttacgatattagttattattataattttagggagtatgtttttaatattttaggagtgttatttttatatttatagttttttttgagtttgtgcgaaaaatttatattttcgtgtgggttttatataggtgtttaataattatattattttttttttttggagatggttggttttttttttattttttttttatgttttagtttgtttttgttgttgtaatagaatatttgagattggataatttattatgaatagagatttatttagtttttagttttagaggttgggaagtttaagtatatgacgttgggatttggtgagtcgtttcgtggtggaaggtagaaggtagaagtgagtgtatgagataaagggaggtattaggggttgaaattattttataataatttatttttatggtaattaatttgtttttgtgataacggtattaatttttttatgagggttttgtttttgtgatttaattattttttattaggttttattttttaatatttttgtattggagattaggtttttaatatatgaattttgggaggtatatttaaattatagtattttgttttttttgagtaattgtaattttaagttggtaaaagtatttaagattaggggttgaagataacgatggattatgggtggtggttagtggggaataaagtttaattggatattattagtggttttattggagaataaataggtttggaattttgaagaattaataaattgtttatatgtaagagtgagaaagatgtaatgtataaaaattatagagttgtaagtttaaatttggggtaaaaattataataaaattggtttgtttatggttaattataaagtaggttgtaatttggtttagtgttgtatatttagaaggtttttagtaattgttttttgatgaggaggtgaattattatagaatagtggtttttaattttgtttatttgttattaaatattgtgttaaaatattttaatgttttatatgatgaaagaataaaggtaatttaaatttatttttataatatgttatttttatttttattttgtaatgttttgttgagggagagaaaggggtagagttatagtatatatgttggaaattgtgtattgggtaatattgggtatttgaatattattttttaaatgtgttagggtgtaaaaaaggttgggagttgttgttttaaagaataggttttgttaaaattaggtaatttttaatacggaaatattttaagtggatggaggtggagatattatttgttatgatttggtaagattaaaaaaaaaaatttaggtttatgatatatttattaattatttgttttattagttagataggtgttgaataggaagttaggggttagttatagtttgataggaatattttagtatagaattagaagagataatattattttttaattagaaggtttgggcggaagttgttatttttgttgggatggatgttaaaggagtgtaggggtgtattgagtatataggagtagaggagggattagagtaaggagtagttagttggtagattattttttatgatttagagtagagaggttaggaaggagttgaagtaggttgattattaagtttttatagttggagtgttgttaattttgattagttttttgatttttgttgttttatattggttttttggatttatagttatattggttaagtttggtgagttatggttaagaggattaatagagtgggttatttaattttttatttattaattagttttattttataggttagttgttttattggagtgtgagaagtagttgtattttttgtgtgagatttaagaatttttttttggggtttggattgggatttttttattgtaataatatttttgggatttggtagggagggagttggttaggtttattttagttatttttttttttttttaaaaaatgattttggggagttatagaggagaattatggagatgtttttgaagagatgtttttgatgggggttaggatttaattagtatgatttagggggcggtattgaagtattggtgtttttgggaaaatggagttgtttataagttttagttatttaaataaatataaatgagagaatggaaaagtagattttttgtttttgttttatttttttgggtaatatgaatagttagtgggataggtaaaatttttgttttttagtttttagttttttgttttttatttttgaaggtagtttttttttattttagtttgaggattttagggtagagattaagtaaatgatttatgatttagtttttgtagtttaattgtaaaatatttggtttggtttggttttgattgggggaagggatgtttttgttatggtttaatttttaatttattgggtttttgttttgtattttattgaagttttagaggtattttatagtattgggaaaagttttggaaatttgtatttaaattttagtttggttattaattttttgggtgattttgagttttttgggttttaatgtgaaatggggaagaggtttagataatatttagatggttttttaaaagtattgggggttagttgtttgggaggttgaggtaggaggattatttgaagttaggagtttaagattagtttggttaatatgtgaaatttcgtttttattaaaaatatataaattagtttagtgtggtggtatatagttttaattttagttatttggaggttgaggtaggagaatcgtttgaatttgggaggtggaggttgtagtgagttaagattacgttattgtattttagtttgggtggtagagtgagatttttttttaaataaataaataaaagtattaggggaggaattaatttgaattttattttagtgttagttaattggttttatttaaggaaaatttagaaaagggaaggggatgtgtaaaggaaatattaggttttatttagatggtggttggagtttttgatagttttgtattttttatatttttagatttttttgtatttttttttttttttttgtgacggagtttgttttgtcgttaggttagagtgtatgggtataatttcggtttattgtaatttttgttttttgggtttaagtgatttttttgttttagttttttaagtaggtgggattataggtgtacgttattaagattagttaattttttttttttttttttttttttattagagacggggttttattatgttggttaggatggttttaattttttgattttgtgattcgtttgttttggttttttaaagtgttgggattataggcgtgagttatcgagttcggttatttttagatttttttttatagtttttttattttttttattttttgtgttgttttggtgtgtgtatgaaaaagagagagagagagagaggaaggagagtaagagtgagagaaaaagagaatatggttatttagtttttttttttaaatttgtttttgtttttggggataggatatggttatggtgaagtattttatatagattttattaagtttgttttttttgcgttatagttattgagtaggtgattgaggcgttgttgatttagggttatatttttattcgttttagaatgtaagtttaggtagggtagaggttatgtttgatatgtgtattttaatgttttatatagtttaggtgtttagtatatgttagatgtttggtaaatatttgttgaatgaaagattaaatgaatgattgtagtaagtaagttttgtaggtattttggagtttaaggattttgtagtaggtagtttttatagaggtttttttagtgtagtggttttagttttgggtgaagtaggattattaatgtcggtttttagggtttatagttgttttgagtttcgtttttaggtggtagggtagtttagttagttagttacgtgttggcggttggttaattatcgggggcggcgcggggaggggtggtgtggacggagaaagtgaaaggtgaggtacggttttgtagattttttagcggatttttcggtggttttatgtcgcgtagtggaatcgatttttagtaacgttagtaggcgttagaggcggacgtcgtagtagtaatttttcgggtaaacggtaattgtatcgcggtagggattcgttggggcgcggagtcgagttttttttttttttaggaagttttcgtttttttcgaaggttggaacgtttatttcgagttagatcgataaggcgtatagtttgtaggtttgtacgagtagtaggttaattggcgttgggaaagtttaattttgggtttttagtttttgagcgggatagggtcgagagggcgttttcgagtttgggtttgttggtgggtgagatttaggagagagggagttagagagttttgaggattgattttgattgtttgtttttaga

SEQ ID NO: 736 - DNA, 5313 bp, Artificial Sequence
  chemically treated genomic DNA (Homo sapiens)
tttgggggtagatagttaagattagtttttagagttttttagtttttttttttttgggttttatttattagtaggtttaagttcgggagcgttttttcggttttgtttcgtttaggagttagaggtttaggattggatttttttagcgttaattggtttgttgttcgtataggtttgtagattgtacgttttgtcggtttggttcgggatgagcgttttaattttcggaggggacgaaagttttttaaggaaggggagggttcggtttcgcgttttagcgagtttttgtcgcggtgtagttatcgtttgttcggaaggttgttgttgcggcgttcgtttttgacgtttgttggcgttgttgaggatcggttttattgcgcgatatgaggttatcgggggattcgttggaaaatttgtagggtcgtgttttattttttatttttttcgtttatattattttttttcgcgtcgttttcgatgattggttagtcgttagtacgtgattgattgattgggttgttttgttatttgggggcggggtttagaatagttgtgaattttgggggtcgatattgatgattttattttatttagagttagagttattatattggaagaatttttgtgaaagttgtttattgtagaatttttgggttttaggatgtttataggatttgtttgttgtaattatttatttgattttttatttagtaaatatttattaagtatttagtatgtgttaggtatttaggttgtgtaaagtattgggatgtatatgttaggtatggtttttgttttgtttgagtttatattttagggcgagtaaggatatgattttggattaatagcgttttagttatttgtttagtggttgtagcgtaggagaggtaaatttggtggggtttgtgtggagtattttattataattatattttatttttaaaagtaaaaatagatttgggaaaaagggttaagtaattatatttttttttttttttatttttgttttttttttttttttttttttttttttttttatatatatattaagatagtataagaagtgggaggggtaaaagggttataaaaaaaaatttaaaaatggtcgggttcggtggtttacgtttgtaattttaatattttgggagattaaggtaggcggattataaggttaagaaattgagattattttggttaatatggtgaaatttcgtttttagtaaaaaaaaaaaaaaaaaaaaaaaattagttggttttggtggcgtgtatttgtagttttatttatttgggaggttgaggtaggagaattatttgaatttaggaggtagaggttgtagtgagtcgagattgtgtttatgtattttagtttggcgatagagtagatttcgttataaaaaaaaaaaaaaaagtataagaaagtttaaaaatgtggagagtataggattattagaagttttagttattatttaggtggggtttagtgttttttttatatattttttttttttttttaaattttttttggatgggattaattggttaatattaggataaaatttaaattaattttttttttggtatttttgtttgtttgtttgagagagagttttattttgttatttaggttggagtgtagtggcgtgattttggtttattgtaatttttattttttaggtttaagcgatttttttgttttagtttttaagtagttggaattagagttgtgtgttattatattgggttaatttatgtatttttagtagagacggggttttatatgttggttaggttggttttgaatttttgattttaagtgatttttttgttttagttttttaaatagttggtttttagtatttttaaagagttatttaaatattgtttaaattttttttttattttatattggagtttagaggatttaaggttatttagagaattagtggttaagttgagatttgaatgtaagtttttaaggttttttttagtgttgtgagatgtttttgaggttttagtggaatgtaggatagagatttagtgagttagaagttgagttatagtagggatatttttttttttaattaagattaagttaagttaggtgttttgtaattgagttgtaaaaattaggttatgggttatttatttgatttttgttttagggtttttagattggaataggaagaggttatttttagaggtagggggtagggagttgaggattgagaaataggggttttatttgttttattggttgtttatattatttaaagaggtgagataggaataggagatttgtttttttatttttttatttatatttgtttgagtgattagagtttgtagatagttttatttttttaagaatattagtgttttagtgtcgttttttgaattatgttaattaaattttgatttttattaggaatatttttttaggaatatttttataatttttttttatgattttttaaggttattttttggaggaagaggagaatgattaagatgggtttaattagttttttttttgttagattttagaggtgttgttatagtaaaggggttttaatttagattttaagagaggatttttggattttatataagaaatatagttattttttatattttagtgaagtagttagtttataaaatgaagttgattgatggatggaaaattgagtagtttattttgttggtttttttgattatggtttattaagtttggttagtatagttgtggatttaagaagttagtatggagtagtaagaattaggaggttgattagaattaataatattttagttgtggggatttagtagttagtttattttagtttttttttgatttttttgttttgagttatggaggatagtttgttagttggttgttttttgttttaattttttttttgtttttgtgtatttagtatatttttgtatttttttagtatttattttagtaaggatagtagttttcgtttaagttttttagttaggaaatgatattgttttttttgattttgtgttaaaatatttttgttaagttgtaattaatttttggttttttgtttaatatttgtttggttggtggagtagatgattaatgagtatgttatggatttggatttttttttttaattttgttaagttatgataggtgatatttttatttttatttatttggaatgttttcgtattaaagattatttgattttggtaagatttattttttagagtagtagtttttaattttttttatattttgatatatttgggaaatgatatttaagtgtttagtgttatttagtgtataatttttagtatatgtgttgtaattttattttttttttttttttagtaaagtattgtagaatgaaagtaaaagtagtatattatagagataaatttaagttgtttttatttttttattatgtaaaatattaaaatattttggtataatatttagtgataaatgaataaggttgaaaattattgttttgtggtgatttatttttttattagaaagtaattattaggaattttttgagtatgtagtattgagttaggttgtaatttattttgtagttggttataagtaagttaattttgttatagtttttattttaaatttgaatttatagttttatgatttttgtgtattatattttttttatttttatatataagtagtttattggttttttaaaattttaagtttatttattttttagtgaagttattgatgatatttaattgagttttgttttttattgattattatttatggtttatcgttatttttagtttttaattttgagtatttttgttagtttggaattataattgtttaggagaaatagggtgttatggtttgaatgtgttttttaaagtttatgtgttggaaatttgatttttagtgtaaaggtattaagagatgaggtttaataaaaggtaattaggttataagagtagagtttttatgaaaggattaatgtcgttattataggagtaggttagttattatgagagtaagttgttataaagtgattttagtttttagtgtttttttttgttttatgtatttatttttgttttttgttttttattacgggacgatttattagattttagcgttatgtgtttgggttttttagtttttagaattgagaattgaataaatttttgtttatgataaattatttagttttaagtattttgttatagtagtaaaaatagattaagatatagggaaagggtgggaaagggattaattatttttaaaaggagaaaatggtatggttattagatatttatataggatttatacgggaatgtaaatttttcgtataaatttaagaagagttgtaaatataaaagtgatatttttaggatattggaggtatgttttttgaaattataatggtggttaatatcgtgagttttttttaaaattttacgtagttaaaataattattggtttttatatttttaagagatagatgtaggtgaattagaaataaatagtttaaaatagttttttttgtagttatttggagaagtgaatatgaattttagggtttattatgtttgtaaataattttttgaaatggaagaagacgttttagaggggttaattttttttgtgttttaagtttaaatttttttattttgtattaaattgtgtttttttttagtagaaaattggtttttatttaaaggtgttttatagagtttattattttgttaaattgtaatattatatattaggtaggttaggattaaaatgtttttaaaagatatgattttttataaaggaaaagtttttatatagtatttatatttagagataaaaggtttttgagtttataggatatgtttgtattagggtttggggaaaatgtttaagtgagagaatatattgttattgaaattatttattacgggttgtttttaattatagtgttgttgtaagttatattgtgaaatattaaatattttagattggtaggtatttgttttaaatatttaattttgttattgtagtgagaaagtagttatagataatatattaataaatgggtatgattgtgttttaataaaattttatttataaaaataagtagtttaatatttgaattatattatatgtttatgaagtatgattttattataggtaattgttttgttaaagtgtgattattttaaaatgtaagtgtttaatgtaaagttgtataaataaagtgtataattttttattttgtttaaaaaaaagaaaaaaagaagtcgggtattgtggtttatatttgt

SEQ ID NO: 737 - DNA, 7802 bp, Artificial Sequence
  chemically treated genomic DNA (Homo sapiens)
tggaatgggaagggatttttttttttttaggtttagttcgttagggtttcgggtcgtgttgtagtttttggtttttggtgtcgtttttcgttttttagtttcgtagattttcggttttttttttgtttgcgcggtcgggatcgtttaggtaggcgtcggggtttcggggtttcggggggagggattcggcggttcggttcggtttcgttttttttttttgtttgtaaatatttgttgtttcgttggaaattcgacgatttcgcgcgcgttttgtttgtaaagtttttaagtaaatacgtttaaatgatcgtttcgggcggttcgaggtacgtttttttttttttcgcgggattagtaattttaggatttcgatttcggggtttcgttttgtttgttatttaggtcgggtagcgcgcgggcgttcggggtcgtttttttcggtatttcggtttcgcggagttcgtttggaagcgtcggttgtttggttttggtgggtggttcggtcgcgagtattttcgcgttttgggtttgtagttttagggttgagttttagaaagtcgcgttttcgttttgcgttatggtttttgttttttgtattcgattgggtttttttatttttattgggatagggttttttcgtttttgggagggcgggtgggagggatttgtacgtgggtatgtgtttgggggtgtgtgtggtagtttaatttttatcgagtggagaaagttcggttttattttttattttttttttaagaggatatatatatttcgtttaatttgacgtttaaagtagtcgtttttaggtttggggtttcggataggttaagtcggttgttgtcgattcgtacgtcgtttcgggtttcggtttttttttaggcggtggtcgcgtcgtcgtttgttcggttgcgggatgtttgtttttaaggttttaggcgtttaggttgatcgttagttttttattttggtgagggaggttttgcgttttgtagaagtttcgggttttgcggcggcggcggcggtatttttttggtcgttttttcgtttttttttattcgagtttcgtcggttgttttttgggaggaaggggattcgttagattaggtcgaggtttaggtatttgggagggggtcgcgttaggtttgcgggaaggcgtttaggttttttcgtaggaggttaggattagttttgtggcggtggtatagggagaattaggattattttttttttttattttcggttaggatttttttttttttttttcgttcgttaagggaggaggaagttcggtttgtttttgtcggcgaggcgggttaggtcggcgtttggtttggttcggattttcgtagttcggtttttcgttttaggttacgcgtcgtagtttttttagtttcgtttttttttttttttttttttcgtgggtttcgaggtcgatttcggtttttttttttcggtattttttttttatttttttttttttttcgttgttttgtgtttcgggtttcggggttgggttcgtgacgttaaatttagtgtggcgtcggcgagattggtcggcgcgggttattaaaagagtaacgtttttttttttaattatttattgttagttcgggaattggggcgggtcggttgggaattaaatgttaaatattttttatcggttggttttattattcgggatatttagttttaggttttttatttttttttgttagttttaaattatttagattaagaagggttttcgagattttttatttttttaaaggtgggggttgtttttttttattttcggttagttcgatttggtgttcgcgattgaatttaaacgaataatttttatttttttatttaaaattagcggataggcgtttttgtatcggaaggtttttttattagttttttttttttgtttttgaaataatttttagttttagaagttagtatttttaagatttggtattcgtagcgtttttgacgcggggattttttttttcggttttgaggttttcgcgcgtagaatttatggtagtttttggttttacgcgtggttgtgagttgggtttacgttgcgtggcgtatttatttttcgattgacgcgcggagaagtattttttatttttttttttagtttgtatttttaaattttaatttcgggttttttagtaaaaatgcgtgtgtattcgtttttttttgtttatggagaggttttcggtgaatgttagatagtaattaaataattaaaaggtttagagagcgttgtgagtaggagaagatgcgggtagtttggttggtttaggagagacgagtggttagagaatgaaaggaaaatcgatgttttttaattgggtcgtttaataacgggagattaagtgggtttaggagaaacgtggcggggggggggggagttttttttaaaaaattggggttttttttttttgttttatatatggaaatttagttttgattttaaataaatattagatttaagaaggtgaggattttaaagaagatttaaacgcgagattaggaagatttacgtttttattattttttttaatatattttattaatttttttatagggatagtgttttaaaatacgacgatttttatatattaaggtgaagttgaatattgttgttgtttttttatcgtatgaaaggaattttttagaatttatttttagggacggttttttttatttcgaatttttgtatttgtagggaattttatggggtagaggagcgaagagggaataatgtttttaatttaaataaaattttaaattaagtttttagttttatcggtgggatagtttgcgggggaatttatttttttttttggtagtattgttttgggggcgagtagagagtggatttggagtttttttttttcgtttgatttttgttcgttcgagtagtattttcgggttagcggttgtagttattcgggcgtcgttaggggatgtagtggtttaaaggatcgagcgggcggtgtaggttggaattcgcggggcggattaatcgcggttcggttatagtttcgttcgttgattggtttttttaggtttcgttttcgttcgtttcgtttttttcgttggggcgtttcggagtcgcgtgtttttcgtttcggggtgtttattgcgtagagcgtggtttggagattcgcgagtcggggaaggtcgtcgtggagtttcgattagaggtcggggttggggtcggtgtagatcgagggttggtttttttgattgtgggagaaacgtcgggagtcggagtaagtagggtttcgggcggggcgaaaggaaaagttgggtttttagagtgaagatcgagttttttttgttcgtttatattgagcgtattcggggaatgagttagagttagtttttttttttttttttttttttttattttttattgttgttatttaagttaaaagtatatattgattataaatattaggtttggaaagggtagttgtaatagttgaagcgtgtttattttgggggtttgagagcgtagaaggttcgggaaagaggtgataatgataataaaattgacgcggacgttttagttaaaggtattttttttttattcgatgatttatttttttaggaagtcggttcgagaggtaaattttaaaatattttgatatgaaatattttgtttttttgattaatttaacgcgtacgtttttttatatcgatgcgtttttttaaatattttgtattagattttaataatgatttatgcgtgtttattttttaaaagtttgaaaaagaaaattttgtttatcgaaatgaattttatgaatggggtaggttggttgtatcgggacggaatcgtttattcgattcgaatgaattggtaggagtcgcggttatatttaaagggttagagcgcgcgttttttttcgttcgtttttaagtttcgcgggtttcgtttattttgttcgtcgttttttcgtcggcggtcgttttttgcggcgttttttttcggttagtggaggggcgggaggaggggcgggggtgcgcggggcggggggagaagttttggagcgggtttgggttgtagtttttttgtgtcggggattttgttttttattcgttagcgttaggtttttttttttcggcgcggatgatattagaatttttttaagttgcgtcgcgttatagttgtttgcgaatattgagttgtttggcgtcgttttgatatttttagaaagaatgtattttttgtaaaaaaaaaaaaaaaatattgagagagggagagagagagagaagaagagagagagacggagggagagcgagatagagcgagtaacgtaatttgatcgagtaggtcgtacgtcgtcgttttttttttttttttgtttttcgttatttaggttggtattggtgattttttttttttttaagtttgattttttgtttttaattatttgggaggatttaaattaattttaaaaatttaattttttttttttggaggttttttaggggttgagaggacggtttcgggatcggtgttttcgagggagggatttgttttttaagtcgtaatagttagttttgggatttgttttttaagttgtttagttagtttcggttttcgcgagtcgggttgtagggacgttttcgagagttttgcgggtttcgcggtcgtgttttcgcgttttcgtgcgggtttcgggtgcgttgggcgggcgggcggcgcgaggggaggttgtgttattttagtaatttaggggtttatttaggttttttatttttttttttgtaggtgattcgaggagggatttcgttttcgagcggttgaggatttcggtgtagaggagtttggttcgtagaattgtagagtcgtcgtttttttttataatttggtttcgttttattttgtcgtatttagtttttggatttttgtttttttttttttttttttgttaaacgatttttttaagataatttttaaaaaatttttttttttgtttatttttgttttttagtttttttatttttttatcgaaagtaaattatttaacgattttcgatttttcgacggtaggagtttttcgattttttaggcggatcgtttttttttttcgcgcgcgggtttcgggttcggcgagagggcgcgagtatagtcgaggttatggaggtgacggcggattagtcgcgttgggtgagttattattatttcgtcgtgtttaacgggtagtattcggatacgtattattcgggttttagttatttttatatggacgcggcgtagtattcgttgtcggaggaggtggatgtgttttttaatatcgacggttaaggtaattacgtttcgttttattacggaaattcggttagggttacggtgtagaggtatttttcgatttattacggtgagtgcgttcggggtgtcggggttttcgtcggtcgttttagtcgtttcggttcggggaggtcgggagggatttgagggcggggagaggttaagcgaaagtttttatttgtcgtttttggtttatttataaaaaaattggggttcggaaatgggcgaggaaggtttttggttcgtcgcgagagtgtgttttgaaagagtcgtagtaggcgtttttttcggttggtggttttggggtttggcgtttatttggcgggcgttaggtcgtagtttttcgtttttgcgcggttgtaggttttggggtggggggtttcgggatgtttttaagcgcggggtgttttggttttgttttcgcgggttcgggttttttgggttcggtagtcggcgtcggataagtacggttggaattcggtttttttaaaaaatttggcgttttttgttattcgttagttttttttaggcgggtgggcggggtggagggggttttttgttagcgttttttaattcgtatatttttagaaaggttttagagatttatttatttatatttttttttttgatttttttttagagttagtgtttttggtttttagataggttttttattttttggttttaggaatggaattttgatgttgaaggggtttgggggggaagatttttgttttaagtttgagggatttgagattttttagattttcggttgtatagaatttttttgcgtttttgtttttaagtcgtttttttgtttgtaatttttgttttattttgtttttgggtattgttttttattagttttttatttaagatgtaggatatattttcgtttaaataaaggtaattttagtattattttttttttttttttatttggagaagtttaggagagttttgaaatgtaaaaaaagaagattaggtttgtgtagtttgaggaaaaaagatcgaatattttttagttttaagtttgtttttaaagaagaaataggggtaaaatatcgggtagaaaaagtgtggggttttttgagtttagttagatcgaattttgttttgatttttttatttagagtttgttttgatacggatgatatagttttttcggtagtaggcgttttttattttgttgtcgttaggttttaaataatcgtttttgcggatggggcgttttttgtttacgttttgtgcggattagtagttaggtggaaatgcggtagaggtagatttaatattatttattatattattttttgtataatatgaattttgatttttggtgtttagagaattttttttttttttttatttttttttttttttttttttttaagattttagttttagtattgtttttaatggttgaatcgaatgttaaatgttgaggtaggtattggttttaaagattaagaagtgtgtggatttgtatttgttttttaaatgtattttttagagtgtatgagttatagttattttaagattgtgcgttttaaatgaaggttaattagattttgtgtttgagttattttttatttaaaatatatatattaattggaattttgtgttttaggggtttaggtgaaaatttatttatggtattggtgggattatagttttattgagggtgtatggggtttacgttattttttttttttttaggatttgggagggtgagaaaagtagagaaaatggttattttagggtttagttttgggaattttttttaatagttcgagtaatgaaaacgtttttgtaaattttattttaggttttttgcgggtagtttggtcgtttttgagtaagtattgggttaggttttcggaaattaattttgaaagttttttgatttttgttttaaggttttttttttttgtatttggtgttgggagttgggtttgattttagggtcgttttttggtgtggagtagttgtgtggtcgggttttattttttaggtttttttatttatagtcggtttttttattaggttggttgggattaagttcgagttagggaatttagggttattgaaggaaatttataaattaagttaggttttagagagagattttggggaatgtgatttaggcggtgtatttggagaggttaaataagtaaaggggtttttttttttttttgtagtaatttttcgggtgttagttataggttttttattttgttatatttgatgggatatttttgtgggagagatgggtgaaggattttgtttttagtttgatttttaggtgtgttaggtaggtatttcggggatcgttaggatgagagagtgggtttgagttcgggtttttgttgaaaaggaggtcgatgcgaggtagagattttttaggtgtttttgacggttttttagggttatatttatttttttttttttttttgtttttttttcgttgttttatagg

SEQ ID NO: 738 - DNA, 7802 bp, Artificial Sequence
  chemically treated genomic DNA (Homo sapiens)
tttgtggggtaacggggaaagggtaggagagagaaggagggtgagtgtggttttgggaggtcgttagggatatttggggaatttttatttcgtatcggttttttttttagtaaaagttcgggtttaggtttatttttttattttggcggttttcggagtatttgtttggtatatttgggggttaggttggggatagaattttttatttattttttttatagggatgttttattaaatgtagtagaatgaagggtttgtggttgatattcgagaggttgttgtagagggggagaagggtttttttgtttatttggtttttttagatatatcgtttaaattatattttttaaggtttttttttagaatttgatttgatttatgggttttttttaatggttttgagttttttgattcggatttaattttagttagtttgataagagagtcggttgtgagtgaggaggtttgaaggatggagttcggttatataattgttttatattagaaaacgattttggagttaggtttagtttttagtattaaatataggaaggagaggttttgggatagaagttaggagatttttagggttagttttcggaaatttaatttagtgtttgtttagaaacggttaggttgttcgtaaaaggtttaaaatgggatttgtagggacgtttttattgttcgggttgttggagaaagtttttaaggttggattttgggatggttattttttttgttttttttatttttttaaattttaaaggagaaggagataacgtaagttttatgtatttttaataaagttatgattttattagtgttatgggtgaatttttatttgagtttttaagatataaaattttagttgatgtgtatattttaaatgaaagatgatttagatatagagtttgattagtttttatttaaaacgtataattttaaggtagttgtaatttatatattttgaggggtatatttaaaaagtaagtgtaaatttatatattttttgatttttaaagttagtatttgttttagtatttgatattcgatttaattattaagaataatattgaaattaaaattttaagggagaggaaggggaggggagtggagagggaaagagagttttttgaatattaagggttaagatttatattatgtaggaagtagtatagtaaataatattaagtttgtttttatcgtatttttatttaattgttgattcgtatagaacgtgggtaaagagcgttttattcgtagaaacgattgtttaaaatttggcgatagtagggtagaggacgtttgttgtcggaggggttatgttattcgtgttaaggtaggttttgagtaggggaattagggtagaattcggtttggttggatttagaaagttttatattttttttgttcgatgttttatttttgttttttttttaggaataaatttagagttggaaagtgttcgattttttttttttaaattatataggtttggttttttttttttatattttagaatttttttgaatttttttaggtgaaagggagaaagaggtggtattggaattgtttttatttaaacgggggtgtattttatattttaggtgggaggttaatggagggtagtatttagagatagagtaaggtaagagttgtaggtaaggaggcgatttgaaagtaaagacgtaagaaaattttgtgtagtcgggaatttgggaaattttagattttttaaatttaagataggggtttttttttttaaatttttttagtattagaattttatttttgaagttaggaggtaagagatttgtttaaaaattaaaggtattagttttgggaaaaggttaaggagaagggtgtgaataaataggtttttggggtttttttgaaaatgtgcgaattgagggacgttggtagagggttttttttatttcgtttattcgtttagaaagagttagcgggtaatagggaacgttaggttttttggaagagtcgggttttagtcgtgtttgttcggcgtcggttatcgggtttagagagttcggattcgcggaggtagagttagggtatttcgcgtttggggatatttcgagattttttattttaaaatttgtagtcgcgtagagacggagggttgcggtttggcgttcgttaggtgagcgttaggttttagggttattagtcgggagaggcgtttgttgcgatttttttaaaatatattttcgcgacgagttagaggtttttttcgtttattttcgggttttaatttttttgtaaatgaattaggaacggtagatgggggttttcgtttgattttttttcgtttttaggtttttttcgattttttcgagtcgggacggttgaagcggtcggcgggagtttcggtatttcgggcgtatttatcgtggtgggtcggagggtatttttgtatcgtggttttgatcgagttttcgtagtagggcgggacgtggttgttttgatcgtcgatgttaaaaagtatatttatttttttcggtagcgggtattgcgtcgcgtttatgtaggagtggttgaggttcgggtggtgcgtgttcgggtgttgttcgttgagtacggcggggtggtggtggtttatttagcgcggttggttcgtcgttatttttatggtttcggttgtgttcgcgttttttcgtcgggttcggaattcgcgcgcggggagggagggcggttcgtttgggaggtcggggggtttttgtcgtcggagggtcgggggtcgttgaatgatttgttttcggtggggggatgggaaggttgggaagtaaaggtgagtaaaggagaaggttttttaaaaattattttggaggggtcgtttagtaaagagaagaaggggaagataaaaatttaaaaattgggtacggtagaataaaacgggattaggttgtaaaaaggggcgacgattttgtaattttgcgagttaggtttttttgtatcggggtttttagtcgttcggaggcggagttttttttcgggttatttgtaagggagagaatgggagatttggatgagtttttgagttgttggagtggtataattttttttcgcgtcgttcgttcgtttagcgtattcgagattcgtacgggagcgcggggatacggtcgcggagttcgtagggttttcggggacgtttttgtagttcggttcgcgggagtcggggttggttgagtaatttggagggtaagttttagggttgattgttacgatttggagggtaagtttttttttcggggatatcggtttcgggatcgtttttttagtttttagaaaatttttaaaagaggagagttgagtttttaaaattgatttaggtttttttaagtggttgggggtaaaaaattaaatttaaaaaaaaaaaaagttattagtattaatttgggtagcgaagagtagagaggaggaggaggcggcggcgtacgatttgttcggttagattgcgttgttcgttttgtttcgtttttttttcgttttttttttttttttttttttttttttttttttttagtattttttttttttttttatagggaatgtattttttttgaaagtattaagacggcgttaggtagtttagtgttcgtagatagttgtggcgcgacgtaatttaaggaggttttagtgttattcgcgtcgggggggaggagtttggcgttggcgagtaggggataggattttcggtataaggaaattgtaatttaaattcgttttaggattttttttttcgtttcgcgtattttcgttttttttttcgtttttttattgatcggaaaggggcgtcgtagagggcggtcgtcggcggaggggcggcgggtagggtgggcgaggttcgcggggtttgggggcggacgggagggaacgcgcgttttggttttttaaatgtggtcgcggtttttgttaatttattcgggtcgggtggacgatttcgtttcggtgtagttagtttgttttatttatgaagtttatttcgatgggtagaatttttttttttagatttttaaaaaataggtacgtatggattattattaggatttaatgtagggtgtttgggagagcgtatcgatgtggggaaacgtgcgcgttaaattgattagaaaaataaaatgttttatgttaaggtattttgagatttgtttttcgggtcgattttttaagagggtgagttatcggataaaggggagatgtttttgattggagcgttcgcgttaattttgttgttattgttatttttttttcgagttttttgcgtttttaagtttttagagtgaatacgttttagttgttgtagttgttttttttagatttaatatttgtaattaatgtgtgtttttgatttgagtggtaatagtgagggatgagaaggggggaggggaggaagagattggttttaatttatttttcgagtacgtttagtgtagacggatagaaagaattcggtttttattttagggatttaattttttttttcgtttcgttcggagttttatttatttcggttttcggcgttttttttatagttaaggaaattagttttcggtttgtatcgattttaatttcggtttttggtcgggattttacggcgatttttttcggttcgcgggtttttaggttacgttttgcgtaatgggtatttcggggcggagggtacgcggtttcgaggcgttttagcgagaggggcggggcgagcgggggcggggtttggagggattaattagcgggcgaggttgtggtcgagtcgcgattggttcgtttcgcgggttttaatttgtatcgttcgttcggttttttgagttattgtattttttagcggcgttcgggtggttgtagtcgttggttcgaaaatgttgttcgggcgagtaggggttaggcgggaaaagaagattttaaatttattttttgttcgtttttagggtaatgttgttaggagagggagtgggttttttcgtaggttattttatcgatggggttgagagtttaatttggggttttatttgaattggagatattgtttttttttcgtttttttattttataaaattttttataaatgtaaaaattcgagatagaagaagtcgtttttgaaagtaagttttgaaggattttttttatgcggtgaaggaataataataatatttaattttattttggtgtgtgagggtcgtcgtgttttaaaatattatttttgtagaaagattagtgaaatgtattggaagaagtagtggaaacgtgaatttttttggtttcgcgtttggattttttttggagtttttatttttttaaatttgatgtttgtttgaaattagggttgaatttttatatataggatagaaagaaagaattttaattttttaaagaaagtttttttttttttcgttacgttttttttgagtttatttggtttttcgttattaggcggtttagttaagaggtatcgattttttttttattttttgattattcgttttttttgggttagttaggttgttcgtatttttttttgtttatagcgttttttaaattttttaattatttagttgttgtttaatatttatcggaaatttttttataaataaggagaaacgaatgtatacgtatttttgttaagaagttcgggattaagatttaaggatataagttgaaagaaaaaatgaaaaatgttttttcgcgcgttaatcgaggggtggatgcgttacgtagcgtgagtttagtttatagttacgcgtaagattaaaagttgttatgggttttgcgcgcggagattttagagtcgaagagagaagttttcgcgttagaaacgttgcggatgttaggttttgaaaatgttgatttttgaggttaagaattattttaaagataaaaagaaaagattggtgaggaggtttttcggtgtaagggcgtttattcgttaattttggatggggaagtagggattattcgtttaaatttaatcgcgagtattaagtcggattggtcggggatggagaagggtaatttttatttttagaaaaataaaagatttcgaaggttttttttggtttgggtggtttgaggttggtagagaggggtggggggtttggggttggatgtttcgggtaatggagttagtcggtagggggtatttagtatttaatttttagtcggttcgttttagttttcggattgatagtgggtaattgggagagaggacgttgtttttttgatggttcgcgtcggttagtttcgtcgacgttatattgggtttgacgttacgggtttagtttcggagttcggagtatagggtagcggggaagggaaaaggatgggagggggatgtcgaggagggagggtcgaggtcggtttcgggatttacggggaaggaagggggaagggagcgaggttggagaggttgcggcgcgtggtttgaggcggagagtcgggttgcgggggttcgggttaggttaggcgtcggtttgattcgtttcgtcggtaagagtaggtcgggttttttttttttttggcgggcgggggagggaaagggggattttggtcgggggtaagggggaaaggtggttttgattttttttgtgttatcgttataaagttgattttggttttttgcggagaagtttgagcgttttttcgtagatttgacgcgatttttttttaggtatttgggtttcggtttggtttagcgagtttttttttttttaaggagtagtcggcggagttcgggtggaggaaagcgaggaggcgattaggaggatgtcgtcgtcgtcgtcgtagggttcggggtttttgtagggcgtaaggttttttttattagggtaaggggttggcgattaatttggacgtttgggattttgggagtaagtatttcgtagtcgagtaggcgacggcgcggttatcgtttagagaggagtcggggttcggggcggcgtgcgggtcggtagtagtcggtttggtttattcgaaattttaggtttggaagcggttgttttaggcgttaagttgagcggggtatgtgtgtttttttgggaaaaaggtgagaaatggagtcggattttttttattcggtaggggttaagttattatatatatttttaaatatatgtttacgtgtaagttttttttattcgtttttttaggggcgaagagattttgttttagtggaagtggggaaatttagtcgggtatagaaagtagaggttatggcgtagagcggaggcgcggttttttggggtttagttttagggttatagatttagggcgcggagatgttcgcggtcgggttatttattagagttaggtaatcggcgtttttaggcgagtttcgcggggtcgaggtgtcgggagaagcggtttcgggcgttcgcgcgttgttcgatttgggtaataggtaaagcggagtttcggggtcgaagttttaaagttattaatttcgcggagggggagagagcgtgtttcgggtcgttcggggcggttatttgagcgtgtttatttaaagattttgtaagtagagcgcgcgcgaaatcgtcggatttttagcgaggtagtaaatatttgtaggtagaagaaagaagcggagtcgagtcgagtcgtcgagttttttttttcggagtttcggagtttcggcgtttgtttgggcggtttcggtcgcgtagatagaaaagaagtcgggaatttgcggggttggggggcggggagcgatattaaaggttagaaattgtagtacggttcgaggttttggcgagttgggtttgggggaggagaagtttttttttatttta

SEQ ID NO: 739 - DNA, 19659 bp, Artificial Sequence
  chemically treated genomic DNA (Homo sapiens)
tatttagatttgtttttataaattatttggttttagtgttggaaaatagtttattaaaaaattattataaaattattttttaattaattgaatttaaatatttttatttaagaatattaagaatttaaatattttatttaagaatatttagtttatagttaattagttatgattatatatttaatagtgattattatggtattttgtattttattgattaataaaggtggaaagaggtgtagttgtttttttgtgattattagttaagttttatataaattttgtttttgtattattttttaaattttatttttaattttttttttttttttttatttttttttttttttttttttttttttttttttttttttttttttttttttttttttttttgtttttttttaagtagaagataaaattatttgtatttagtttgaattattattttttttaaatatttgtttttttttagtgatgtatatttttttatggaagtgtttttgggaaagttatggttatttggtagtttgttatataagattttataaattattatagttttagtaaagagtattatggtagaagataatttatttttaattgttttttaaatttttattttaaaataaatgaaattatttggttaataaatttatttatatttgttagtattttttgaatttttgtattttgtggaatatatttttataatcgtttttattgttttaaaatatgaataaattatttgtagatttttatgaaaatttaagtaaaattaaaaatgaattggttggtttatgaaaattatgattatttaaattatatttggattttagtgagtatataaacgaattatagaattttagtatgttttttatttttaaatttagggttgataaatttttttaggtatttaaatttttttattaaattgattatgattagtgtttattatatttagtttttatttgtgttagttgtgttagttgttgggaatattaaaatgaaggtgatttagttatagtaggagtattgtgggagagtaaagtatagaggaggtggatttagtataatttggaaatttgggtgttttttaagttttagagttatggatttagttgtttatttaaaattttatttgaaaatattttttattagattgtgtgttttttttagtgttttttattttggatattggtattaatatttatttatttgtataagttagaaatttgggtataattttttatttttttttttttagttaaagtttagttaattattattttttgatgattttgtgttttaaattattttacgtttttgttagtattataggttatatttttgttattttttgtttggatttttaaagtagtttttaagttatttttattgtatttatttttattttttttattttttgtatttttataatttagtatatttgttattttgtttttaatatttgtttttttagttagattaagaaggtttatgaggggaagagttatgtagattttttgatatggtagtattaatagtttgtatgttatttggtataaagtggtatgaattaaatatatgttaaatgaataaatgaaagattgatagacgagggataatagatacgtaaaatagagtaagggaagaaagaagaatgtgaataaagatagtggaaagtttaatagtataatgtgtttagtgaattataagtagtttagtcgtatttaattttaatgtatatatatagtaaagaattttttttagaggtaagtaggattaatttatgaattttaagtataggtattggtttaagttattttaaatagggaggtagaaatatagttttatttgtatttttgataaataatgatagtaatagaggggagaatgatttaaaggtaggttagttagaatgttttttattgtaaatttagttagaataagtttaagtaaaaagagatttattataaggatattggaattttttatggaagttaattatagttaaatggttgagttataagaattttttgaaatttggattgtgttttgtttttttttgtatattaattttaaagatattatttcgatttattaatattaattttgttaggttatttattaggaaaagatattgataatgtattttaatagtataaagagaatttgaacgaagagaatattagataaaattattttgaagaaggttatttttataggagtattgtaagagtttttagaagattgtcgtagtattaaaggaaggtattgttttgataaagagtagttgttagtgttattttttagtaattaaggtttattgaaagaagagatatgggatagagaaaagaattaaagataggttttatttgttttataattttgtttggaattagttttagttaggaagagatttgtattttttttgaagttaatggtaagatggaaaaagaggaaagagggaaagaggttattttaaattagttttttataggaaaaatagtttttgtaaaattttattgtttatgtatttaataaataatttttgttaaatatatatatttagtgatatatttttagttgttataattgttgttattatagataatgtgagaaggtttgatttggttttttttatttattttttttttatttgatttattagagtaattattgttatatgaggttttttatttaggttaattatgattatttttttttagttttagaattatagtaagtaattaatatttgaaagattaaggaaagttatataaataagattgaaaaaaaggtttatatatttagttattagtttgttttgtcgaattttagttagaaaatttagttaagagaatgtatttggtagttcgtatagagattttttaagagggtatttaaatgagatgttgtaatttttgttatatgtagtttattattaaataaacgtggtaaatattattgtaaaagtagagataaagtttaattttttaaaaaatgaaagaatgagttggttttaaattttgtattaaaattcgtagaaaataatttgagtgtgtttttttgaatgaattaattagaagatgacgaaatatagttgaataaaagggatatagaagtataaatatagtgtattattttaaagaaaaatgaaaattgtattaatatgttaatgtgttatttattttttttgagtttcggggttttgagtagtttttaaatttttttatatttatttggagtattatttttaaataatttgttatagaattaaaatatatttttaaattaatttgtatagtaaattaggaatttagttaaagggaattgaaaatttagatttatagtaattaggaagttgatttttgaataagatagagttggtttttggataggaaagttatttttttgattatatggatttttattggttttatagaaatatttgtgttttgatttggtataggtatttttttttaattagttggattttattttttgaatttaatatttaaggatttttagtatagatagaaaatttgattaaatatgtaattatttaaattggtttattgaaattttgatagattttgtttatgtagataatttttggttattgagttgataatgaagttttaaattatttatttgcgggattttggatatagggttgtttttaaatttttttattgagttttaatggttttattagttttattgatttttatagatattataaatttggaaagttagtgggagaacgtggtaataattagaataagagtaataggtgatattaatttatgttattatgtgatggatgttattatgagttttgtatttagattattttaattaattttatagtaatgttgtgttaaatgtattgagttattattatattgtatatgaggaaaatgaaatttagaggggtaaaataaattttttaaggttatatagttatgaaagttgagtagggatttgattttagagtatgtgtaataatttgtatttgattattttttgaaaatagggttattgtaaaaattaggagtggaatttatttaattttaatgaatgatttatttatgattttttagataagttatagaatttatttagtgtttagtttatttttttgtaaaatgaagatgttggattttatgttttatagggtttttttgagtttttaaattatatgtttataaaatatattagttgtaaattattagtagaaggagttttaaaattattgtagggagtttaagatttgttattaattttttatgattggtagtggtgagttatttaatttttttagttatttgttttattttaaaggttattttttatatatatgttagtgttttataaagtgtaatatagtatagaaatataaagtattatgttattatttaaaataagattattttatagtattagaattatggatttaaaatattatgttgaattggttttttattttttttttttttttatttagaatatttggtttgtaatattttaaggtaatgtttatttgtagtagatttaaataaagagaggaagagaggtaaagatagagttttcgattttttatttatatatgagaaaggtggggtgtttaaagaagatatatagttttatatagggggagaaggtgtgcgttattaatatattaagtaaattttagtgaggaatagtagtggaaaataatttatatattttggtttttttgtagtttgataaagttaatgattaaaattttttagattttttattatagtatttttagggtgtttatttattttgattgatattattttattttttttgggttaaagataatagttttttgtttttgtgtttaataataattttgtgttgtttttgagattaataattgattaatttatagttaggaatttttgtaaaaaggaaattaattatttttggttattatttttatatggttatttataggagagaggaggtgttgtaagattttttggtagaaaaatgaagagggttttggtattattgtttgttgtggtatttggatatgttttagagagaggtaagattttttttgttgtgattatttataggaatttttattagtttaattttatattattatttaaaaaatgaaataaaaagtaagaaatagaagaattggtgaatatgttggggagagggataaggattagagaggtattaattagagttttacgatgttatgtaatgttgaattggaattgataaaaaaaattaatataagaattttgttaaagaaagtaaatggaatgatataatttgttaattattttttttttttttgttgataagtaagatttagagagaataatttaaaattagatatttgttaattgttataagataatgtaaataaagattgtgatttattattaagtatttatttagattttaaatatttattattattgagtgtaatatattatgttaatgatgtatgatgttaatttagagatttttttgatttttttagaggaattttatatatgtagtatttgaaaatgtattgtatttttaaaaatattttttatataaaatttttttatagttatgaaatataattataaataagataatttagttatattttttattgaaattattttttagatggtgtgtttatttttgggtaatgtttaaaaatttttttatatgataaagattgagattatgggaagtatataattttatgaattttatagttgggaaattttttattattagttttaatttatttttttggttgattttttaatgtttataagggatatttgtatttattttgttttgtaaaattaaggtttttatttagtgttgttagttaatagttttatttaattcgtatattattatttataatagtaatgtgttttgttagtggaataaaatgtgtgtttttaagaattattagttattaattgtaatatgaataattttatttttgattttttatttttttttttatatttatttttttttggttttattttattatttaaattattttaattcgttttatttattaatttttaagtaagttatgcgtttttaggtaagattataaagttttttttagatagtatagggtataaaaaagtaatataaattgtgttttttataagatttttgaataggttatgttttaagaaatttttttaagttttatttttttggttaaggatttgttggggtagatttgattttgaaaaattttattgaagtaggtttagattagggtttttaaatatagaaggtttaataatggttaggaattggaattatatatggaggttataagtaggagtatgaattattattttagattgttgatttaataggtgtatattggttttattttaaagaatgaaagtgttttttggagaataatagagtattttgtaatttatattttaatatttttagtagtttttagattttgatgaaatggatgttaaaaatttttagttagttttttagaagatttaaattttatttttataatttatgtgttatatgttagatgatattttgagatatatataatatatttgtaagtattaatttttaatatttggggagagtagttttgatttattaattttttattttttaatatttgagtatgatttaaagattaagttagtagtttatttagaagttagttgtgttttttttggtaggaagttataaagtgtatagattaagggagttttgagaatttttaggttttgagtagttttgtattgtgggggattggtttgaattgtagttttttttgtttgttatagttttagagagttgattatttatagtatttatttaagtatttgttttaaaatatattatatttaagatttattttgaaaagaagtttttgtggttaaatatatttaagaaatgagttataatttatttttttttggtgggttttataatttatgtttttgtcgttttaaaggttttgagaaatattataggaaagaaattttatttaatttagagtatttaaatatattgatttttttttataatgtttatatttgtggaattattttttggaaattttgggtttaaaatggatattgttatagatgattttttattggataggttttaattaagttagtttttttttattaaatagtattgggaattttgtttttaagttattgggtatattttggagaagagagtttattaaatttgttaaatttggttagtattataagaaaatgtttatttttgttattttatgaaaagtaataaggtagtattttttagttgtttataagtagtttttttttttaggattgaaatggatgaaatattaatatataatatatttttttttttttttttttaaagaaattaagtaataaagattggtgatatagttataaaatttttttttaatttgtagatagaaaagttattttaatgattaggaaatatttataaaaattgattttttaaaattaaattatagtaaaaaaatttttagttttaagttatatattgttaatagagtattaaaaatattttttttgtatttttttttttttttttttttcgatttaagtttttttttttattattgttatattttaagttttagggtatatgtgtataatgtgtaggtttgatatatatgtatatatgtgttatgttggtttgttgatatttattaattcgttatttatattaggtattttttttaatgttatttttttttttgttttttattttatgataggttttaggttatgatgttttttattttgtgattaagtgtttttattgtttaatttttaattatgagtgagaatatgtggtgtgtggttttttgtttttgtgatagtttgtttagaatgatggtttttagttttatttatgtttttgtaaaagatatgaatttatttttttttatggttgtatagtattttatggtgtatatgtgttatattttttaaatttggtttattattgatggatatttgggttggttttaagtttttgttattgtgaatagtgttataataaatatatatgtgtatgtgtttttatagtagtatgatttaaaattttttgggtatatatttagtaatgagatggttgagttaaatggtatttttagttttagatttttgaggaatagttatattgtttttcgtaatggttgaattagtttatagttttattaatagtgtagaagtgtttttgtgtttttatattttttttagtatttgttgttttttgattttttaatgattgttattttaattggtgtgagatggtattttattgtggttttgatttgtatttttttgatgattagtgatgatgagtattttttttatgtgttttttggttgtataaatgtttttttttgagaagtgtttgtttatattttttgtttattttttgatggggttgtttgttttttttttataaatttgtttaagttttttgtagatgttggatattagttttttgttagatgggtatattgtaaaaagttttttttattttgtaggttgttgtttattttgatggtagttttttttgttgtgtagaagttttttagtttaattagattttatttgttaattttggtttttgttgtttttgtttttggtgttttagatatgaagtttttgtttatatttatgttttgaatggtattgtttaggtttttttttagggtttttatggttttaggtttaatatttaagtttttaatttattttgaattaatttttgtataaggtgtaaggaagagatttagttttagttttttatatatggttagttagtttttttagtattatttattaaatagggaattttttttttattttttgtttttgttaggtttgttaaagattagagggtcgtgatatagttataaaattattaaggtaattatgttaataggaaataaattattgtagttgataagagttgttggtaaaaagaggtttttattatgaatatttttttttttgttttaagtattttatttatagtatttttttttattaaatatgatataaaattgtaagaagaaagttttttttgggttggtgggtgagttatattttttttttttttttttttttgttaaaatagttttacgtaagggttgaagttatatagtttttattattgagagtaatgttaatttttttgaaaattaatagtaatgttttattttattgatattaggtgtaatgttatatatgtagttattaatatgtaatataaggagaagtgtgtatattttgtaaaatattattagtttaatttatttaggataggagaaaatgaagaaatttttaaaaggaattgatgatgtttttttttagtatttttggttatttaatttttttattttatttattgtttttttttttttttttttattttttttatttattttgatttgattatattggtttttatattattttatattttaagttttttgtattttagggttttgtattagtttttttttatttttagaatattgattgtttagatatttttatagtttttttttttattttttttaggtatttattttaagtttatttatagagggggtttttttagttaatttattataaataatatttattagtttattattttttatttttttatttggatttattttttttttttagtatttagtattttattttattattggttgtttatttgtttattgtaataaatatagaatgtaagttttgtgaaattaagaatttttgttattttttgtaatttttagtaatagaatattatttggtatttagtaggtgtttaaaaaattattgtgtaatattataaaattgggtttttgtatatgtatgtttattattagatttaggttttttaaagattggtggttttagagtttttttttatatgatgttatgtttttaggagatagttgatgtgtttgtgtgtgtttttgtgtgtgtgtataaataggtatgtatataaatatatatatttatatgtataaaaatgattatgaattggatttagttaataataataataataataataataataataataataataataattgacggtaatattttgttttttgaggatataatttttattttataaatgagaaaattgaggaagaatagagaggataagtaatttgttagcggttttattattatttagggtagtaggaatttaaatttaggtggtttgtatttaaagtttttattttaaattatgataaaatatatttttatatggatgttttttttggtttttatggtttgggttaataaagtttttttaagtttgtttttaaagttttattttatttgttaatattttaaaatttggagattttataaaaaaatttagatttttagtttttttggaaatataggaatgtgtggtaataagggttaaatttttatatggtaatgatgaattggagttgaattgttatttttttttttggattaaatttttagtttttattattgagtatttaatgttttttttttttggattaaatgtaagttgtgtggtttttagattttatgagtatttgggtttgttaatttgggtgttatggtaaaatagtaatttgaggtttaatattatttaaagaaaataatattaataaataattgtatttttatatttaaaataggtaaaataattagttattagttatttttattttttataaatgaaattatatatgaattgtttaaatatgtttatatttaataaattgtgttttttattttagagaagtgaaatttatataatttttttttgaaagttgatttagaaagatttattggaatatataaggagtgttatgtagttatatatgttttttatatttatatttgttgatgtagttgaatttttatgtgggttttattttgtttttttatatatatatataaattttaagttttggaatatatgtgtagaatttgtaggtttgttatataggtatatatgttttatggtggtttgttgtatttattaatttattatttatagtaggtgttttttttaatgttattttttttttagtttttaattttcgataggttttagtgtgtgatgtttttttttttgtgtttatgtgtttttattgttcgatttttatttatgagtgaaaatatttttatatggaaataattgtgatttttttatttgttaaaaaatataatagtaagagtatagttttagaataattattttagtttttaaattttattatacgaaagtaaatttgttattttgatattattagttttgttgtaaatgttaggtaataattggttttaaaatgaaaatatttttatttgataattgtatattagattttaaaaaatataaataataaaatatatggttggattgttgattaggttaatattgaagtgagtgttttttttaagtttttttagtaaatatatttaaggaattatattttggtggtaattggaatgtaatatttagtatatattttatagaaaatattggtattttattttttatttatatgatattgtaaagtttattattaatttatttgtttaaaaggttttttttagttttattaagataaatgaagtgttataaaagtatttaaagtaatgtatattataatggttaatataaaatagtattgagtatttgatagtgaaattttttatttaaattatagtttttataattgtttaataataagtttttagttttttattgggatttaataagaaaattagaaaattatattttatttatgaaaaaaaaatttttgttaatatattattatagtagataagtattataaaatttttttggttatattaaaaattaatatataaatatttattttttataattttaaaaagataaattattaatttttgaaatagaaatttttttatataagataatgtaatttgttggattttaaatgtatttaaatggttcggggatttgtttgataaaaatatgtgtgatgatagagatataaataatgatatatatttaatatattttttttattagattgtataatttgatttcggtttatatagtataattttagtagttattaagacgtgtattttgttaggaaatagtgaaagaaaattatttatgtatagtgttttttggtttaaaatgtattgttttttaattggtaaattataattatatatatttttggggtataatggaatagtttgatatttatatataatggggaatgataaaattattaatgaatttttttattattttattgtttattattttttttgaggtatttgaaatttatttaagttattttgaaatataaaatatatgattaattatagttattttgacgtaaaatagattttaaaatattttttttgtttaattgaaattttgtattatttttttagtagttttttattttttttttttttttttttttgtagtttttagtagttattattttatttttttgtgagtttaatttttttagattttatatatgatataatgtagtatttttttttttgtatttggtttattttatttaatataatgttttttagggttatttatgttgttataaatgatagaatttttttttttttttttttaaggttgaatagtatttaattgtgtaaatatattatattttttttatttattaatttgttgatggatatttaggttgttttagtatttcggtagttgtgaataatgttatagtaaatatgggagggtagatatttttttaatttgttaatttatatttttttggatatatatttagaagtggtattgttaaattatatggtagttttatttttagttttttgagaaatatttatattgttttttataatggttgtattaatgtatatttttattaatagtggaaaagagtttttttttttttatatttttgttaatgtttattttttaatttttttggtaatagttattttaataggtgtgaggtgatattttattgtggttttaatttgtatttttttaatgatttttgatgttgaatattttttataaatttgttggttatttgtatgtttttttttgagaaatgtttgtttgggttttttgttaatgttttaaatcggttattggtttttttgttattgagttgtttgagttttttatatattttgtatattaatttgttattagatatgtggtttgtaaatatttttttttagtttgtgggttgtttttttattttgttaattttttttttgttgtgtagtagttttttagtatgatgtaattttatttgtttattttttgtttttgttgtttgtaattttagcgttatgtttaaaaaatttattgtttagattaatattatggagttttttttttatgtttttttgtattagtttaatagttttaggttttatatttaagtttttaatttattttgagttgatatttttttaagttttaattgagatagattatatatggttagttagggaggtagaattattattatttattgtttatattattttattaaaggagtgttatgtggaattatgattgtgttagtttttgttgaatgatattttttttagattttataatatttgtttaatgaagtgatttttatgggaatgtttagaattgtgttaggtatttaggatttaaaaatttagatatgatttttgttttgaaagaatttttatggaaaataaagataattttgtttaaaggtaatattagtatatgttgtttttataagatttattagtaaacgtttagtgagtattattttaagtttttgttattattaagattaaagcgtttgagttttttaattaatttgtttatttttttatttttttgtgttaaattttgtaaatttttttatttaaaaaaaaaaaaaaaggggtcggggaagaaaatgaagaataagaatgatttttttttaggattgatagttaaagataaagatttttaaataggtatgaataataatgaatttttcgatattataaaaagaatattattaaattttaatagagtaattttttaatttatggataaaatgtatttaaaaagttatatgttatttagaagttaaagtataattttttatagaaataatttaaatatgagatgaagtttttaaaatgatgtataaaaataggtagtaaatatgggatgtaaattgtgataattataaattttataaaatttttgtgaagattaaagtaagtaatatatgttaaatatttagaatagtattattaaattgttggtatttaaattttaattgttattatgatattattattatttatatttatattgttgtagaatttaagtgttttaatgtgttttaagcgtttaaattaaatgtaggggatattatttttatttattttaaaagtggaagaggtaaatttttttttttatttttatttttataaaagtaattatagatgaggaggtaattaatttataaaaggaaagagaggtgggatgagatgtatggagaaaaaatgttttttttggaattttggtaagtgttataaaggataggttattattcgaggtgaatttaaggatattagtttgagtgagtttgtgatgttgttttttattgtagttgtagtttttgagtaattaatttattgattatatattttttgttgttttcgtttgtgtttgaatttttaaagtttgaaaggacgtttaatttgttgtattgatattattttaaaaggtttagttaatttttagattagtttatttatagatgttatgtgggtttttgggtttagtattaaaagggttgaatttttttttattgatttaagtttaaatttttttattggtaatatttttagtgatatagaaattttttataattagattagttttttaaattagtttaataatgtttattatttaagttaatttattattgtgaaatgaataatattatgtttgattagtttgaataaatattgtaaattatatttttaaaaggtaaatttatttaaaaaaatattaataaatatattgagtttttttgatatggatgagtttgttagtatagaatagaaataaaaatgttaaagaaatgaaattgtgaaaatataaaatgtttaatagagttgttaaagtttatgattttttagaatataataggaaaatagtaatttgagatagtttttagtattttgtacgagtatttatttatgttaatgatatttaggatttattaatgtatttggtatacgaataattgttttagggagttaaattaggttttagtgaaagattagtaatagtgaaggtatttaaatatttattttaataaattttgtaataaagtagtattttattaattatttttattataacgaaagttatatgagggtaaggatgtgtttattttgggttttattgtaagtttaaatttaatattgaatttaatgtttggtataaagtaagttttaaaaaatatttgttatatgtatgaatgaatattgttaattttgttggtagaggtaaggtgtttgaagtagtaaagattttttgaaaataaattatattggtttttaaaagtttagaattaaataagatttattagaatgttttataatatagataaaaagtgaaatatgttattgtagaaagtaaaaattttgttagtgaaatttgtaaatatttagtattgtggggggttattttatgtgaaagtgattttattagagttattaagattatgttaatatttattagggttatattaaagtttaaattattttttttataatcgaatggtatatttgaaaatagagcgtataattttatagtttatttgagataggaattaattatatgaattggagtgagtttaattggttttatattaaaaatatttattaagtagtattttatggaatggggaattaattagtaataattatattgtaaattaattttagtatttatttgttgtatttgaaaattgagataatgattgatatatattggttttgttttgtaagttagatattttttttttgggtaaatgaatttataaaattattttattagaagtatattttgggtagtttatttgaaagattatggtgtaatagttttttttataggttatttttatattttaattttgagtttttttaatattttttttgagtttttttttttgttttttgttatgtttaaggttgaatgttttagtaaaaatagttttaaaatttttttaagttttatttattttatttagttttttattttttttttattagtttgtattttaattaaagtagtatataatgtttatgaattttaaagtgttgtgtgtaaatataaatagttaaataaatttaaattatttaatgggataatatgtagtgtttagttatattatttttatatgtatatttatatttttataatatatgaaatgaaattttatatttttagtgaaatgagaaattagaatttggaaggttagaaataaaatattttttaaaatgtttatcgggggtattttatttgaatataggattttattttgtatgttattgaatggttataagagaagtattaataaaaataaatttttttattttgtaggggggaatttaaataaatttagtttttatttattataaggaaaagaagtttttattagggttattttgtgtatgttttaaaatatagtaagttttgggaaaaaatattttttataatttttcgttatttttaaaagagattagattataatttttagtaagtgattttatagatgatgaggatatattgtattaaatttagggatttttataatatatggttatttaaatttattttgatatttataatgataaaataaatttatttttttaaaaggttgtttttattttagttataaaatagatatagttggaataaagattttttattagaatttattgttatgtaattgttagatattttttttagttttgttttaggagtaaattaaaaataatttttgatatcgtaagtatagtttattattatatgaggatagttttagttttaattatttttttttgtgttttagtttttaattttataaaatattattaatgattaatggaagttttttgttttgtttaattttttgaacgtgttataatatttagttttgtaaattaattaatatattttagaaaatgtataagatgtgaaggtttttagatattatagaggtttgttgtaagtggtttttttggttttattaataattagttttattaattttattgttttgttttagttgttagaataatattagatttaggatttaggtatgtgggttattttttattttttgtgtggttttgagggtgtttgagtaggttttttgttaaaaagtgttgttgaagaatgttttttttttataattattaaattcgattttttttattttaaaaatattttgggggggtatttatttaaaaaagtatatgttgcgattgttttttttataggtaatttgatattaaataggtgatattaatttgatgagttttaaagagaatttttaaaaaaaaaaatataatttttttaagtttgtatttaattattattatttttattgtaagttattaaatagaaatttttatttaggtatatgtttatattgttttttataaaattgtaattgttagagaggagaggaaatttttgggattaaagtttgatagtagttattattatattatttgagatgatttttttaatttttaaagtgagaaggataaattattaaaagttaaagttatttaaaatagagtaagtaatttatatattttttatatttttttttaaagatataatattataggagggaaattttttgggtttatttgtataaatgatgagttaggttaggagaatattgattgattttgatgtgttcgttttattatatatgtgatggatatgttgaataagggggttttatgattagtaattagtttttttttgtagcgtgaatgaatttaagagtaggtattgtgatttttttgtttttttttaaatattaatgttattttattatgagaatggttagttatatttaatagttaaaaatgttttaatttattgaaagttgaagttattattttatttaggtttgttttagttttattgtttgtggtgggaaaggaagatatagatatttgttttttgttttttttgtttgttttttttttttttttttttttacgttttaggttgtttttattttttttagggttaatataggaaaggagaagttagtaagagagatagtagtaggaaaaatttaatttaatgggtaaaaaatttaatggatagtatggtgagttaaggttgttttttttggttattaagatgtgtaaagttgttatttttttttattgtgtttttttgtgattttttttttttgttatttttggagattttttatatgtagttggtattttaagatttttttttgggtttttggtttttaaattgtttatttttatatagagatttaattgttggtagtttattgttttgtagatagtattttgttgggggtagagttgggattgggggaaatatatttaagataatttttagttagttcgtttttttgtttgagttatattaggtttgtaggttatatgataattttttatttagttttttgttttgttttttaggttatttagtaagtttattattttttagatttttttagtttgaattagatatttgtttattatattttaaattttaagagttttttgttaagcgttgagtggttttttgaagtttttgttattatgtgaaagtgaaaggaaatattttttattattttttagatttattatattttgtttaaaatattttttgtttgatttttattttgtttttagttgaatttttagtttttttttagatagttaggagttaagtagtagagtatgggtggtagtattaatttttttgtattttttttaaagttttgtattagtggtattagttttttattttggagtggagatagtttttaattatttgtagttttgtttttttttttaggttttaggtaaaattgagataataaaagaaggaagggaggaagtagggtgggaaggagggagggaaggagaaaaatttttattttggtattattataaagataggatttaatagttgttatattaatagtttttgatttattagttgatatgtattatttgatttatttacgtttagtattagtttattttttttttttgttttgttggtgattaaaatataatagaatgttataaaattgtggtttgttatgagagaagagttagaaaggtttttaaaatatgaaattgtatatagatattgagaaaatacgatttttattgtaggttacgtggaagattattttatatatgtatatgtaatataatatttattaaaaggggatatatataaatttttttatttttgttttttagg

SEQ ID NO: 740 - DNA, 19659 bp, Artificial Sequence
  chemically treated genomic DNA (Homo sapiens)
tttaggaggtagaaatagaaaaatttgtatgtgtttttttttgatgaatattatgttatatgtatatgtataaagtgattttttacgtggtttataatgaaagtcgtatttttttaatgtttatatgtaattttatattttgggggtttttttagttttttttttataataggttataattttatgatattttgttatattttagttattagtagaataaaaggagagagtaaattaatattgaacgtaagtgagttaaatgatatatgttaattagtgagttagaagttattgatatggtaattattaggttttatttttataatgatattaaaatgagaattttttttttttttttttttttttttattttgttttttttttttttttttttattgttttagttttatttaaggtttgaaaagaaaaatagaattataaataattggagattgtttttattttaaggtgaggggttggtgttattaatgtaggattttaaaggaggtataggagagttagtgttgttatttatgttttgttatttggtttttggttgtttaagggaaggttaggaatttagttggggataaggtggaaattaggtaaagaatattttagataaagtgtggtgagtttgggggatggtgggaagtgtttttttttatttttatatagtgataagggttttaagaaattatttagcgtttgatagggagtttttggaatttggggtgtaatggataggtgtttgatttaggttggagaaatttagagggtgatgggtttgttaagtggtttggagaataaagtagaggattgggtgggaagttgttatgtgatttgtagatttgatgtagtttaagtaagagagcgagttggttaggagttgttttaaatatattttttttagttttagttttatttttaataaagtgttatttatagagtagtggattgttaatagttgggtttttgtgtggaggtagataatttgaaaattaggggtttagaggagagttttaaggtgttagttgtatatgagagatttttaggaataataagggagagagattatagaagaatatagtaagagaaaatggtagttttatatattttggtaattagaggagataattttggtttattatgttgtttattgaattttttgtttattgagttgagttttttttgttgttattttttttattagtttttttttttttgtgttagttttggaggaggtagaagtagtttagagcgtaggaggaaggaggaaaagagaataggtaaaggagataagaggtaggtatttgtgttttttttttttattataggtaatagaattgaaataggtttgaatggggtagtagttttaatttttaatgaattaaaatatttttgattattaaatgtaattagttatttttatgatgaaatgatattggtatttgagagggaatagaaaaattatagtatttgtttttgagtttatttacgttatagggaagagttagttattaattatgagatttttttgtttaatatgtttattatatatgtaatagggcggatatattaaagttagttagtgtttttttaatttgatttattatttatgtaaataagtttaggaaattttttttttgtgatgttatatttttggaaaaaaatgtaggaagtatataaattgtttattttgttttaagtggttttaatttttagtggtttattttttttattttaagggttgggaaagttattttaggtgatatgatggtaattgttgttaggttttaattttaaagatttttttttttttttaatagttataattttatggaagatagtgtaaatatatgtttgggtggaaatttttatttgatggtttgtagtggaggtggtggtgattagatatagatttgaaagggttgtatttttttttttaaagattttttttagggtttattagattaatgttatttgtttaatgttagattgtttgtagaggaagtagtcgtagtatgtatttttttggatggatatttttttaaaatatttttgaggtgagaaaagtcggatttgataattgtgagaaaaagatattttttagtagtattttttaataagagatttatttaaatatttttaaaattatatagaaggtggaaaataatttatatatttgaattttgaatttgatgttattttggtaattaggataaggtagtagagttgataaagttaattgttagtggaattaaaaaaattatttgtaataaatttttgtaatgtttgagaatttttatattttgtatattttttgaaatgtattgattagtttataaggttggatattgtgatacgtttaaaaggttaagtaaggtagaaaatttttattaattattaatggtattttatggaattgaagattagaatatagagaagaataattagggttagaattgtttttatgtggtgatgagttgtatttacgatgttaagagttgtttttagtttgtttttaaagtagagttaggagaaatgtttggtagttatatggtagtagattttagtaagaaatttttattttaattgtgtttattttataattgaaatgaaagtagttttttgaagaggtgagtttgttttattattgtaaatattaaaatagatttaaataattatatattgtaaagatttttgaatttagtataatgtatttttattatttataagattatttgttggggattataatttagttttttttaaaaatagcgagagattataaggaatatttttttttaaggtttattgtattttaagatatatataaaatagttttaataagaattttttttttttataataaataggagttaagtttgtttaaatttttttttataaaatggaagagtttatttttattagtattttttttgtgattatttaataatatgtaaagtgaaattttgtatttaaatggggtattttcgatgaatattttgagaaatattttgtttttaattttttagattttgattttttattttattaaaaatgtaaagttttattttatatattatgggaatgtgagtgtgtatgtgaaggtagtgtaattgggtattgtatgttattttattaaatagtttgaatttatttaattatttgtgtttgtatatagtattttagaatttatgggtattatatattgttttagttagaatgtaaattgatgagagaaaagtgggaaattagatggaatgaataaggtttaaagaggttttgaaattatttttgttggaatatttagttttgggtataataggaagtaagggaggaagtttaagagggatattgagaaagtttagaattaaaatataaaaataatttgtagaggaagttgttgtattatgattttttaggtgagttatttaaaatgtatttttgataaaataattttataaatttatttgtttaaagagaagatatttagtttataagataaagttaatgtatgttaattattgttttaatttttaaatatagtaaataaatattaaagttaatttgtaatgtgattattattaattgattttttattttatggaatattgtttaataaatgtttttggtgtaaaattagttgagtttattttaatttatatagttaatttttgttttaaatgaattgtaaaattatacgttttgtttttaaatgtattattcggttataaagaaggtgatttggattttgatatggttttagtaaatattggtataattttagtgattttgatgaaattatttttatatgaagtgattttttatagtattaagtgtttataaattttattaatagaatttttgttttttgtaatagtatgttttattttttatttatattgtgaaatattttggtaagttttgtttaattttgaatttttgaaagttagtgtgatttatttttaggaaatttttgttgttttaggtattttatttttgttaatagagttgataatatttatttatatatgtaatagatattttttgaggtttattttgtgttaggtattgggtttaatattgaatttgaatttataatggaatttaaaatagatatatttttgtttttatgtaattttcgttgtaatggggatagttaataagatattgttttgttataaagtttattaaagtaggtatttggatgtttttattattattagttttttattaaaatttaatttggttttttagaatagttattcgtatattaagtatattaatggattttaaatattattgatataaataagtgttcgtataggatgttaggaattattttaagttgttgtttttttattgtgttttggagaattatgggttttaatagttttgttgggtattttatatttttataattttatttttttggtatttttatttttattttgtattgatagatttatttatgttagaaaagtttagtatatttgttagtatttttttaaataaatttattttttaagaatatggtttgtagtgtttatttaaattagttaggtatgatattgtttattttatagtagtgaattgatttaaatagtaaatattattgagttggtttaggaagttgatttggttataagagatttttgtattattaaaaatattgttaatgaaaaagtttgagtttgagttaatgaaaagaaatttaatttttttaatattaaatttagagatttatatgatatttatagataaattaatttagaagttaattggattttttaagatgatattagtgtaataaattgagcgtttttttagattttgaaaatttaaatataaacgaaaatagtaaaagatatatagttaatgggttaattatttagaaattgtaattgtaataggagatagtattatagatttatttaaattaatgtttttgggtttatttcgggtggtagtttgttttttgtgatatttattaaagttttagaggaagtattttttttttatgtattttattttatttttttttttttttgtgggttggttatttttttatttgtaattgtttttgtaggggtaaagatagagggggaggtttgttttttttatttttgggatgggtaaaggtgatattttttgtatttaatttggacgtttagaatatattgaagtatttagattttatagtaatataaatataaataataataatattatgataataattaaaatttgagtgttaataatttggtggtattgttttaaatatttgatatgtattatttgttttaatttttataaaaattttatgaggtttgtggttattatagtttatattttatgtttattatttatttttatgtattattttaagaattttattttatatttaaattatttttatgaaaaattgtattttaatttttaaataatatataattttttgagtatattttgtttatgagttagagaattattttattgaaatttagtgatattttttttatggtatcgaaagatttattattatttatgtttgtttaaaaatttttatttttgattattagttttggaaaaaagttatttttattttttattttttttttcggtttttttttttttttttttaaatgaaaaagtttgtagggtttggtataggaaaatagaaaggtgagtagattggttgaaagatttaggcgttttggttttagtagtgatagagatttgaagtaatatttattagacgtttgttaatagattttataaaggtagtatatattaatattgtttttaagtaaaattgtttttattttttatgaaggtttttttagggtaaagattatgtttaaatttttaggttttggatgtttggtataattttggatatttttataaaagttattttattaagtaagtattataaaatttgaagaaagtattatttaataagggttggtatagttatagttttatatggtatttttttgataaggtgatataaatagtaagtggtggtgattttgtttttttggttagttatgtatgatttattttaattaaaatttgagaaaatattaatttaaaatggattaaaggtttaaatgtaagatttgaagttgttaaattaatataagaaaatataggggaaaagttttatgatgttggtttaggtaatgagttttttggatatgacgttgaaattataggtaataaaagtaaaaaatagataaatgggattgtattatattaaaaggttattgtatagtaaaagaaaaattaataaagtgaagagataatttatagattgggagaaaatatttgtaaattatatatttgataataggttaatatataaaatatgtaaggaatttaaataatttaataataagaaaattaataatcgatttaaaatattagtaaagaatttaaatagatattttttagaagaaaatatataaatggttaataggtttataaaaaatgtttagtattaggaattattaaggagatgtaaattaaaattataatgagatattattttatatttgttagaatggttattgttagaaagattgaaagataagtattggtaaaaatgtggagaaaagggaatttttttttattgttggtggaaatatatattagtatagttattatggaaaatagtatggatgttttttaagaaattaaaaatagaattattatatgatttaataatattatttttgggtatatatttaaagaaatataaattaataggttgaagggatgtttgtttttttatgtttattgtagtattatttatagttatcgagatgttgaaataatttaagtgtttattaatagattaatggataaagaaaatgtgatgtatttatatagttgaatattatttagttttaaaaagagaaggaggggaattttgttatttgtgataatatggatgattttggagaatattatgttaagtaaaataagttaggtatagaaagaaaaatattgtattatattatatatggaatttgaaaaagttgaatttatagaagagtaaaatgatggttattagaggttgtagggagaagaggagggagggaatgaggagttgttgggaaaatagtgtaaaattttagttagataggaggaatgttttgagatttattttgcgttagggtgattatagttaattatgtattttatattttaaaataatttgagtaaattttaaatgttttagaaaaaatgataagtagtgagatggtagaggagtttattgatgattttattattttttattatatatagatattaaattattttattgtgttttagaaatgtatataattataatttgttaattaaaaaatagtatattttaaattagaaaatattgtatatgggtgatttttttttattgttttttaataaaatatacgttttaatgattattgaagttatattgtataaatcgaaattaaattatgtaatttaatggagaggatatattggatgtgtattattatttatgtttttattattatatatgtttttgttaaatagattttcgagttatttaaatgtatttgaagtttaatagattgtattattttgtataggaaaatttttattttaaagattagtaatttatttttttaaaattataaaaagtagatatttatatattaatttttagtatggttaaaagagttttatggtgtttgtttgttatagtgatgtgttagtaagaattttttttttatgaatggaatataattttttaatttttttattaaattttagtaagaaattgaaggtttattattggataattgtaagaattgtaatttaaatgggaaattttattattaagtatttaatgttattttgtgttaattattgtgatatatattgttttaagtgtttttatagtattttatttgttttagtaaggttaaagagagttttttaaataaataaattaataatgagttttgtagtattatgtagatggaaaatggaatgttaatgttttttataggatatatattagatattatattttaattgttattaggatgtaattttttagatatatttgttaagaaaatttaaaaggaatatttattttaatgttagtttagttaataatttaattatgtattttgttatttatattttttaaaatttagtatgtaattgttaaataaaagtatttttattttaaaattaattattatttaatatttgtagtagaattgataatattaaaataataaatttattttcgtgtagtaaaatttgaagattgaaatggttattttaagattgtgtttttgttattgtattttttaatagataaaaaaattatagttatttttatataaaaatatttttatttataaatgggagtcgaatagtgagaatatatggatatagggaggggaatattatatattggggtttgtcgggggttgagggttaggggaggaatagtattaggagaaatatttattgtagatggtgggttgatgggtgtagtaaattattatggaatatgtatatttatgtaataaatttgtaggttttgtatatgtattttagaatttaaagtttatatatatatataaaaaaataaaataaaatttatataggaatttagttgtattagtagatatgaatgtgaaagatatgtataattatataatattttttgtatattttaataaatttttttaaattagtttttaaaaaaaagttatgtaagttttatttttttaagatgaaaaatataatttgttaaatgtaaatatatttaaataatttatatgtgattttatttatagagaataaaaatgattggtaattaattattttgtttattttaaatgtaaagatataattatttgttaatattattttttttaggtagtgttaaattttaagttattattttattatgatatttaggttagtaaatttaaatgtttataggatttaggaattatataatttatatttgatttaagggaagaaagtattaaatgtttagtggtgaaaattgagggtttagtttaaaaggaggagtgataatttagttttagtttattattgttatgtgaaaatttggtttttattattatatatttttgtgtttttagagaagttagaaatttagatttttttgtggaatttttaggttttaaaatgttgataagtgaaatgagattttaaagatagatttaaagaaattttgttggtttaaattatgagggttaaagaaaatatttatatgaggatgtattttattatgatttaagatagaggttttggatatagattatttggatttgaatttttgttattttaggtgatagtgagatcgttggtaagttgtttattttttttgtttttttttagtttttttatttgtaaaatgaagattgtatttttaggaaatagaatattgtcgttagttattgttattattattattattattattattattattattattagttaaatttagtttatgattatttttatatatatgagtgtatatatttatgtatatatttatttatatatatatataaaaatatatatagatatattagttattttttgggagtatggtattatatgaaagaaaattttaaagttattaatttttaaggaatttgagtttgatggtagatatatatatataaaaatttaattttgtaatattatataataattttttgaatatttattaaatgttaagtaatgttttattattgggaattataggaaataataaaagtttttaattttataaggtttgtattttatatttattataataagtaaatgaataattagtgataaggtaaggtattaggtgttaagaagaaaaaataaatttaaataaggggatagaagataatggattggtaggtgttatttgtggtaggttggttagggaagttttttttataaatggatttggagtagatgtttgaagaaggtgaggaagggagttatgagaatatttggataattaatgttttaggaatagagaagaattaatgtaaagttttggggtgtaaaggatttagagtgtgagataatgtggaggttagtgtggttagattagaatgaatgagaaaaataggagagagagagaagaagtaatgggtagaatgaagaagttaggtgattaaaaatattggggaagggtattattaattttttttagaggtttttttatttttttttgttttaaatagattaagttggtggtgttttatagagtgtgtatatttttttttatattatatattggtgattgtatatgtggtattgtatttgatattagtaagatgaaatattgttattgatttttagggaggttaatattgtttttagtgatgagagttgtatgattttagtttttgcgtagggttgttttgatagggaaggaagagaaggaaaagtgtagtttatttattaatttaaagggaattttttttttgtagttttatattatgtttaataaaaaaaaatgttgtgaatgaaatgtttaaagtaaaaaggaaaatgtttataataaaaatttttttttgttaatagtttttattaattgtagtggtttattttttgttggtatgattattttaataattttgtagttgtgttacgattttttgatttttgataaatttgataaaaataagaaatggagaaaggattttttatttaataaatggtgttgggaaaattggttagttatatgtagaaagttgaaattggattttttttttatattttatataaaaattaatttaagatggattaaaggtttaaatgttagatttaaaattataaaaattttagaagaaaatttaggtaatattatttaggatataggtgtggataaggattttatgtttaaaatattaaaagtaaaggtaataaaagttaaaattgataaatgggatttaattaaattaaaaagtttttgtatagtaaaagaaattattattagagtgaatagtaatttatagaatgggagaaattttttgtaatgtatttatttgataaagggttaatatttagtatttataaagaatttaaataaatttataagaaaaaaataaataattttattaaaaagtgggtaaaggatatgaatagatattttttaaaagaagatatttatgtagttaaaaaatatatgaaaaaaatgtttattattattggttattagaggaatgtaaattaaaattataatgagatattattttatattagttagaatggtaattattaaaaagttaggaaataataggtgttggagaggatgtggagatataggaatatttttatattgttggtgggattgtaaattagtttaattattgcggaagatagtgtgattattttttaaggatttagaattggaaatattatttgatttagttattttattattgggtatatatttaaaggattttaaattatgttgttataaagatatatgtatatgtatgtttattgtggtattatttataatagtaaagatttggaattaatttaaatgtttattaatgatagattagatttaaaaaatgtggtatatatatattatggaatattatgtagttataaaaaaggatgagtttatgttttttgtagggatatgggtgaagttggaaattattattttgagtaaattattataaggatagaaaattatatattatatgtttttatttatagttgggagttgaataatgagaatatttggttatagggtggggaatattatagtttggggtttgttatggggtggggagtagggggagggatagtattaggagaaatatttaatgtaaatgacgagttaatgggtgttagtaaattaatatggtatatgtatatatatgtattaaatttgtatattgtgtatatgtattttagaatttaaagtataataataataaaaaagaaaatttgaatcgaaaaaaaagaaaagaaaaaaatgtaaaaaaaatatttttagtgttttgttaatagtgtgtaatttaaaattgagaatttttttgttgtagtttaattttaaaaaattaatttttataaatgttttttggttattaaggtaatttttttatttgtaagttaaaaaaaaattttatagttgtattattagtttttgttatttggtttttttggaagggaagagggaaagatatattgtatattagtattttatttattttagttttaggggaagaagttatttgtaggtaattgggaaatattgttttgttgttttttatagggtagtaaaagtggatatttttttatggtattaattagatttagtagatttggtaagtttttttttttaagatgtatttagtggtttgggaataagatttttaatgttgtttgataggagagggttggtttaattggaatttgtttagtaaagggttatttgtaatagtatttattttagatttaaggtttttaaagaatagttttataggtatagatattgtagaaaagggttaatatgtttagatattttgagttagataagattttttttttgtagtgttttttagaatttttaggacgataaaggtatgaattgtgaaatttattaagaaggaataaattatggtttattttttaaatatatttggttatagaaatttttttttaaggtaagttttgagtgtaatatattttgaaataggtgtttaaataaatgttgtgggtggttagttttttagaattataataggtagagaaaattgtaatttaaattaattttttataatataaggttatttagaatttaagagtttttagaatttttttaatttgtatattttgtaattttttgttaggaagaatatagttagtttttaagtaaattgttgatttggtttttgggttatgtttaggtattagagaatagagaattgatagattaggattattttttttaaatattgaaagttaatgtttataagtgtattatgtatgttttaagatattatttggtatatggtatatgggttataagaatgaagtttagattttttaggggattgattggaggtttttagtatttattttattagaatttgaggattgttgagaatgttgaaatatagattgtagaatgttttgttattttttaaaggatatttttattttttgaggtgaagttaatgtgtatttattgagttagtagtttaagatggtgatttatgtttttgtttatggtttttatatataattttaatttttagttattattggattttttgtgtttgaagattttgatttgaatttgttttagtaggattttttaggattagatttgttttagtaaatttttggttaaaagaataagatttaaagggattttttggaatatggtttatttagaggttttataagggatataatttatgttgtttttttatattttatgttgtttgggaaagattttgtagttttatttaaggacgtatagtttatttaagaattgatgggtaagacgagttaaaataatttgaatgatgaaataagattaaggaaaagtaaatgtaagaagaagaataaaaagttaagagtaaggttatttatgttatagttaataattgataatttttgggaatatatattttattttattggtaaaatatattattattatgaataataatgtacgaattaggtgaggttgttaattgatagtattaaatgaaaattttaattttataaagtaggataaatgtagatgttttttgtgaatattaaagaattagttagaaaagtaaattgaagttaatgatgaaaagttttttagttgtagaatttataaagttgtatattttttataattttagtttttattatgtgaaaaaatttttaaatattgtttaaagatgaatatattatttgaagaataattttaatgaaaaatataattgaattattttatttgtggttatgttttatagttatagaaaaattttatgtgagggatatttttaaaaatataatgtatttttaaatattgtatgtataagatttttttaaggggattaaagaaatttttaagttgatattatgtattattggtatggtatattatatttaatggtaataaatatttgaagtttgaataaatgtttaatggtggattatagtttttatttgtattattttgtaataattagtaaatgtttaattttaaattattttttttaggttttgtttattaataaaggaggaagagataattgataaattatattattttatttattttttttaataagatttttgtgttgattttttttgttaattttaatttaatattatatggtatcgtggagttttgattaatgtttttttggtttttatttttttttttaatatatttattagtttttttgttttttattttttattttattttttaagtgataatataaaattaaattagtaagaatttttgtaaatggttataataaaagaaattttatttttttttaaagtatgtttaaatgttatagtaagtagtagtattaggattttttttatttttttattagagagttttgtagtatttttttttttttgtaggtgattatgtaaaagtggtagttaaaagtaattggttttttttttataaagatttttgattatgaattaattaattattaattttagaagtaatatagaattattattaaatatagaagtaaggggttgttatttttggtttaaaagagataaaataatattaattaaggtaaatagatattttggggatattgtagtggaaaatttaggagattttaattattaattttgttaaattgtaaaagagttaaggtatatagattattttttattgttgttttttattaaagtttatttaatatgttagtaacgtatattttttttttttgtatagggttgtgtgttttttttggatattttattttttttatatgtaagtggaaaatcggaaattttgtttttatttttttttttttttttgtttaaatttattataaataagtattattttaaaatattgtagattagatgttttaagtaaaaggggaaaaagagtgagaagttaatttaatataatattttaaatttataattttgatgttatgaagtaattttattttagatgatggtatagtattttgtatttttatgttgtattgtattttgtgaagtattgatatatatatgaaaaataatttttgaagtgaggtaaataattggagaggttaaatggtttattattgttaattataaaaagttagtggtaaattttggattttttatagtgattttaaagttttttttattaatagtttataattagtatattttatgggtatgtaatttgagagtttagagaggttttgtaggatatgaaatttaatatttttattttatagaagagtgaattgagtattgggtaaattttgtgatttgtttagagagttataggtagattatttattggaattagatgagttttatttttggtttttgtagtagttttatttttaggaaatggttaggtataggttgttatatatgttttaaaattaaatttttatttagtttttatagttgtgtaattttgggaaatttattttatttttttaagttttattttttttatatgtaatgtggtgataatttagtatatttgatataatattgttatgaggttaattaaggtaatttgggtgtagggtttatggtaatatttattatatagtaatatggattaatgttatttattatttttattttagttattgttacgtttttttattggttttttaaatttataatatttgtgaaggttaatgaaattaatgaggttattggaatttagtggaagagtttaaagatagttttgtgtttagggtttcgtagataagtgatttaaaattttattattaatttagtagttaaggattatttatatgggtagagtttattaaaattttagtaaattaatttaggtagttatatgtttagttagattttttatttatattgaaaatttttgggtgttaggtttagaaaatagagtttagttagttggaaaaagatatttatgttagattaaagtataagtatttttgtaaggttagtggaaatttatatggttaaggagatagtttttttgtttaagagttaattttattttgtttaaggattaattttttgattattataaatttaaatttttagttttttttggttgaatttttagtttattgtgtaagttaatttaaaaatgtattttagttttatggtaaattatttggaaatgatattttaaatgagtgtgaaaaagtttaaaaattatttagaatttcggaatttaaaagaggtaggtaatatattagtatattgatatagtttttatttttttttaagataatatattgtatttatatttttgtattttttttatttaattgtatttcgttattttttgattagtttatttaaaaagatatatttagattattttttacgaattttgatatagagtttaagattagtttatttttttattttttaaaaaattaaattttatttttgtttttgtaataatatttattacgtttgtttaatgataaattatatgtagtaagaattgtaatattttatttagatgtttttttgagaaatttttatacgagttgttaaatgtatttttttggttgaattttttaattgaaattcggtaaaataggttagtagttaaatatatgagttttttttttagttttatttatgtaattttttttaattttttaaatgttgattgtttattgtgattttaaaattgggaagaaataattataattggtttaaatgagaggttttatgtgataatgattattttagtaagttagatggggaaaaaatgggtgaaaaagattaaattaaatttttttatattgtttataatagtagtagttatagtaattagaaatgtattattgaatatatatatttaataagaattatttattgaatatataagtagtagaattttgtaggagttgttttttttgtaaaaaattgatttgaagtagttttttttttttttttttttttttttattttgttattggttttagaggaaatgtagatttttttttaattagggttagttttaggtaaaattgtgaggtagataaagtttgtttttagtttttttttttattttatgtttttttttttagtaaattttagttattaaaagataatattgataattgttttttattagaatagtatttttttttaatgttgcgatagttttttaaaaatttttgtagtatttttgtagaaatgattttttttagaatgattttgtttggtgtttttttcgtttagattttttttatattattaaaatgtattattagtatttttttttgataaatgatttgataaaattgatattagtggatcgaagtaatatttttaaagttgatgtatagagaagaatagaatataatttaggttttagaaaatttttatagtttagttatttagttatgattgatttttatgagaaattttaatatttttgtaataaatttttttttatttaagtttattttagttgaatttgtaatgaaaagtattttaattaatttatttttaaattatttttttttttgttattgttattatttattaaaaatgtaaataagattgtgtttttgtttttttatttaaaatgatttaggttaatgtttgtgtttaaagtttataaattaattttatttatttttaaaaaggattttttgttgtgtatgtatattaaaattaggtacggttgaattatttgtggtttattgaatatattgtgttattgagttttttattgtttttgtttatatttttttttttttttttattttattttacgtgtttgttgtttttcgtttgttagttttttatttatttatttaatatatatttaatttatattattttgtattaagtaatatgtaagttattggtattattatattaaaagatttatatggtttttttttttatggatttttttagtttagttgggaagatagatgttgaagataaaatgataagtgtgttgagttgtgagggtgtagagaatgggaggggtaagagtagatatagtgagagtagtttgaagattgttttagaagtttaagtaagggatgatagaagtgtggtttgtggtgttggtagaggcgtgagatggtttaagatatagaattattagagagtggtaattgattagattttggttgaggggggaagagtgagaaattatgtttaagtttttagtttgtgtaagtggatggatattaatgttaatatttaaaatagaagatattgaagaagatatatagtttgatggaagatgtttttaggtggaattttgagtaggtagttgggtttatgattttggagtttggaagatatttaaatttttaggttgtgttgagtttattttttttgtgttttgtttttttatagtgtttttattatagttaaattatttttattttggtatttttaatagttagtatagttagtatagatagaaattgaatgtagtaaatattagttataattagtttaatgaaggaatttaaatgtttagagaaatttattaattttggatttaaaaatgaaagatatgttagaattttgtaattcgtttatatgtttattgaaatttaggtataatttgagtaattatggtttttatgaattagttaatttatttttaattttatttggatttttatgaaaatttgtaaatgatttatttatattttaaaataataggggcggttatagaaatatattttatagagtgtaggagtttagaaaatgttgataaatataaatgaatttattaattaaatggttttatttattttaaaataaaaatttgaggaataattagagataaattgttttttgttatgatgttttttattaaggttgtagtagtttatgaggttttgtataataaattgttaaataattataatttttttaaaaatatttttataaagaaatatatattattgaagagaaatagatatttaagagaaatgatggtttagattagatgtaaatgattttattttttgtttgaaaaaaagtagaaagggagaaagaaggaaagaaagaaagaaaagaaagagaaaaaaagaaaaagaaagaatgagaaagaaagaaagaaattgaaaatagaatttaaaaaatagtgtaggaataaggtttatatgagatttagttgataattatagagaggtagttatatttttttttatttttattggttaatggaatgtagaatgttataataattattgttaaatatatagttataattagttaattgtgagttaaatgtttttaagtaaaatatttaggtttttagtatttttaagtaaaaatatttaggtttagttaattaaaaaatggttttataataattttttaatgaattattttttaatattgaagttaggtaatttgtagaaataggtttgaata

SEQ ID NO: 741 - DNA, 5219 bp, Artificial Sequence
  chemically treated genomic DNA (Homo sapiens)
tatttttttaatattgtttttttaatcgttttttttttcgttttttttttagttttagggatagaaatcgattaggtttggttggagataggagataagatttttattatttggaattatattcggggatgggggaaggggtagtagagttgttggagatggaaaattggtaggggacgggggagaggatgttagttttgatttagtttttttttagaatatttttttttttttttgttttttaaaataagattaatttcgaaattttggatgttttttagatatatttattatttttcgttgatatttggaagattgtttgtgagtttagatttcgttttttttttttttttttttttttgagatagggttttatttttttgtttaggttggagtgtagtggtgtagtttattgtatttttaattttttgggttttaatgatttttttgtattagtttacggagtatttgggattataggtatacgtttttatgtttggtttaatgtttttggtattttttgtagagatagggttttattatgttgtttaggttattttcgttttttattatcgaaatagattatatttagaattttaaatttttagattattttttttattttttgttagattaagttgagatttttttttttggattgagcgtattttagttttggttaagttttttgattttaggttaagatgtaggtttggattttaagatttgtgattgtggttttggattttagttagtttatttagattttattttttaggttttattttgaggaagttattttgtgtgttcgggaaggggtttagggcggttagtgtgttgatggagggtaaggcggtttcggttgtggttatggttggttggtgtttattttgggttttaagttttttttttttcggttgtttcgtgaattttgaggttgtgatagttttttcgagggtttttttttgtttttagttgattggttgtagtttttgataaggtaaagtaaggtaaggcggcgggggggtattgtttttggggtataaattttacgttggtttgtttggggttggggttaaagattaattttgtgtttaaagttaagttaaatattaagggttggggggtttagggtttgagggtttaggtgttgggtaaaaatagatattgggtttttaaagaaggagagatttgggggtttttttttagttaatttttttggaaaaggtagaaagggtattttgggaagaagttgtgggattttttgtttttttgattgaggttttatagttttttttttttttagtaaatagtaataatcgtgttgatggcgggatttggtacgagtttttcgttaagtattattagatattttagacgttggaggttgttattaggtgggggtttaggttagttagagttttgtttttcggtgaaggggagggttgggagttgggtttttaaattagtttggcgtttaatttgtttgggttgggattttttagggttttagttttgtagtaggaggaagtttttgataattggtttattattgtttattggggatttttgggtggtattgtatgggattgtatggaggttggtttagtgttagttgttttagtgcgatgggggtagttaagggaaaagtgattttttttttttttgggtgggataggatcgttggattaagttataggtagtatttgatttgtaggagattagtgttttggttttgggtttggttgttttttgattttgtttaatatgaggagaggatttgagtttttataataggaatttttattttggtgttttgggagtttgggaaggggatatggatacgtattatagatatataatttatagttatttattggaagattgaggtaggaggattatttgatattaggattttaagattagtttgggtaatataaaatttatttttttaataaaaagttgtgagtggtggtgtatgtttatagttttagttatttaggaggttgaggtgggaggattgtttgagtttaggaggtcgggattgtattgaattataattatattattgtagtttagtttggggtatagaaagtaagattttgtcgttggaaaaaaaaaaaagttgggtggttatttttatttttggtagattaatttgggtgatataaataaaaataaggttaggtgcggtggtttatatttgtaattttagtattttgggaagttaaggtggggagattatttgaggttaggagttcgagattagattggttaataggatgaagttttttttttgttaaaaatataaaaattagttgggtattgtggtatatgtttgtaattttagttatttgggaggttgagttggagaattggttgaaatttggaggtatggggttaggcgtagtagtttacgttagtaattttagtattttgggaggtcgaggtaggtagattatttgaggttaggagttcgagataaatttggttaatatagtgaaattttgtttattaaaaatataaaaataggtcggggatggtggtatatatttttaattttaggtattcgggaggttgaggtataagaattatttgagtttgggaggtagaggttgtagtgagttaagattatgttattgtattttagtttgggttatagagtgagattttgtttttaaaaaataaaaataaaataggtttggagtagtgagtagtggtttatgtttgtagttttagtattttgggaggttaaggtaggaggaatgttcgagtttaggagtttaagattagtttgggtaatatagcgagattttatttttaaaaataaaaataaaaatatagttatttataggattatgtaattatataatgatatgagtttttgtttttttagttatattgattatataattcgtgtatatataattgtgtgtttgtttatgtatatggattatgtatagatatataatttttaggtattaaaatataattttatgttatattggttatataatgttatagttaaataatttttaaaatatagaatttataatttataggtaggtatatagttatataattttattgatataatttagtcgtaattgagtagatatatatggggagttagatatattgttatagaattttttttttttagatagtgtttttttttgttatttaggttggagtgtagtggtatgattttggtttattgtaatttttattttttaggtttaagtgatttttttgttttagttttttaagtagttgggattataggtgtttgttattacgttacgttaattttttttttttttttttttttgagatagagttttatttttgttgtttaggttggagtgtaatggtatgattttagtttattgtaatttttgttttttgggtttaagtgatttttttgttttagtttttcgagttgttgggattataggtatttataagtaggtttggttaatttttgtatttttagtagagatggggtttttttatgttggttaggttggttttgattttaggtgatttattttttttggttttttaaagtgttgggatgataggtatgagtcgttttagttagttaaaatttatattttatatagttatattatcggttatttttataatatgtaaagtaattatttagttatagttgtatagttattagtgtttaatcgtaggggatgtatttagttaaatatagataaacgtaaggatatggtattataggttttgagaattaagatatatatattttttaatagatatataattagaatgggtgtattataaatgtattatataaaaagataaaataggcggggcgcggtggtttacgtttgtaattttagtattttgggaggtcgaggtgggtggattatttgaggttaggagtttgaggttagtttggttaatatggtgaaattcgtttttattaaatataagaaaaaaggttaggtatggtggtttatatttgtaattttagttatttaggaggttgaggtaggagaattgtttgaatttagtaggtagaggttgtagtgagttaagattgcgttattgtattttagtttgggtaatagagtgagaattcgttttaaaaaaaaaaaaaaaaaaaaaaaattagttaggtatgatggtatgttttagtggttttagttatttggaggttgaggtgggaggatcgtttaggaggtggaagttgtagtgagttatgatcgcgttattgtattttagtttgagcgatagaacgagattttgtttaaaaagaaaaaataaaaataaaataaaataattatatagatttatagaattatataagtttatatatatatatatatatatagatatagatatatatatatatatatatatatatatatagagttataagtatttatatgtgttttttgggatagattggtagaaaggtttgttaagatcgtttatttggagttcgttttttttataattagtatttaattagagaattcgagtttggttttttgggtttaggaggacgtttagtgttcgcgttagaatttttttgtttaatttttgatttttttcgtatatattttttgtaattgattaattaggagtgggtcgagtttttttttacggttaataagaggagaaatttagttggttaatcggtttttcgtattcgtttttcgtttttatttcgttcgttttttaaaggggttagtttatttttgtttgggtttttcgatttttataggtaaggttattttagtttttttaaaaggtagagttgcggagggggtcggattttaggaggaattaatgaaaagttttattcggttttcgttttttttattttttgttgaggttaaaggtttgcgttagttgtattgtagtttcggtagtgaatcgggaggtattattaggtaaggaaggtgcggtagttttagtcgtgggtgagaggagtttcgttttgatattttcgtttttgtaggtcgtcgtcgttgtttcgttcgttttgagagagtatggttttgagaggcgttttcgtgcggttgttgagtcgcggattcggtttgtacgtttttcgtacgtgggtttcgtcggcggcgtagatcggttagtgtggggtcgggagtgtggagggaaggagggaggaattgggggtttagggatttttcggggtgattttttcgttttgtgtttgtaga

SEQ ID NO: 742 - DNA, 5219 bp, Artificial Sequence
  chemically treated genomic DNA (Homo sapiens)
tttgtaagtatagaacgggaaagttatttcggaaagtttttaaatttttagtttttttttttttttttttatattttcgattttatattgatcggtttgcgtcgtcgacgagatttacgtgcgaaggacgtgtaggtcgggttcgcggtttagtagtcgtacggagacgttttttagggttatgtttttttagagcgagcggagtaacgacggcgatttataggagcgggggtgttagagcggagttttttttatttacggttggggttatcgtattttttttatttggtagtatttttcggtttattgtcgaggttatagtgtaattgacgtaggtttttgattttagtaagaagtgggaggagcggaggtcgagtgaggttttttattggttttttttagaattcggtttttttcgtagttttgttttttaaaagggttaaggtagttttgtttgtggaaatcggggggtttagatagagataggttagtttttttaagaagcggacggggtaggggcggaagacgagtgcgggaaatcgattggttagttgggtttttttttttattggtcgtaggaaagggttcggtttatttttggttggttagttgtagggggtgtgtgcggagggagttaagaattaaataaagaaattttggcgcgagtattaggcgtttttttgaatttaggaggttagattcgagttttttaattgggtgttggttgtggggaagacgagttttaagtgggcgattttagtaaatttttttgttagtttgttttaggaagtatatgtagatatttgtgattttgtgtgtgtgtgtgtgtgtgtgtgtgtgtgtttgtgtttgtgtatgtgtgtgtgtgtgtgaatttgtgtgattttgtgagtttatgtggttgttttgttttgtttttgttttttttttttagatagggtttcgttttgtcgtttaggttggagtgtagtggcgcgattatagtttattgtagtttttattttttgggcgatttttttattttagtttttaagtagttgggattattgaagtatgttattatgtttggttaattttttttttttttttttttttttgagacggatttttattttgttgtttaggttggagtgtagtagcgtaattttggtttattgtaatttttgtttattggatttaagtaatttttttgttttagttttttgagtagttgggattataggtgtgagttattatgtttggtttttttttttatatttaatagagacgggttttattatgttggttaggttggttttaaatttttgattttaagtgatttatttatttcggttttttaaagtgttgggattataggcgtgagttatcgcgtttcgtttgttttgtttttttgtgtagtgtatttgtggtgtatttattttgattgtgtatttgttgagaaatgtgtgtgttttgatttttaggatttgtgatgttatgtttttgcgtttgtttgtgtttaattgggtgtattttttacggttgggtattggtagttatgtaattgtgattaaataattattttatatattgtaaaagtgatcggtggtgtgattgtataaagtgtaggttttgattggttggggcggtttatgtttgttattttagtattttgggaggttaaggagggtgggttatttgaggttaggattagtttggttaatatggggaaattttatttttattaaaaatataaaaattagttaggtttgtttgtgggtgtttgtaattttagtaattcgggaggttgaggtaggagaattatttgaatttaggaggtagaggttgtagtgagttgagattatgttattgtattttagtttgggtaataagagtgaaattttgttttaaaaaaaaaaaaaaaaaaaaaattagcgtggcgtggtagtaggtatttgtaattttagttatttgggaggttgaggtagaggaattatttgagtttaggaggtggaggttgtagtgagttaaaattatgttattgtattttagtttgggtgatagagagagatattatttaaaaaaaaaaagttttgtgataatgtatttgattttttatgtgtgtttgtttaattacggttaaattgtgttagtaggattgtataattgtgtgtttgtttgtggattatgaattttgtgttttagagattgtttggttatgatattgtgtaattaatatagtatagggttgtgttttagtgtttgggaattgtatgtttgtgtatagtttatatatatagatagatatataattatatgtgtacggattatatgattagtgtgattgagggaataggaatttatgttattatgtaattgtatggttttgtgagtaattgtgtttttgtttttgtttttagagatgggatttcgttatgttgtttaagttggttttgaatttttgggttcgagtattttttttattttggttttttaaagtgttgggattgtaggtatgagttattatttattgttttaagtttgttttgtttttgttttttagagatagaattttattttgtagtttaggttggagtgtagtggtatgattttggtttattgtaatttttgttttttaggtttaagtgatttttgtgttttagtttttcgggtatttgggattagaggtgtatgttattattttcggtttatttttatatttttagtagatagggttttattgtgttggttaggtttgtttcgaatttttggttttaggtgatttgtttgtttcggttttttaaagtgttgggattattagcgtgagttattgcgtttggttttatgtttttaagttttaattagttttttagtttagttttttaaatagttgggattataagtatgtgttataatgtttagttaatttttgtatttttagtagagagagggttttattttgttggttagtttggtttcgaatttttgattttaagtgatttttttattttggttttttaaagtgttggggttataggtgtgaattatcgtatttggttttgtttttgtttgtgttatttaggttgatttgttaggaataaagatggttatttaatttttttttttttttagcgatagagttttgttttttgtgttttaggttggattgtagtggtgtgattatagtttagtgtagtttcgattttttgggtttaggtaatttttttattttagttttttgagtagttgggattatgggtatgtattattatttatagttttttgttggagagataggttttatgttgtttaggttggttttgaaattttggtgttaagtgatttttttgttttagttttttaatgagtgattatgagttatgtgtttgtaatacgtatttatgttttttttttaggtttttagggtattagagtggaggtttttgttgtagaaatttagattttttttttatgttgggtagaattaaggagtagttaggtttagagttagggtattggttttttgtaggttaggtattgtttgtggtttgatttaacggttttattttatttaggaggagagagggttattttttttttggttgtttttatcgtattaaagtagttggtattgaattagtttttatgtagttttatgtagtgttatttaagggtttttagtagataatggtgggttagttgttaggggtttttttttgttgtagggttgagattttgggaggttttaatttaggtaaattgaacgttaggttaatttgaagatttaatttttagtttttttttttatcggaggatagagttttagttggtttgggtttttatttgatagtagtttttaacgtttggggtgtttgataatgtttggcggggagttcgtgttaagtttcgttattagtacggttgttgttgtttattggggagggggagggttgtggagttttaattagggggatagggggttttatagtttttttttagaatattttttttgttttttttaggaaagttaattgagggaagatttttaagtttttttttttttggagatttaatgtttgtttttatttagtatttggatttttaaattttgaattttttaatttttgatatttgatttggttttggatatagggttagtttttaattttagttttagataggttaacgtgaagtttgtgttttagaaatagtgttttttcgtcgttttgttttgttttgttttattagaggttgtagttaattagttaaggatagagaggagttttcgaaggggttattatagttttagagtttacgaggtagtcgaggaagaggaggtttgaggtttagggtgggtattagttagttatggttatagtcgagatcgttttgttttttattagtatattgatcgttttgggttttttttcggatatataggatgatttttttaaggtggggtttagaaggtggggtttaggtgggttggttggaatttagggttatagttatagattttggggtttagatttgtattttgatttgaaattaagagatttaattaggattgaggtacgtttagtttaggagaggagattttagtttagtttggtagggggtgaggagggtggtttaggggtttgaggttttaagtgtgatttatttcggtaatagaaaacgaaggtagtttgggtaatatggtgaaattttatttttataaaaaatattaaaaatattaggttaggtatgggggcgtgtgtttgtagttttaggtatttcgtaggttgatgtaggaggattattagagtttaggagattaaggatatagtgagttgtattattgtattttagtttgggtaaaagagtaagattttattttaagaaaaaaaaaaaaaaaaaggaacgagatttaggtttatagataattttttagatattagcgggaaatgatgagtgtgtttgggggatatttaaaatttcggaattaattttgttttgggagatagggaaggagagggatgttttgggggaaaattaagttaaggttggtattttttttttcgttttttgttagttttttatttttagtagttttgttatttttttttttattttcgagtgtggttttagatagtggaagttttattttttgtttttagttagatttgatcggtttttgtttttggagttggggggggagcggggagaggggcggttagaggggtagtgttggggaagtg

SEQ ID NO: 743 - DNA, 6503 bp, Artificial Sequence
  chemically treated genomic DNA (Homo sapiens)
tagttttgttggttttgtaagaggtatggtgttggtatttgtttagtttttgaggaggttttaggaaatttatagttatggcggaaggtaaaggggaagtaggtatattatatagtggaagtaggagtgagagagagagaggtattgggaggtgttatatttttaaataattagatttcgtgtgaatttagagtaagagttgatttattattaaggggatggtttaagttatttatgagggatttatttttatgatttagatattttttattaggttttatttttaatattggggattataatttagatgagatttggtggggatatatatttaaattatattagttattagtagttatattggatgaatgttaggaatttagaattaggatatatggttatttaggtaagtggtttgttttgttaatggtattttgatagtcgtggggttgtttcgtataaaaagcgagaggaagtttatagagttgttaaagaggggtaggtggaaaggtttgtagaggagttttttgttttataattaggcgtgtattttttatattttcggggttgtaggttttatatgagagtagaaagaaggatgtagaggaaggttaagaatataaggtgtgtttttggaaaggttgggtatattaaatataatttaataaataatagtaatgagtatatagggaaagtatttatagggaaattattatgaattagaggttgattttatattttgttatatggggttttaggttttagtttattaattagtggtttttattgttatagcgattggtttttggataggtatttgatgtaagttttagttaattaataggttatttagttggttattagtaggttatttaattagagtaaagtttaggatttttttcgatttttaagaaaagagaagtaaagtaattggtatagattggagaggattaaggaatttcgagttggatatatataaattttgggttaatatggatgattaaatatatatgtttatgtgaattattttttaaatatgttttattataatgatataagataaagggtagggggagattaattgtaaggtggcgtaaatgagagatgttattaagggtggcgggggagagaggggagtagttgttaagttaggaggtaataggttgagggatagggattagtagacggggagggaggggttgaagtagaagtgtttagtgtttggagggatggggttagaaaggtaaggggtattttgaagaagttatatttggggagggtagttttttttttatttgttttttaatttattagttaggaatgttttatttattttattttagggaggaggatagaggattttcgtttgggagtattgaatggtttagagattttgtaattttgcggtttttaattaaattgtttattgttttaagtagtttttgttgggtaaatgttttttattgtaatcggattcggattttatcgtttgaaagttaaatataagaggagaggtttggtgggaggaaaagtggttttaattagagttagtaaattaagaagatggtgaattgttgttttaaagtatttaattattttaaattttaaaatttattataggattttgaaaggaaaatttggtatgggatatacgtgggagtagtgtagggtatagggtttatgtgttttgatttaatggttgttttgagtattatttattttgaggtttggttggtgttatttttttttcggttagatggtggtgggtgaattgtttcgattttttttaagttggaggatttcgtaggggtttcgtgtttggtttttgttttaagattagtttttggaatttttaaataagtatagagttagataagcgggtatggtgtaaaggagtgtttagtgggaaagggagagaagtagagttttaaagtatattttaaggttatattttaagattaaagaaaaagttttaaaatgtatttttaaagttgatttaatgtttggttatattaggttgtggttagtgtgtagtgtggttgtttttggattaggtgatgttttattagttgtgtttagggagggtagggttatgtggtagaatttgggatttttgtgtgagggattattttggtttttgtttttagtaggaagttatggtaaggaatttttagggagatattaaattggggagatcgtttttgttaattttttaatttttttagttttagcgattttagttggaaagtggtggtaataatattattattgattaggtgtggtggttagatattttatattttggttttagtcgttttttttttattttattgtaattttagtattttgggaggaagaggtaggcggaatttgaggtttggagttgagattagtttggttaatatggtgaaattttatatttattaaaaagaaagtataaaaaattagttaggtgtagtggtatacgtgtgtggttttagttattcgtgggtttgaggtatgaaaattgtttgagtttgggaggtagaggttttattgagtggagatcgagttattgtattttagtttgggtgatagaacgagattttgttttaaaaaaataaaaataaaataataataataatattattgtttgttatattaagattgtttgattagatgatagaatgaatgtaaaagtattttgtgaattataaatgtttttattaatattagttataatgataattgtttttttttttaataaatgtattgtttttttttaggaataaatataataagaaatgtgtaagatatatatgagaaaaataataaaatttatttgaaggatataaaagaagattaaaataaatgaaataatatatatttttagatgagaaaatttaatattataaagaggttagttttttaaaatgaatttttaaatttataaagttaatgtatttttaatgaaattgttaatagtattatttttcgaagtgggatgagtagtgttaagatttataagaaagttaatattttagagtagtggggaagggattgttttattattaaatagttatattagagatttttttgtattatatttaaattattattttttaggattcgggagagtagaaaagaggaatgagaagaaaggcgaggatgtgaggtgtgtttttataatggcggtgtacgtagtataagtaattgtagaaagattaaagtattgaataaatagaaaatttggaaaaatattagaaggaaatgtgggagaatatttttgtaatttggggattggaaacggtttttttaataagatataaaaattttaaaataagaaaataaaggttgaaatttataaaaattagatatttttgtatgatgaaagatacgattaattaagttgttaagtttagtaatagattaggggagatattatagtatatttaatagataaaggattaatagatattatagatgaaatataaaatagtttttttaagtttataggtagaagataatttaatagtaatatagttaagtaatgtaaataaattatttttagaagaagaaatgtaattattaagaaatatatgaaaaggtgtttagtattttgtaatttaagtaataatgaggtgatagatcggtaaaaaatttataaagatttattatttgaaggattggttaagataaagttaaatttttcgtgttggtagaagaaattggtgaagttatgtgaagaggttacgtggttttgtttattaagatgtaaaatgtgtatagtatttgaattagtaatttagtttttaggagttatttagaagaaatattgatatatatttagatttcggtgaaatttaaggatttttgttatagtttgtttcgtaatagtgaaaatttgaaattgttttaatgatcgttaataggaagttgattttaaagtgttatagtatatttgtttggagagatcgtattggttatttttttttattttttttgttggatttttgagcgtaggtggtttggagttgggttttgagttttttttggtttatatcgatattatttaatatggtagttattagttacgttggatatttgaaaagtggtcgattttgattgagaagggttacgagtgggaaaaatatattagattttagtgatttaggtagaagtatgttttgttttagattattgattgagttcgtagttgagttggttttagtattttggttttttgttttatttatttattgggattttttattgtatagggtaatttttttaggggtatttgggttgcgaaggggagagtgggtggtattttaggttgaagttttttgagtagggttagaggaggagttagtttttgtgggtttttgttttgatagtgttaattttagttaggtttgtgtgggttaggtgtattgttttggtttagattttaaggagatagttagggtaggtcgcgttaaagtttttcgatgggtttttttattgtttggtagatttgtttagttttggattttggttttgcgatttggaagttaggttgttaagaggtttaggtagtggtttttattgtggagggtttttggagagtttatagttttagataggggggttagggatgtgagatggttttaggggtttgtttttgagttacgttaagttgtttgtttttttttttttgtttttagatttacgggattttttgtttattagaataggagtgtgggagattttgagatattgttttaggatttgaataggtggtaaaggtttaataggttagcggttattgtagtgataaggcgattgagtggttattatggtgatggggatggaggttttttgttattagttttagttttatgtatggtagttttaatgataggatggttagttttgttgaggttatttttggttattatgataattataggtttttttaggagtatagtaagttttggtaggagaattttttattttatatttggttggagtaggaaatgtcgagcggcgtttgagttttagggaagtaggttaggatgtgagagatatagttatttgtagtttaattatttaaaagttgtttttaggttatagaagggagaggatattttttattgaatttgtttgaaggatattaagttttatagtttaatataattaggagagaaagcgttgaggacgttatttaagcgtttagtaatggttttgtttggagaatatttaggtttagtgaggaagggtttagaagggaatgtttgtcgattcgttggagaataatgaaaaggaggaaattgtgattgaattttaaattttaaattagttcgaggagaattatatttttttagggatttagggcgggtcgtgatttttgcggcggagaagttttggatatttttattttagaagtttattggggaaggttgaggggttttagttttttacgttggttgttgtgtagatgttggacgatagagttaggatggaggtcgttaagaaggagaaggtatttcgttttttattgggtattttgggagtgtttgtttgtttgtttttaatattttatggtttgtttgagttttagaatttgattttatgtataggttttttgagaagggttttgttaggggtgttttttggggtaggaaggtttttattgtttggtagatttatttagttttggattttggttttgcgattcggaagttaggttgttaagaggtttaggtagtggtttttattggggaggggttttggagagtttagagttttagatgtgggggttagggatatgaggttttgtggataaagtttattatttgattttgagataatatttattagatatggtgataagttaaagatgttttgttttttattaggaattatttcgtagggagttcgagggttgttgtggtttgttgaggagtgtagggtagttattttttttaaaaataaagagaaatttaggtatgttttgagttagttttgagtttagtagtgagtaaggagagagttggagataggggattttgttgtgaaatattggggggaatgtgtttgtattattttagttgggggtttaggtagagtgggggagaaggggtaagtgggtagagttagttattttgggtatgtttttttttcgtttttgtgtgaaatgattaggttagtataaatttcgggttggttgtgtttttggtagagttaatgatgttaggaggaaaataattaatttaagtgagagggtgcgtagttagatagttggatcggtcgaggttttaattaagttttagatttgtttgttattggtgttatggtagtaatttggatgagaaattttgtttaaagggtttttttaggttattcggggagaaggaagcggttgtttttggtatgattagaaagatggttcggagttagggagaggtggatatgtgggttgtggagatttggtattttttttaaataaggagagaaagtatagtgtgtttatgtgtgaatgt

SEQ ID NO: 744 - DNA, 6503 bp, Artificial Sequence
  chemically treated genomic DNA (Homo sapiens)
atatttatatataggtatattatgttttttttttttgtttggggaaagtgttagatttttatagtttatatgtttatttttttttagtttcgagttatttttttggttatgttaaagatagtcgttttttttttttcgggtggtttgaaggggttttttgggtaggattttttatttaaattgttgttatagtattagtgataggtagatttgggatttggttggggtttcggtcggtttagttgtttggttgcgtatttttttatttgggttggttgttttttttttaatattattagttttgttagaagtatagttagttcggggtttatgttgatttggttattttatatagaggcgagagggaagtatgtttaaagtgattggttttgtttatttatttttttttttttattttgtttgggtttttagttggggtgatgtaggtatattttttttagtgttttatagtaaagttttttgtttttagttttttttttgtttattgttgggtttagggttggtttagagtatgtttggatttttttttgtttttggaaaaagtaattgttttgtattttttagtaggttatagtagttttcgggttttttgcgaagtgatttttggtaggaggtaaggtatttttgatttgttattatgtttagtgagtgttgttttaaaattaggtagtgggttttgtttataagattttatgtttttaatttttatatttagggttttaaattttttagagtttttttttagtggaggttattgtttggattttttggtagtttgattttcgggtcgtaggattagagtttaaagttggatgggtttgttaggtagtaggggtttttttgttttagaaggtatttttggtaagattttttttaaagagtttgtgtataaaattagattttgaggtttaaataaattatggaatgttggggataggtaagtaaatatttttagaatgtttaatggagggcgagatatttttttttttttggcggtttttattttggttttgtcgtttagtatttgtatagtagttagcgtggggagttgggattttttagttttttttagtaggtttttgaagtggaaatatttaaggttttttcgtcgtaggggttacggttcgttttgggtttttgggagaatgtggtttttttcgggttggtttggggtttgaggtttagttatagtttttttttttttattgttttttaacgagtcggtaagtatttttttttggatttttttttattgagtttggatgttttttaggtagggttattgttgggcgtttgggtggcgtttttagcgtttttttttttggttgtgttgagttgtggggtttagtgttttttagatagatttagtgggaaatgtttttttttttttgtgatttggggatagtttttgagtaattaggttgtaggtgattgtgttttttatattttagtttgtttttttggggtttaggcgtcgttcggtattttttgttttagttaggtgtggagtgggggatttttttgttagggtttattgtgtttttgagagggtttgtggttgttatggtgattaggagtggttttagtagggttgattattttgttattagagttgttatgtataaaattgggattggtggtaaagagtttttatttttattattatggtgattatttaatcgttttgttattatagtgatcgttagtttgttaagtttttgttatttgtttagattttggggtagtgttttagggttttttatatttttgttttgatgagtagaggatttcgtgagtttggaagtagaggaaagggagtaggtagtttggcgtggtttaggagtaggtttttgggattattttatatttttaatttttttatttagggttgtaaattttttagagattttttatagtggaggttattgtttggattttttggtagtttgatttttaggtcgtagggttagagtttaaagttggataggtttgttaggtagtaggggagtttatcggagggttttggcgcggtttgttttgattatttttttgaaatttgaattagaatagtatatttggtttatataagtttggttgaggttgatattgttagaatagaggtttatagggattggttttttttttggttttgtttaggaagttttagtttgggatgttatttattttttttttcgtagtttaagtgtttttggagaggttgttttgtgtagtggggagttttagtgagtggatggagtagggggttagggtgttggagttaatttagttgcgggtttagttaatagtttggaataaaatatatttttgtttaagttattgaggtttggtgtgttttttttattcgtggttttttttagttaggatcggttattttttaagtgtttagcgtgattggtggttattatattgggtagtgtcggtatagattaaagagggtttaggatttagttttaggttatttacgtttagaggtttagtagagggggtgaggaggagtggttagtgcgatttttttagatagatgtgttgtaatattttaaaattaattttttattgacggttattgaggtagttttagatttttattattacgaagtaggttgtggtagaagtttttgaattttatcggagtttaagtgtgtgttagtgttttttttggatggtttttggaggttgaattgttagtttaaatgttgtatatattttatattttggtaggtaggattacgtggtttttttatatggttttattagttttttttgttaatacgagaagtttggttttattttggttaattttttagatgataaatttttatgagttttttgtcgatttgttattttattgttgtttgaattgtaaaatgttggatatttttttatgtgttttttggtgattgtatttttttttttaaggatgatttgtttatattatttaattatgttgttattggattattttttgtttatggatttggagaaattattttatattttatttgtagtatttattaattttttgtttgttaaatatattatgatattttttttagtttattgttaaatttaataatttgattaatcgtgttttttattatatagaagtatttagtttttatgaattttaatttttgtttttttgttttggggtttttatattttgttaagaaaatcgtttttaatttttaaattgtaaaaatgtttttttatatttttttttaatatttttttaagttttttatttgtttagtattttagtttttttgtaattgtttgtgttgcgtgtatcgttattatgagggtatattttatattttcgtttttttttttattttttttttttgttttttcgggttttgggagatggtggtttgggtatggtgtaagggaatttttaatatggttatttggtggtgaagtaattttttttttattgttttggaatgttggtttttttataaattttagtattatttattttatttcggaaaataatgttgttgataattttattggaaatatattgattttgtgggtttagggatttattttagagaattaatttttttataatattgagtttttttatttagaagtatgtgttgttttatttattttggtttttttttatgttttttaggtgaattttattattttttttatatatattttatatattttttgttatatttatttttaaagaaaggtaatatatttattaggagaaggagtaattgttattataattaatattgatgaaaatatttatgatttataaagtatttttgtatttattttgttatttaattagataattttagtgtggtaggtagtggtattattattattattttatttttatttttttgagatagaatttcgttttattatttaggttggagtgtagtggttcgatttttatttaatggaatttttgttttttaggtttaaataatttttatgttttagatttacgagtagttgggattatatacgtgtgttattgtatttggttaattttttgtattttttttttagtagatatggggttttattatgttgattaggttggttttaattttagattttaggtttcgtttattttttttttttaaagtgttgggattatagtagagtggggagggagcggttgaagttaaagtgtggaatgtttggttattatatttggttagtggtagtattattattattattttttaattgaggtcgttgaggttggggaggttaaaggattggtagggacggtttttttaatttaatgtttttttaagggttttttattatagttttttgttaaggataggggttaaggtagttttttatatagaggttttaggttttgttatatggttttgttttttttggatatagttgatgaaatattatttgatttaagagtagttatattgtatattggttatagtttagtgtagttaagtattaaattagttttaaaaatgtattttaaggttttttttttagttttaaaatgtaattttgaaatgtattttgaaattttgttttttttttttttttattagatatttttttgtattatgttcgtttatttaattttatgtttatttgggaattttaggggttaattttgaaataaaaattagatacggaatttttgcggaattttttaatttagggggagtcgaaataatttatttattattatttggtcgaaggaaagataatattaattagattttaggataggtgatatttaagatagttattggattaagatatatagattttgtattttgtattgtttttacgtatgttttatattaagttttttttttagaattttatgataaattttaaaatttgagataattgaatgttttaaaataataatttattatttttttggtttgttggttttagttaaaattatttttttttttattaaatttttttttttgtatttggtttttaagcggtggaattcgagttcggttataatgggggatatttatttaatagggattgtttgaaataatgagtagtttagttggggatcgtagagttgtagaatttttgaattatttaatgtttttaaacgaaagttttttgtttttttttttggggtggggtggatggggtatttttggttgatgaattggggagtaggtggggagagagttgttttttttaggtatagtttttttaggatgttttttgtttttttggttttatttttttagatattggatatttttgttttagttttttttttttcgtttgttggtttttgttttttagtttgttgttttttaatttgataattgtttttttttttttttcgttatttttggtagtattttttatttgcgttattttgtaattggtttttttttgttttttgttttgtgttattatagtggagtatatttgggaggtggtttatataaatatatgtatttaattatttatgttaatttaaagtttgtatgtatttagttcggggttttttgattttttttaatttgtgttagttattttgtttttttttttttaagagtcgaagaaagttttgggttttgttttgattggatggtttattgatggttagttgagtggtttgttgattggttgaagtttgtattaggtgtttatttaaagattaatcgttgtggtaataaggattattggttgataggttggggtttggggttttatgtggtagggtgtgggattagtttttagtttatgatggtttttttgtgagtattttttttgtgtgtttattgttgttgtttattaggttgtgtttggtgtgtttagtttttttaagggtatattttgtgtttttggtttttttttgtatttttttttttgtttttatgtggggtttatagtttcgaggatgtgggaggtgtacgtttggttgtggagtaggggatttttttgtaggtttttttatttgtttttttttgatagttttgtagattttttttcgttttttgtacggggtaattttacgattattagggtattattgataggataagttatttgtttaaatgattatgtgttttaattttaagtttttggtatttatttagtatggttattgataattgatatggtttggatatgtgtttttattaaattttatttgaattgtaatttttaatattggaggtggggtttggtgggaggtgtttgagttatgggggtggattttttatgaatggtttgggttatttttttggtgatgagttagtttttgttttgagtttatacgagatttggttgtttaaaagtgtggtattttttagtgttttttttttttttatttttgtttttattgtgtgatgtgtttgttttttttttgtttttcgttatgattgtaagttttttgaggtttttttaaaggttgagtagatgttagtattatgttttttgtaaagttagtagaattg

SEQ ID NO: 745 - DNA, 11371 bp, Artificial Sequence
  chemically treated genomic DNA (Homo sapiens)
gaggggtttattttggtgtttttcgaaagtgggtatttattttttttttattttggtattcgtatttttttgtttttttttttttgttttttattttatttattttttttaattagaaaggtagttgtagttgcggagtacgggatttttatttgtagttgtatttcgggatttagaataggtataaaagtatttaataagtatttattgaatgaataattggttgagttttttgtattaaagattgagttaagattttttaaaaggatgattttatttaagttttatagtaagtaaatgttatttttatttttttgatgaggatatagtgattattacgtttaaggatatagagggtggacgtgttatatttatattttgtgatttagagcggttggacgggtagggatttaggaggtttatagtagttagggtgagattatgaggttgagttgagaatattaagattgtatcgagtagggggttttggtaagtgtggagagttcggtagttggggtagagggcggagtacggtgtgcgtttacggatttttttaaacgaggtaggaaggttagaagttaaaaagggaataaatgatgtttaattatataaaaatgaaaatttaatggttggatatttattttaaatatataaaggtaacggataagtgattcgggttaggtatagaaggttatgtattcgtaggattgtatttagagtttttaaatgtataggaatagaagggtgggtgtaggaggttgaggggtggggaaagggtatgggtgttttatgaggatagagttttcgttttatgtaatgaaaagagtttggagacggatggtggtgattggattatatatttatatacggtagcgatggtatattttgtattatgtatattttattacgatttttttaaagtgttaaaggtaaatggttaaatggttttttgttttatagttgtagtagttatcggttgttagtgataaagtttttgagttaagatgatagtagtttttataatttttaatcggttttttcgcgtggagttatttaggagtagtcgtattagagataagtttaatatttaattttttattttggttagggttttagttggtagcgagggtgggagatttcgggtagagtagagggcgttgatattggggttcggtttggtttgggtttttttggtttttttttaggggttttttttttttggggtttttttgggtcgttattgttttcgtttttttttttttattttatttttttattttttcgttttttatatttttttttagtgttttttttatttttatttatttttttgtaagagtgtgggattataaatgagtttttatttggtttggggatatacgtgtttttataggtgttgagtgattttttaggatagtaatttgttttaggttaaaatgggatttgattttttgttagttttaattattaattagtagagtcggtgaaggtgtagaatttatcgtttttttaggtttttttttatttttgttatttttatttttttttttgggatgtgggggttggtatacgtgtggtttagggtattggtgggattgtattgagttgggttattagcgtaattttggataagggtagatagggcgagcggagggttagtttcggggtttaggtaaggttgggggttttttttagatattttattttttttttgttggatttttattttatagggtatttcgtgtttttaaagggtttttaaatagtatggtggttttggatgtttagggaagttttagagttgtttatttttttttagatagaaggggaatttcggttaagagggagaggtcgttttgtttaaggttatttagttagtttatggcggtaatgggataaggttggttagttattttatttttagaagggattcggtggggtaggtgattttagaggaggtttatttttgggttttatatttttggattttcggattttttgattttggtggggataggtagattaagtttttttggattcgggaagagggatttttggaagttatttgggattgagttttagagttttgatattgttttagtagatttatattttgaatttattttaggtattttatttatagaatagggatagtgattattttattttgttaaggagtgcggggtatatattatgttgttggtagttagggtggaaagttaaggggttttagttgaagtattgttatagaggtaggatgtagttcgagaggggattttagagtaggggtttaaggttaaggttattagggaggtttttttgtaggagggatttttttaggagttaggttttaaaaataaataagaggaagaaaggtatttggtggtttttagtttatttacggtgttgtgtagttattattattatttagtcgtagaatttgtttatttttttaaattgaagttttggtttcgtttaattttaattttttattttttagtttttggtatttatttttttattgtttgtttttatggatttgattattttaggttttttatataagtggaattttatagtatttatttttttgtgattggtttattttattgagtaatgtttttaagggttatttatgttggagtatgtgttaaattttatttttttttaagggtgaattatattttatcgtttgtatagattataatttgtgtagttaattattcgttgatgtttgttgatttgtttgtttgttttgagatagttttgttattagagtttattgtaggtttaattttttaggtttaagaaattttttcgtttttttattttttaagtagttgtgattataggtatttgcgattgtgttttgttaatttttgtattttttgtagagatagggttttattatgttgtttaggttagtttcgaatttttgggtttaagtgatttttttatttcggttttttaaagaattgggattataggtatgagttattatgtttagtttaattgtttattgatgggtacgggttgtttttatgttttagttgttgtgaattacgttgttgtgaatatgcgtgtgtaaatagtttttttagattttgttttttatttttttgggtttatatttagtagtgcggttgttgggttttatgggaattttacgtttaatttttggaggagttgttaaattgttttttatagtggttgcgttattataatttaattttaggatatttttattatttataaagtattttttgtatttattaagaagttattttttattttttttttttttttgttttggtatttatttttttgttttgtgtgtttttggattgttttatttaagtattttatagagatggagttatgcgtttcgtggttttttgtgtttggtttcgtttattgagtatgttgttttttaggtttatttacgttgtagcgtaggttagttttttattttttgttatggttaaatgatattttattgtatagataggttattttttatttatttatttgtttttggatttttgggttgtttttattatgtggtttgttgggaatagtgttttgtttgtatttatgtacgggtttttgtgtggatatatatttttaagttttttgggtatataggtgtagaagtgttagagttggggaaaaagtttatttttttaggttgtgaatgggttttggtaagtttgtggttaggattcgtttttttttttatatggggtttttagtttggtatttagtacgtggtaggtagcgatagatgttaaaagttatttttgttatgggtagttaggttggggttttatgtagttttggtttttagtttggtagttagggtttttttgtgtttgtagtagaagttatgttgttaggagtgtaagtgtgagttaggaatgttggagaatcgtggttttgagaatagggataagaggttataagtttacgttttggtttttttaagtttaaggaataaatttaaaaggaggtatttggaaggagttggatttggggattgaggagttgggagttgatggaagtcgtgaaaggggatgtgtttttggggaggcgttggggcgggtgggtcgtggaggggatagggttcgttggttggaaattgaggcgaggttacggagttgggtattaataggttattcgtgtttttgcgaagcgtggggatatagggatagtagagatggtttgtttggatattttgtcgacggggggtttgtggttggtgaagtttaaggtaaggttgtgaatttagggtaagggagacgtgagtaggcgttgtcgtgggttgatgtgggtattgtatgtgtattttggcggttaaaggatttatagtttatggggggtaagggggaggagggaagttaatagtaggatgtgcgtagttagtttgttttttttatattggaggaggagtttttcggtataaatttcgttcgtttgggtttacggatatggttggtttcgtaaggaggattcggttttaggtttcggttttaaatagtttttttgggtttttaagagaattatatgagaaaggaggattcgggttttgagtagttttattatttattttttagtttgtaaattttgattcgtgggtttatttgttttaaaggcggacgtaggatagtagaagggaatagagaatatataaatatagagagggttatagcggtttttatagttatcgttatttttttggcggggatgggtggggcgtttgagtttggtttttagtaaatttttttgagtcgtttttgcgggttcgttttaggagtaggggagtaagaggtgggaggaggaggtttaagttttaggtttaattaagagattaggtagtgtagggtttgggagtttttaaggtgaagaggttcgggttgattttataggttagtataaagcgtcgtgatttttaggtgatgcgttagggtcggttgtcgtcggggatagggttttttatagttatggtttagtagtggagtttttaaaggttcgtaggtcgttattcgtaggatagttatgaggatagtatttagtttagtatttttatttatattaatagtaattttattagaggtgagttagtaggttcgtggaggttgggtggttgtattgggggttatcggttatttatttgtttcgtttaagggaattttttttttgtacgtttttattagtagagaaggtttttttttatagtttttttgatgatatgaattggggggttttttttaaatttagaaggatattataatatcgaatatgtatttttaagttatataggttttttagtttttttgagaattcgaggtcggggaagagtttatgtgttttttttttgtggttcgtagatgagtgtgtttattgttagcgaatgattttttattttacggagttttttagttttttggggaagagttgggtttgtttttatatttgaagtcgaaagaggtaatatattgatatatttaagggaggcgggagggtggggaagatagtagtagagggtaagaaatttttagaattttagggtcggtaaagtttgtagtagttattttgttaaattttatgatggggttatttggtttttggttgtatatttttgggggaagaggttgtattggcgtttagggttatttttttattcggagtcgttttgggagagagggtttaggtttaatagaaagttgaaagtttttattagggtagttcgagttttgttattgggagttgtttaattcgaaagttttgtacgtaggtttttaaagaagttgaggatattagtgatcgttttatttttggttttttttttaggttttttttttaaattaaatttttttggtgtttttaagaatatcgtgtaggtcgggtatagtggtttacgtttgtaattttagtattttgggaggtagaggcgggtagatgacgaggttaatagatagagattattttggttaatatattgaaattttatgtttattaaaaatgtaaaaattagttgggtttggtggcgtatgtttgtagttttagttatttaggaggttgaggtaggagaatcgtttgaattcgggaggtggaggttgtagtgagtcgagattacgttattatgttttagtttggttatagagtgagatttttgttttaaaataaaataaaataaaaaataataatatcgtgtaggttgtggtttttagaagttacgttagttttttgattgttaataaatatttcgttgtggggtggttaggatcgagtgttaattagtgatagagtgtttagattaaatcggatgaggattttgtagttgattttaatatgattgtgtttagaatttttttggtggtaatgttaatagtttttttttagatgtttttagattttattaatgtatgatgttttagtgtattttttttaaatgtcggggtgggttttttttttttttataaaattttaagtatttattaaagtagagggaggagtgtaatgaatttcggtatttattatttagtttttacggttttattttattttatttgtgatttttttattattttttttttttgatttttggaagtaaatttaagatattatatttttttttttgtaaatttttattatgtttttttaggagaaaagggttttttttaatatataattataagttattattatatcgataagtgtaatagtattttttgaatagttttaaatattttagtagtgtttaaaaaatgttatacgtatttttagtttgtttgaattagggtttaaataaggtttatatatttagattgattgatatgttttttgattatttttgaatttagaggttttttttttatttttttgtaatttatttgtggaagtaagtaagtcgtttatgacgtagtttaataggtttttttgacgttgtttattatgatttttttgtaaattggtagttgatttgaggatttggttagaggtaggttggatttgttggtgtgttttggtaaggagagtgttttttttttggggtgttggtagttattgaaatttaatgtttagattaattaaattattggggatggaaaatgacggtattcggatattttattttgtttttatttattggtgattaaaattttaatatttttataggtttttttattttgagggtatatgttattaggttgtgtagtaaatcggtgtgtttttagttttttagaatagtttttttttaagtgatatgttatttagtggatatgtatttagttttattttttttgttgttgatttttagagattgttttgtaaatttaaatttttattttattttattttattttttcgagatagttttattttgtcgtttaggttggagtgtagtggcgcgattttagtttattgtaattttcgttttttcggttcgagcgatttttttgttttagtttttcgaggagttgggattataggtgttcgttattacgtttagttaattttttttatttttagtagagatagggttttattatgttggttaggttggtttttaattgttgattttaagtcgttcgtttatttcggttttttaaagtgttgggattataggtgtgagttatcgttttcggttatttaaattttgttttataattatgtaataaaatagttaaaagttttaaattaaaatttagaaaagaaggtgtatttgaagaagtttggtttttttgcgttattatcgatcgttttttttttatttgtttgtattttttcgaattattttgtttgggagttgattttgatttttttgtttattgttttatgaaatttagttttagaatttttaggagggaggggtaggttatgatattagttttagttatattggtggtagtttttgtttttttttttattgttgttgggatttgtttttttttttgtttttttgtttttgtattgtttaatttggatcgtaagggttgttagggaagggtattggttgttttgtttttagaggtcgtagtatttagattgttttagttttttgtatttgtttgtaggttagagtgttttaaatttttttagttttagttgtttttttttagtttatttaaggtattttttagggaagagttgtcgatagtttgggggttttttgtttttaggtttattagtaattttattgtttttttttgtttttttttgtacggagattgacgttatgtaggtttttaattgttaatggtttgtttttgttgtttatattgggggtttttggggagttagtgttaggtatcgggattgtagatattgtttgtgggtttttagaagttttttgtgttaggaatatatggggttcgtgtatagagggtagtagaggttttgtgggatttagttgtgttaggggtgagatttatttgttttttttggttatagttaggaaatttttattttttttaagttagtttgagttgggtttttttaatatatagttaaagaattttttgataaattttgggattttttatgaggttttatatggtagtaggtttgtggtttgtaatttttttaagtaatttgttaaaaataatgttatgacgaaggtttttttaatataaaaggtgtagagttttagtaaatttttatagaagaaaaaggagaaataattcgtttgtagttttagttatttgggaggttaaggtgggaggattatttgaagttaggagttcgagattagtttaggtaatatagttagattttatttttatagaaataaaaaaaattgttattgtggtaatgtacggtttgtagttttagatattcgagaggttgaggtaggaggatcgtttgagtttaggaggatcgtttgagtttaggagttttacgttgtagtgagttatgattgtgttattgtattttagtttgggtgttagagttaggttttatttttatttggtgttgttgttgttgttgttgttgtttttgagacggagttttgttttgttatttcggttggagtgtagtggcgtgattttagtttatcgtaatttttgttttttgggtttaagtgattttttcgttttagttttttgagtagttgggattataggcgtttattattatatttagttaattttttttttttttgtatttttagtagagacggggttttattatggttaggttggttttgaatttttgattttaagtgatttattttttcggttttttaaagtgttgggattataggcgtgagttatcgtttttagtcgattgtatttttaaatatataataattataattataattaggatagtcgttatattggattagggtttattttaatgattttatttaaatttggttatttttgtaaagattttattttcgaaaacggttatattttgaggtattggggttaggattttaatatatgaatttgggtggggatataatttaatttataatatatttattgattaatttttttatttatttattttttgagtatttattgtgtgttggatattttgtgaggatgaatgagttaaagtttttggtgagaaagataagatttgtatttgtgttttagtattggttgttataagaaattattaggttgtggtcgggcgtagtggtttacgtttgtaattttagtattttgggaggtcgaggtaggcggattacgaggttaggagattgagattattttagttaatatggtgaagtttcgtttttattaaaaatagaaaaaattagttaggcgtggtggcgggcgtttgtagttttagttatttaggaggttgaagcgggagaatggcgtgaatttgggaggcggagtttgtagtgagtcgagatcgtgttattgtattttagtttgggtgatagagtaagatttcgttttaaaaaaaaagaaaaaaaaaagaaaagaaaaataaattattaggttgtgtatggtggtttatgtttgtaattttagtattttgggaggataaggtaggaggattttttgaggttaggagtttgagattagtttggttaatatggtgaaattttatgtttattaaaagtataaaaattagttgggtgtggtggtgggtgtttgtaaattttagttattatttcggagttgaggtaggagaattgtttgaatttaggaggcggaggttgtagtgattcgagattatattattgtattttagtttgggtgatagagtaagattttgttttaaaaaaaaaaaaaagaaaagaaagaaaggaaaagaataaaagagaaattattatagattgggtggtttttaaatgataaatttattttttatagttttggaggttggaagttagggtgttagcgtggtgggttttggcgaggattttttttttgattgtagattgttaataatttattgtatttttatatggaagaaagagagttagagagtattttagggatttttttttttgtttgttttaattaaaaaaaaattttttttatatgggtatgttatgttgtttaggttggatttgaatttttgggtttaagtaattttttagttttagttttttaaagtgttgggattataggtatgagttattatttttagttaatttgggttgtttttaaaggtttaagtgatttttttacgttggttttttgagtagttggggttataggcgtgagttattatgtttagtttttaggattttttttataagggtattaattttatttatgagggttttatttattttgtatatatgatttaaatgatttgttaaaggttttattttttaatattattattttgggggttgggattttaatatagaaatttatggggggtacgtatatttagattattatgaatagtaatttttatgtgtgatagaaggtgatagaggtgggtagtggttttttttttaagggggtgagttgttattagttggggaattttttggaaggtaaatgtatatgagttgggttttataggaggtaagcgtttttttatggaagggtagaggattgtgggaggtaggaggtggggttggggtaaagggaagaggggagtagggaagtggggtgattgtatattgggagtggggaattagatggaggagacgatgaggagttttgttaagtttaagatgttagtgttagtgattagcgggcgatggtttttggtttgagggataggatggaggggagattgtttgaggatggataaagttggagggaaatagttaattgtaaaggtaggagggcggaagggggaggggagaggtgggattagtattggtatagataggcggtgttgtagtttagttttttttttttttttgttttttgtttttagg

SEQ ID NO: 746 - DNA, 11371 bp, Artificial Sequence
  chemically treated genomic DNA (Homo sapiens)
tttgagggtaggaggtagaggagagagaggagttgggttgtagtatcgtttgtttatattagtgttgattttattttttttttttttttttcgtttttttgtttttgtaattggttgtttttttttagttttgtttatttttagatagttttttttttattttgttttttaagttagagattatcgttcgttggttattggtattggtattttgaatttaatagaattttttatcgttttttttatttgattttttatttttagtgtgtagttattttatttttttgttttttttttttttttgttttagttttattttttattttttatagttttttgtttttttatagagaaacgtttgttttttgtaaagtttagtttatatgtatttgttttttagaagattttttagttagtggtaatttatttttttgaggggaagattattatttatttttgttattttttgttatatataggagttattgtttatgatgatttgaatgtacgtgttttttataaatttttgtgttgaaattttaatttttaaggtgatggtattaggaggtggggtttttggtaggttatttaggttatgtgtgtagagtgagtggggtttttatgaatgggattagtgtttttataaaagaggttttagaagttgggtatggtggtttacgtttgtagttttagttatttaggaggttaacgtgggaggattatttgagtttttgggaatagtttaaattagttgggaatggtggtttatgtttgtaattttagtattttgggaggttgaggttggagggttgtttgagtttaggagtttaaatttaatttgggtaatatggtatgtttatgtaaaaaaaatttttttttaattaaaataaataagaaaaagagtttttagagtgttttttagtttttttttttttatgtgaggatataatgagttgttggtaatttgtagttaggaagagggttttcgttagagtttattacgttagtattttgatttttagtttttagagttgtgagaaataaatttattatttaaaagttatttaatttatggtaattttttttttattttttttttttttttttttttttttttttttttttgggataaagttttgttttgttatttaggttggagtgtagtgatgtgatttcgggttattgtaattttcgttttttgggtttaagtaatttttttgttttagtttcggagtagtagttgggatttataggtatttattattatatttagttaatttttgtgtttttagtagatatggggttttattatgttgattaggttggttttaaatttttgattttaagagatttttttgttttgtttttttaaagtattgggattgtaggtatgagttattatgtatagtttggtaatttatttttttttttttttttttttttttttttttgagacggagttttgttttgttatttaggttggagtgtagtggtacgatttcggtttattgtaagtttcgttttttaggtttacgttattttttcgttttagttttttgagtagttgggattataggcgttcgttattacgtttggttaattttttttatttttagtagagacggggttttattatgttagttaggatgattttaattttttgatttcgtgattcgtttgtttcggttttttaaagtgttgggattataggcgtgagttattgcgttcggttatagtttggtaattttttatagtagttagtattgagatataagtataagttttgttttttttattagagattttgatttatttatttttatagagtgtttagtatataatagatgtttagaaaataaatgaatgaggaaattaattaatgaatgtgttatgagttgaattgtgtttttatttaaatttatatgttggagttttaattttaatattttagaatgtgatcgttttcggagatagggtttttatagaaatgattaagtttaaatgaggttattagggtgggttttaatttaatatgacggttgttttgattatgattatgattattatatatttagagatatagtcggttgggagcggtggtttacgtttgtaattttagtattttgggaggtcgagggggtggattatttgaggttaggagtttaaaattagtttggttatggtgaaatttcgtttttattaaaaatataaaagaaaaaaaaattagttaggtatggtggtgggcgtttgtagttttagttatttaggaggttgaggcgggagaattatttgaatttaggaggtagaggttgcggtgagttgagattacgttattgtattttagtcggggtgatagaataagatttcgttttaaaaataataatagtaataataataatattaaatagagatagagtttggttttggtatttaggttggagtatagtggtataattatagtttattgtaacgtggaatttttgggtttaagcgatttttttgggtttaagcgatttttttgttttagtttttcgagtatttgggattataagtcgtgtattattataatggtaattttttttatttttgtagagatggggtttggttatgttgtttaggttggtttcgaatttttgattttaagtgatttttttattttggttttttaagtagttgggattataaacgaattatttttttttttttttttgtaggagtttgttagggttttatattttttgtgttggaaggattttcgttataatattgtttttggtagattatttgaagggattgtaagttatagatttgttgttatataaggttttatggagagttttaaggtttattaagagattttttagttgtgtgttagaaaagtttaatttaagttagtttaagaaaaatggggattttttggttatggttaggagagatagataaattttatttttagtatagttggattttataaggtttttgttgttttttgtgtacgggttttatatgtttttaatataaggagtttttggaaatttatagataatgtttgtaatttcgatatttggtattggttttttaggaatttttagtatgagtagtagggatagattattgataattgaagatttgtatggcgttagttttcgtgtagaaggaagtagaggggagtaatggggttgttgatggatttaagaatagagaatttttaaattgtcggtagtttttttttgggaagtattttgggtgaattggggaagagtagttgagattgggagggtttgggatattttggtttgtaggtaagtgtaaggggttggagtaatttaggtgttacgatttttgaaaataaggtagttagtgtttttttttggtaatttttgcggtttaaattgggtagtgtagggataagggggtaaaggagagaataggttttagtagtagtgggggaggggataggagttgttattagtgtaattagagttggtgttatggtttattttttttttttgaaagttttggaattgaattttatgaagtaatgagtaagagaattaaagttaatttttaggtaaagtgattcgaggaaatataggtaggtagggaaggggcggtcggtggtggcgtagagaagttagatttttttaaatatatttttttttttagattttaatttgagatttttaattgttttattatataattataaaataaaatttaagtggtcgggggcggtggtttatatttgtaattttagtattttgggaagtcgaggtgggcggacgatttgaggttagtagttggagattagtttggttaatatggtgaaattttgtttttattaaaaataaaaaaaattagttgggcgtggtggcgggtatttgtagttttagtttttcgggaggttgaggtaggagaatcgttcgaatcgaggaggcggaagttgtagtgagttgagatcgcgttattgtattttagtttgggcgatagagtaagattgtttcgaaaaaataaaataaagtaaaataaaagtttaaatttatagagtaatttttgaaaattagtaataaaagaaatgaagttaaatgtatatttattgagtggtatattatttagagagggattattttaagggattggaaatatatcggtttattatataatttagtggtatatatttttagggtaagaagatttgtgaagatgttaaggttttggttattaataggtgaaggtagggtaaggtgttcgaatgtcgttattttttatttttagtggtttaattggtttgggtattgagttttagtagttgttaatattttagaaaagagatattttttttgttaaaatatattaataaatttaatttatttttggttagatttttagattaattattaatttatagaaaaattataatgaataacgttagaggggtttgttaggttacgttatgaacgatttgtttgtttttataaataaattgtagggagatagaaagggaatttttagatttaaaggtagttaaaaggtatattagttaatttgaatgtgtggattttatttgagttttgatttaagtagattgaaaatacgtatgatattttttgaatattattaggatatttgaagttatttaggaaatattgttatatttgtcggtgtgatgatgatttgtggttatgtattgagaagagttttttttttttagaggaatatagtaaagatttatagagggaagggtgtgatgttttggatttgtttttaagaattaggaagaaagggtagtggaggggttatagatgaaatgagatgaaatcgtggaagttgagtgatgggtatcggagtttattatatttttttttttattttagtagatgtttgaagttttgtggaaaaaaaaaaaatttatttcgatatttgaaaagagtgtattgaagtattatgtattgatgaagtttgggggtatttaggaagagattgttgatattgttattaaggaaattttgggtatagttatgttgaggttaattgtaagatttttattcggtttggtttgggtattttgttattaattggtattcggttttggttattttatagcgggatgtttattggtaattaaggagttggcgtggtttttggaaattatagtttgtacgatgttgttgttttttgttttgttttgttttgagataagagttttattttgtggttaggttggagtatagtggcgtgatttcggtttattgtaatttttatttttcgggtttaagcgatttttttgttttagttttttgagtagttgggattataggtatgcgttattaagtttagttaatttttgtatttttagtagatatgaggttttagtatgttggttaggatgatttttatttgttgatttcgttatttgttcgtttttgttttttaaagtgttgggattataggcgtgagttattgtgttcggtttgtacgatgtttttgaaggtattaaaggaatttggtttggaggagggatttggggagagggttaggagtggggcggttattggtgtttttagtttttttgagggtttgcgtgtaaaattttcggattgggtaatttttaatggtaggattcgggttgttttgatgagagtttttagttttttgttgggtttgagtttttttttttaggacggtttcgaatggaaagatggttttgggcgttaatgtagtttttttttttagaggtgtgtagttaaaagttaagtggttttattatggagtttgataaaatgattgttataggttttgtcgattttgaagttttagaagttttttgttttttgttgttgttttttttattttttcgttttttttgggtgtgttagtatgttgtttttttcggttttaaatgtaaagatagatttagtttttttttaggaagttgagggatttcgtggaatgagaggttattcgttagtagtgaatatatttatttacgggttataaagaaagagtatataaattttttttcggtttcggatttttaaaggggttgggaagtttgtgtggtttgagaatgtatattcgatattatggtgtttttttagatttggagaggattttttaatttatgttattagaaaagttatgggagaaagttttttttgttggtggggacgtgtagaagagagatttttttgggcggggtaggtgggtggtcggtggtttttagtgtagttatttagtttttacgggtttgttggtttatttttggtggagttgttgttggtgtaggtgaagatgttggattgggtgttgtttttatagttgttttgcggatggcggtttgcgagtttttggaggttttattgttgggttatggttatggaaagttttgttttcgacggtagtcggttttggcgtattatttgagggttacggcgttttatattggtttgtgggattagttcgggtttttttattttaaaagtttttaaattttatattatttgattttttaattgggtttgggatttagattttttttttttattttttgtttttttgtttttgaggcgagttcgtaagggcggtttagagggatttgttgggaattaaatttagacgttttatttattttcgttaggaaggtggcggtgattgtgggagtcgttgtggttttttttgtgtttatgtgttttttgtttttttttattgttttgcgttcgtttttggggtaggtggatttacgggttaggatttgtagattggggggtgggtggtgaaattgtttagagttcgaattttttttttttatgtggtttttttgaaagtttagggagattatttagggtcgaggtttggaatcggattttttttgcgaggttagttatgttcgtgggtttaaacgggcgagatttgtgtcggggggttttttttttagtgtagggggggtagattgattgcgtatattttgttgttggtttttttttttttttttgttttttatgagttgtaggttttttggtcgttagggtgtatatgtagtgtttatattagtttacggtagcgtttgtttacgttttttttgttttgagtttatagttttgttttgggttttattaattataggtttttcgtcgatagagtgtttagataggttatttttgttgtttttgtgtttttacgtttcgtaggggtacggatgatttgttagtgtttaatttcgtagtttcgttttagtttttaattaacgggttttgttttttttacggtttattcgttttagcgtttttttaggagtatatttttttttacggtttttattagtttttagttttttagtttttaaatttagttttttttaggtatttttttttgggtttattttttaagtttaggaaagttaaggcgtgagtttgtggttttttgtttttgtttttagagttacgattttttagtatttttggtttatatttatatttttggtagtatggtttttgttgtaggtataagggggttttggttgttaagttgaaggttagggttgtatggagttttagtttggttatttatagtaagaatggtttttaatatttgtcgttgtttgttacgtgttaggtgttaagttaggggttttatgtggaagagaagacgagttttggttatagatttgttagggtttatttatagtttagaaaggtgagttttttttttaattttggtatttttatatttgtgtatttaagagatttgaaaatgtgtgtttatataaaaattcgtatatgaatataaatagagtattgtttttaataggttatatggtagaagtaatttaaaagtttagaagtagatgagtgggtaaaaagtggtttgtttgtataatggagtattatttggttataatagggaatgaagggttgatttacgttataacgtggatggatttggagaatagtatgtttagtgagcgaagttagatataaaagattacggagcgtatggttttatttttgtgaaatgtttagatagggtaatttagagatatataaagtagaggaatgggtgttaggataggggagggagggaaatggaggatgattttttaatgggtatagggagtgttttatgggtgataaaaatgttttaaaattggattgtgatggcgtagttattgtggaaaatagtttggtagtttttttaaaagttaaacgtagaatttttataggatttagtaatcgtattgttgggtataggtttagaggaatggaaggtagggtttggaagggttgtttgtatacgtatgtttatagtagcgtgatttataatagttgaaatatggaagtaattcgtgtttattaatgggtaattgggttggatatggtagtttatgtttgtaattttagttttttgggaggtcgaggtgagaggattatttgagtttaggagttcgagattagtttgggtaatatagtgagattttgtttttataaaaaatataaaaattagtagggtatagtcgtaggtgtttgtagttatagttatttgggaggtagagaggcgggaggattttttgagtttgggaggttgagtttgtagtgagttttgatggtaagattgttttaaaataaataaataaattaataaatattaacggatgattagttatataaattgtggtttatatagacgatggaatatgatttatttttaaaaagaaatgaagtttgatatatgttttaatatggatgatttttgaggatattgtttagtgaaatgagttagttataggagggtaaatattgtaaaattttatttatatgaagggtttagagtggttaaatttatagagatagatagtggaagggtgggtgttaggggttggggggtggggagttggggttgaacggggttagagttttagtttgggaagatgaataagttttgcggttggatggtggtgatggttgtatagtatcgtgaatagattaaaaattattaagtgttttttttttttttatttgtttttagggtttaatttttaaagaggttttttttgtagaaagatttttttgatggttttggttttgggtttttgttttgaagttttttttcggattgtattttgtttttgtggtagtgttttagttgggattttttgattttttattttggttgttagtagtatggtgtgtgtttcgtattttttggtaagatggaatggttattgtttttgttttgtggatgagatgtttgaggtgggtttaaagtatagatttgttgaaatagtgttaagattttagaatttaattttaagtgatttttaagggttttttttttcgggtttaagagagtttggtttgtttgtttttattagagttagaggattcgaggatttaagaatgtgagatttagaagtgagttttttttgagattatttgttttatcgggttttttttgagggtgggatggttggttagttttgttttattatcgttatgagttggttgggtggttttgaatagggcgattttttttttttgatcgagattttttttttgtttagagggagataagtaattttgaggtttttttgggtatttaaggttattatgttatttggaagttttttgagaatacgaagtgttttatgaagtgggggtttagtagaggaggagtggggtgtttgggggaagtttttagttttgtttgagtttcggagttggtttttcgttcgttttgtttgtttttgtttaggattacgttaatgatttagtttagtgtaattttattaatgttttgggttatacgtgtgttagtttttatattttaggaaggagagtggaggtggtagaggtgggaggaggtttggaaaggcggtaggttttgtatttttatcggttttgttaattgatgattagggttaatagaagattaagttttattttagtttaaagtagattattgttttagaaagttatttagtatttgtgggggtacgtgtgtttttaggttaggtgaaaatttatttgtggttttatatttttgtagaagggtggatgaaagtggagggagtattagagaaggatatgaagaacgagggggtgagggggtgggatggggggagaggagcgggagtagtggcggtttaagaaagttttaaggaaagagggtttttggggaaaggttagagggatttaagttaggtcgggttttaatgttagcgttttttgttttgttcggagttttttattttcgttgttagttggggttttggttagggtggaagattagatgttggatttgtttttaatgcgattatttttaaatgattttacgcgggagagtcgattaggagttatgggggttgttgttattttgatttaggggttttgttattaatagtcgatggttgttatagttataggataaggaattatttggttatttgtttttgatattttaaaaagatcgtggtaaaatatatataatataaagtgtattatcgttatcgtgtgtaagtgtatagtttagttattattattcgtttttaaattttttttattgtatgaaacggaagttttgtttttatgaaatatttatgttttttttttattttttagttttttgtatttatttttttatttttatgtatttgggagttttgagtgtaattttacgggtgtatggttttttgtgtttggttcggattatttattcgttgtttttgtgtatttggaatggatatttaattattggatttttatttttgtgtggttaaatattatttgttttttttttgatttttgatttttttatttcgtttgaagaggttcgtaaacgtatatcgtatttcgttttttgttttagttgtcgggttttttatatttgttaaggttttttattcggtatagttttgatatttttagtttagttttataattttattttggttgttgtaggttttttaagtttttgttcgtttagtcgttttaagttatagagtgtgaatgtggtacgtttattttttgtgtttttgagcgtggtggttattgtgtttttattaggaagatggggataatatttatttgttgtaaggtttaaataagattatttttttaaagagttttagtttagtttttggtatagaaaatttagttaattatttatttagtgggtatttattaggtatttttgtatttgttttaggtttcgggatgtagttgtagatggagatttcgtgtttcgtagttgtagttgtttttttagttgggggagatgagtaggatggagaatagaaaaaggaagataggagggtgcgggtgttagggtgggaagggagtggatgtttattttcgaagggtattagggtgagtttttt

SEQ ID NO: 747 - DNA, 15122 bp, Artificial Sequence
  chemically treated genomic DNA (Homo sapiens)
ggtaatagagtaaggttttgttattataaaaagtaaattaggtgtgtgtttgtagtttcggttattggagaggttaaggtaggagggttgtttgagtacgaggttacggatgtataattgtgttattgtattttagtttgggtgattaagtgagattttgttttaaaaaaataaaataaaataataataaaaaaacgggtttcgatatttgaattagtgtttgttattttgtggtaaaagagattttgtaagatgtgattaagtgtgtgtattttgatataaagagattattttggattatataaatgcgtttaatttaattatgaggattttttatttttgagacgaagttttatttcgttatttaggttggagtgtagtggtgttattttagtttattgtaatttttgttttttaggtttaagttattttgtcgtgttagttttttaagtagttagagtgtagtggtataattttggtttattgtaatttttgttttttgggtttaagtaatttttttgttttagtttttcgagtagttgggattataggtgtttattattacgttcggtttatttttgtttttttagtatagacggggttttattatgttggttaggttggttttaaatttttaattttaggtgatttgttcgttttggttttttaaagtgttgggattataggtgtgagttattaaatttggtttatatgagtttttaaaagtagagattcggttaggcgtggtggtttacgtttgtaattttagtattttgggaggttaatgtgggtggattacgaggttaggaaatcgagattagtttggttaatacggtgaaattttatttttattaaaaatataaaaaattagttaggcgtggtggcgggcgtttgtagttttagttattcgggaggttgaggtagaagaatggtatgaattcgggaggcggaggttgtagtgagtcgagattacgttattgtattttagttcgggcgatagagcgagattttgttttaaaaaaaaaaaaaaagtaaaaaaaaaaaacgtagagagttttttttagttgggttagcgagatgattttgaaaagggtataggggagagagaaattattggattttttattgttggttttgaaggtggaagaaaggggttataagttaaggagtgtgatattttttagaagttgagaatgttttttagttgaagttagtaaggaaacggggattttcgttttaaaattataaggtattgaattatgttttgattagaaatggtttttttagataggaatttatgttgatttattattttagtttggtaagaattaagttttgatttttagaattgtaagataataaatttgggttgtttaagttattaaatggtggtatattgttatggtaataatggaaattattatataattattttatgtggattttaggaagttaattttaaaaaataaaaaaggtttgttataatggtttatgtttgtgatttttgtattttgggaggtcgaggtgggaggatattttgagtttaggagttagaggttagtttgggtaatatagtgagggtttagttttataaaaaaagaaagaaagaaagaaaaaaattagttaggtatagtggcgtatatttgtagttttaggtatttaggaggttaaggcggggggattatttgagttaggaggttgaagttgtagtgagttatgatcgtgttattgtattttagtttgggtgatagagtgagatttcgttttaaaaaataaaataaaaatttttaaaaagaggttttttatgtttgaggatgaaaagatttattcgtggttgaaaaatttttatttgtttttttttttttttattttttgcgagaagtaagacgaagttagtagagttgttttagggagtgatatttgaaaatagaaattgtaatgggattttatttttaattttataggtatttttgtgagttatttatttttttgggttttattttttttgtttgtaaagtaggttgaatttattttgatttttgtttatattatagttaaagggttaggaagaaaaatttttaaaaatttattttataaatagagttttagggcgttttttataaagtacgagataaattatagatagaattttggttataggatattttttggattatttatggggtattatttttttttttcggttttttttattttttcggttttttttacggggttttgggtatatttggttttttgtagttgcggttagtacggaaataagaaaagttttagataggtaaaggtgtagaaattaatgttagggtttatagggataaagttttcgatttttgtgttttgggtggtagtatttttatattaggatgattgggttttagtacgatttaatcgtttttatgatggaaagaaagtaaagtaattgattgtttagagaaaattggaaggtatagaggtaggatgagattgaggtgaaggtaaggtgaggaaagataggcggagaaatgaaatattttagggtggtgtgggagtggatatagggttgggagggtattgtgattttttaggttaattttttttttagattttattttaacgttatttaattaggtggacgtttttttagtaagtaggttataattgatttggtttggggttttgtttttttttttttttttttttttttgagatcgagttttatttttgttgtttaggttggaatgtagtggcgcgattttagtttttcgtaatttttattttttaggtttaagttatttttttgttttagtttttcgagtagttgggattataggtatgcgttattatatttagttaattttgtagttttagtagagatatggttttattatattggttaggttggtttcgaattttcgattttaggtgatttattcgtttcggttttttaaagtgttgggattataggcgtgagttatcgtgtttggttttttttttttttttttttgatatagttttattttgttgttttggttggagtgtaatggcgcgattttggtttattgtaatttttgtattttggatttaagcgattttcgtgttttagttatttgagtagttaggattataggtacgttattacgtttggtttttttttttttttttgtattattagtagagatgggattttattatgttggttaggttggtttcgaattattgattttaggggatttatttgtttcggttttttaaagtgttgtgattataggtatgagttattacgtttgatttggggttatttataagaagtttttaaggtagtagattattttttgatggttatatggagatttgggaaacgaattttcggttatgtttttggatatttgtttatttttatttgtgtttttttgggttttggtttttagagttatgtgggtgtttgatatatttagggttatagaatatgggaagggttttaggttaagagtttcggtattattcgagtttgttttggttcgtttttgttttaagtttttttgtttatttttagttgtggaggtagtttagagagtgtttggttttttggtttttttttttgttaggtttatttagtgtgatttaaatttttgtcgaggtttggtagttttttgcgggcgttcggatggtttttggttttggtgacggtgaggtttagttttttttagtttttagttttttcggaattttttgtttaatattttgtgtggtaattatgtttgttggttttatttagttttgtcggttattgttaagttgttattgttagttttagacgtttttatttttaatggaattatcgggaaataaaaagttgtagtatagttttttttttaggttagaatttttttttagtattttgggaggttaacgtgggagaattatttgggtttaggagttcgagattagtttgggtaataaagtgagatttcgtttttataaaaagttgaaaaattagttaggagtggtggcgaatatttgtgattttagttatttgggaggttgaggcgggaggattatttgagtttgggaggcggaggttgtagtgagttgtgatagcgttattgtattttagtatgggtgatagagcgagattttgttttaaaaaaaaaaaaaaaaaaaaaaaagaaaaaaagaaaagaaaagaaagaaaaaagaaaaagtggggagtaggttggggagtatggtgagggttatttattgtttgataatggtgggggataggaaggggattgagtgttttgagaggtagttgatttcgtttttttatttaaatattttttattttatagagaagttttgattttatttgttgttttttttagtaatgttttagtaaaagttttttatttgttatacgggtttaagttttcgtttattaagtatttaagtgttagataatttcggaggtaggtatttttattgtttttattgtatagatgaagaaattgaatttagggttatataagtgataaggggtggtagagatttgaagttgtgcgcggaggcgtggttagcgtgtgcgtttcgatttttaaatttttattttggatattgaagacgggaaagatcgagtcgtttattttatagatggggaaaagcgaggtttgaggagttttagagcgggtgttagatcgtagggagtagttagtatttcgggttttttttacgatataattacgtttttcggttatttttgggtttcgcgcgcgtttcggacgcggtaggatagttttaggacgtacggttattagggggtcgaagggaagggcgggggcggaggttcggagttgatttatcgtttcgtttcggaagtttcgaggtttcgtttcggcggtcgttagcggagggcgtggtttcgtcggcgttttcgtttcgttttcgttttcgtcgcgcgcgttttcgtcgcgcgcgttttcggttcgggttttagttttgttgagcgtaaggcggtggaggtttgaggtttgaggtttggggcggggtggcggtcgggttggttttggtttcgcgtttttttttgcggtcgtcgcgggtttcgcgggcggtatcggagtgtcgtgcggcgcgtggtcgcgtgatacgcgtatttgtcggagtgacgggttttgcggaagaggaggtgcggtttagggcgtaggggagttttcgggagcgggttcggtttttagcgtcgtttcggtcgtgtttcggaggagcggtttgcgtcgtcgcgcgagaggaagtaagcgtttttcgtcggtttcgtcgtcgtttcggtttcggcgtttttaattcgcgttgtcgtcgggttcgaggtcgcgtcgagtttcggagtttgcgttgttagttttacggagtttggggttggcggttttggaattgtttaggaggcggttaggttttttttagggtcgtttcgagcggtcgagttgttttttttttgggtttttcggaattgagttttaggagagggggaatttcgagatttttttcgggatttgtttaatttttggtattgattggttttcgggttttatatagcgtttttcgtattcggatttagtgaacggttttttaggggtaaatttttttggatttttgaaaattagtttatttaattttgaatgtttagttagaagtgagaatttttggaaagaagtgtttttgtttattttttttgtatttataataggtttatggtttatgaaaggtagtagatgagggaaaattggtgttaaatgggtatattttttattttatttttttatttttttatataaaagtaaaaaattttttatttataaaagatggggttttgtttggttgtttaggttggagtatagtggtataaatacggttttttgtagtttttattttttgggtttaggttatcgttttgttttagttttcggggtagttgggattataggcgtatattattacgtttggttaatttttaaattttttgtagagatagtggttttattatgttgttttggttggtttcgaatttttgggtttaagcgatttttttgtttaagttttacgaagtgttgggattataggtgtgaagtattacgtttagatagcgtattttaaattatgtattatatttttttaattttttattattatgattggaagattatgaaaagttgtttgagtttttttttggtatttttttgtggttgatggttagttgttgtttaagttggagtgtaatggcgcgatttcggtttattgtaattttttttttttggtttaagcgatttttttattttagttttttgagtggttgggattataggcgcgtgttattatattcggttaattttatgtattttttagtagaaatagggttttattatgttatttaggtttgttttgaattgttgattttaggtgatttattatttcggttttttaaagtgttgggattataggtatgaattatcgcgtttagttggttagttggttttaatagtagtttaagaagttagtaagaaggattttattcgtgaagttaatggtttaatgatagaaattaatatttttggtcgggtttagtggtttacgtttgtaattttaatattttcggaggttagggcgggtaggttatttgaagagtttaagattagttttgttaatatggtgaaatttcgtttttattaaaaatataaaaatttgttgggtatgggggtagcggatgtttgtaattttagttgttggggaggttaaggtaggaaaatcgtttgaatcgttttgttttcggtgacggaggttgtagtgaattaagatcgtgttattgtattttagtttgggtgataaagttagatttttttttaaaaaaaaaaaaaaaaaaaagtagttaggattttttgggtgtttattgtatgttaggtattgtgttaagtattttatatgttttttatcgatttgtttttttattttgtggttgaggtatagagaggttaaataatttgtttgagggtatatagttattgagtggtagggatttgaatttagaatatttttatgtaattagttttttaaaaattagtttttgaaggttttttacgttttaataaagtaattgaggtttatatatgatgtttttatgatgttagaaggaagaattgtgaaaggtaaagcggattcgggaggtagaggttggttatcgtagttagtgttcggaatagtttgattttatggagtagagaaatagtttgtttggtttaaattattgtttagtatttatattgatatagtgtaaatgtaatatagtgttttatattttgttatttagggatgtagttatattttacgggaaggttagttttgggattagattgtttgtatttaaattttattatttttagttgtttgatttttggtaagttatttgattttttttttttttttttttttttttttttttgagatggagttttgttttgttgtttaggggcgtaattttagtttattgtaacgttcgttttttaggtttaagtgattttgtttttttagttttttaagtagttgggattataggtatttgttattacgtttggttaatttttgtattgttagtagagacggggttttatcgtgttggttaggttggttttaaattttcgatttttaatgatttttttgttttagttttttaaagtgttgggattataggcgtaagttattgcgtttggttatgttatttgatttttttttgttttagttttttttttattttttgttaagatggggataattatgttatttattttatatggttgtggtaagatttaaatggtgtgatgtatgttatatcgatagtttagtatttggtatatagttaaatattttataaatagtttttttattattaaaagtgttgttttaagtagtaagttgttgttgtgtgttgtgttatagtgtttgaagttattattagaggtatatttttttgtgtcgtattttaaatgtagaaatgatagtggttttgtgtaaatgggatttatttgtttatttagtagatatttatagagcgttttttgtatgttaggttttgttttggatattggaggtattgcggagaataaaataaataaaagtttttgtttttattggtacgtatatttttgggaaaaggaatggtagataataggtaaaatgaatgtaattattatatagtatattagaaagcgatgtattgtggggagaaataaagtaggagaggaggatgggggtgggcggtttataattttagagtggtttgagtaagttttattgagaagatgatattttagtaaagaaaaattagtgagggagtaaattacgtggatttggtgggggatatgggggagttggttaggcggagagaataagtgtaaaggttttgaggtaggaggttgggcggttagagtttagataggtaggatggtaagagaagagattaaagaggtaatgggtgggaggttagaatgtgtagattttgtagatatttgtatagaggaatggtatgatttagttggagttataaaaaggttattttgattgtcgtgttgaggtttagttatagagggtttaggtagatagaggaggttaattaggaagtttttgtagtaatttagacggagatgacggtggttggtattggagtggagtggtggaaggtggtgagaagtagttgtattttagataaattttgaagatagaaattataggatttgttgatagatacgatgattttaaggtttttgggtttgaatatttggaaagatagagttgttatttattgataatggggaaagttatattggaagtagattgggagagaaattagtttagttttgtatatattaagtttggtaaatattttatttatgtttttagaatagtaattgattgtatgagtttggagtttaggggaagttcgggttgtaaataaagatttggacggataggtagttgtgtgttggtaatgtttattaattgattttgtgaggggtggggttggtagtggggaatttgatttatagtttttgtttatatttgtggtgtaaatattttgacgttggttaattttaaatatattataatagaatatttttattttatagatgtagtggatataaataatattaagagtatagatattagtgaaatgtagttagatgattaggaagtaatgagttttgagtatttattatttttttttttaatttaatggtttttttttttgagatagagttttattttgttatttaggttggagtgtagtggtgtaatttttgtttattgtagttttcgttttttgggtttaagtaattattttgttttagttttttaagtagttgggattataggtattcgttattatatttagttaatttttgtatttttagtagaaacgggtttttgttatgttgtttaggttggttttaattttttgggtttaagtagttttttcgttttagttttttaaagtgttgggattataggataggtgtttaaagatgggatgaggattttttgagatgagagaggaataaggattttagagttcgatttggaagtttttgtttttattttggtttttagggtagtgaatgtagattagaggttattgatagtaggtttgatttttatttgtattgatgggtttagtataaatggattagaataggaagattgtaaaaaatagataaaaaataataaaaataaaaattttgggttggttattgtaaaaagattaggtatattattttgtgttttagttttaaatgatttttagtttgaatttttgttttatttttatatgttttttttaaaaaattttaaatttatgggttatgatttgaagaaaattttttttttttttgtttggcgtatagaaggtaacgttaaaagttgggaaagggaatagggtagtagtagatattgatttttatttttcgttttttttttttattttttgtttgttgggtatagaggattagaattgtttttttttgtggtttattagaaaacgttttgcggttagagttttagtataggttgggtttgttgtgtcgggtttgtatggggatagttgtacgtttttttcgtttgtgtgagaataaaggtcggaatttggattttgatttaaattttttggtttttattttttgggatgttagtagagttttttaattggtaagttttttttaggatgattcgtaggagttttttaggattagagttggagatagtgaagggtgtttaggattgggtttacgtgtttgtagttcgttttggttttaagatgagttattagaagaaggttttttttatttttttataggatgtttttatagtattttgtttcgtagtgagtgtatttttggtaagtattttaaataagaattgtaaatgaaattgtattttttatatacgtaagttatagttttaagagtttttgttttaattgttgaatgacgtatagtttttagtttttggttttatattttagttttttgtttttttgtttggttgtagaggttaaggttcgaagtatttatttgttttatagaaaagtggagggtagttttcggataatagggtgcggattattttttttcggaaaataggatttagggatattaaaagattatatagattttttattttatttttttattttttcgatgaggaaattgaggtttagttaggttaaatgatttgtttaaggttatgtggttgtttagaggtagggcgtaggtaagagttattatatattcgggtttttagtgtaatgttttttttttttatagttgtttaaattttttattaaagatttttttattgatttgttaattttttgagtagaagtgattcgtagttggataagtttttggaaggttatttttatgttttttggttaattttaagtatgtaatttcggaaggtttattttatagtttattttttttagagtaggtaaggaggtagaggggagaagtgttttagaagaaaattttttgaagtagagtcgtgtagtatgaggaggaggtttggagtttaggagatgtgttggagtcgtgggtgtttttgttttagaggttggggtttttttgtttttgattttgatttaattgggtttttttgggtttgtttttttttttgttagggtagtagggaggatgattaagttagttttttttttgttgtttttagattagtcgggagtgttgagttaggaattagggttggttttttagtgttgtttgtagggtttggttttgtagttttaggagaggagggaggtttataatgttttttttgagagtaatggtatattatttttgggggttaggaggaattttgtatttaattaattaattaatatttgtatagtatttttgttaaatgtattattttagtttttattgtttttttttttatttttattttgggttgatggtatttgttttgttttgtagatgaagaaatgtggatgttaaggttttaattatttatttatttttatggaaaggtggagggtatttttttgatttaattagttgatttatttatttattttatttatttattttttttgagataggattttgttttgttattaggttggagtgtagtggtgcgattatggtttattgtagtttggatttttcgggtttaagtagtttttagttttttgagtagttgagattatagatatgtgttattacgtttagttagtttttaaatattttttgtagagatgggggtttcgttgtgttgtttaggttggtttggaagttttgggtttaagtgatttttttgttttggttttttagagtgtcgggattataggtatgagttattgtgtttggtttaattagttgatttaattagattacgaagttaggtagtggttttgagtttaggtttttggattttaatgttttttttttttgtttgataaaggaagttgtttagtatcgtgattgagggtttaggttttgtggtttgatagttttttttattttttagttttttcgtttgtagaatgagattttttatagaattttttttataagattgttgtgaggaatgattggaaaggtgcgtttaagttatttggtatacgtcgattatttggttaatataggtattattattggatttaggaataattagtttttataaggggatgggcgtatgaaattatttgagattgtttcgaaatatttgtgttaggatttattttatatttattggattagaatgtttttgttttgagaaagggagtaggaggcgaggatcgcgtgtttgttttgatgtttttttttgatgagaattgttgttttggtgttcgttgtttagtatttcggagttttattatttaaagtgtgtttttggattagttgttagtattttaggtttttttttttttgtattagaatgtttttttaaaaagatttttaggaaatttaaatgtttattaaagtttgagaaatattgtaaaggttaaaaaaatataaaaaaaaaaatatttatatatattatttttatttatttaggaaagagttgttttttagttgttttgtaattatagagtaagtaattatgttgtaatatttaatattttggatttgtttaaaggagtgttggtaatataatagataagggaggttaattttagaatcggggatttataataggattggttagggaggattgtggtaaattttagagttagaataggattaaagagagggttaggagttagtttaggttaggtggttattcgttatagttgtttgtagttttttggggtgggggtagaggtgttggtttttggggtttttttatttgtttatgttaggattttggaggtttagtttttttttttgtattaggtacgtttagagttttggttattaggattcgattagtagttttgaagcgtagtttgttagttggcggtttttttttttttaggttgttttttgggttttagattttttgttgttttttttttgtattgattttgtagtttttttttttttttagacgagcgattgtcggttgaggaaaaaacgtttgaagggttaaggatagggattggaaagtaggaggaaaaagtagaatggttttgtggttcgtgtgtgtatttaggggtgagggtagatatagggagagtgggagaggaaggttggggagttattcgtgtggttttgattttttagttaaagttttagtgatggacgcgtcgtgtgttttgtagatattggtttagatattgtggttgggtttttattttgggttggttttttattaggatttttttggagatggattttgagagagatgaggaagaggtagagggggtggtgggaggagggggtttgacgttagggttaagaggtagattggtgttttttgtatagggatggtggagaggttattgggttggttttgtggggatttttgtaagttatttttttaaattttaatttttttatttgtattattagattatggttttttaaagttgttaaagattttgttaattttttatttggtaaatgtttgatatataataggcgttaaattagttatttagttttttcgttattgtttttatttgtaggttgagttttatttttatcgtggatttttgattagtttttatgggtatgtcggtcgtgatgatttttttttttatttttttttttttttttttttaatattggttttggttggaagttagagagttagagagttgtggaggaagaatttagtgtaggaagttttataattttggttagaatagaagggtagaataaataaatatttggtgtgtttgtgatttattttaggtttttattttttatgtatgtgagtgttttagtttaggttgaatattagtttaggtggtttgtttatttgggagaggttgtagttattggtttagatattgttgttggtttttattttgggttggttatttattaggatttttttggatatgaattttgagagagatgaggaagaggcgggggcggtgggagggggggtttgacgttagggttaagaggtagatttggttttttttatagcggtgttggagaggttattgggtatgttatgtagtggttgtatagttagttttagtttttttgtttttttattttgggatttttattgatttgagttttagtttttttatttgtagaatgggaggattgttatagaattttatgtggtttttttaggatttttgtttggatttattgagttttaatatatataagtatttagtgttagtattaattatttgttggtattatttttttaggatgatatttattattcggtgtttaataggtgataggtataggttttagtttattataagtatgaattttttttatttttataataattttgtgttgtaggtatcgttattatttttattttaggtgagaaaattgaggtatagttaggttaaataattgtgtatttattaaggggttgagttgggatttaaatttaggtagttagtttggagtttatgttttttgttattatgttgtagtagttattagttattatttggtagttggagtttagtggatatggagaagaggtaagtgagaggaggtggttttgtttttttattgttttaattgtcgtttgaggatttgttattatatttaggttggggttgttttgtttgttcgggtgatttgtgtttttagaagagattggttttggttataaaatggatagttttatttttaggtttgcggttttttttggtggtttttgtcgtttttttatgtttttggtagtaaagtggtttatttttagtaagtggtttttaatttttttaggtagagtttttgtttatagggtaggttttttatttattgattttttggaatagaagttaagttgttaggagggagggataagttgtgggtttataatatttttttaagaaatacgtggtggttttttgttaggtaggaagtgtttgtttttatatcgtagttatttgaattatgtttgatttttttttgtttttcgtttgtttttttttgtattttagg

SEQ ID NO: 748 - DNA, 15122 bp, Artificial Sequence
  chemically treated genomic DNA (Homo sapiens)
tttggggtgtaaagagagatagacgaggaataaggaaggattagatatggtttaggtggttacgatgtggaaataaatattttttgtttggtaagaaattattacgtgttttttaagaaaatgttataagtttatagtttgttttttttttttgatagtttggtttttgttttaggaagttagtgggtagggagtttgttttgtagatagggattttgtttgggaaagttagagattatttgttagagatgaattattttgttgttaggagtataggaaagcggtaaaggttattagggagggtcgtaggtttgggagtggagttgtttattttatgattaaggttagttttttttaggagtataggttattcggataagtagggtagttttagtttaggtatagtggtaggtttttaggcgatagttggaatagtgagagggtaggattatttttttttatttgttttttttttatgtttattgggttttaattattaagtgatgattaataattgttatagtatagtgatagaaaatatggattttagattaattgtttgagtttgaattttagtttaattttttagtaagtgtataattatttaatttggttgtattttagtttttttatttgaaatgggggtaatagcggtatttatagtatagagttgttataaggataaaaggagtttatgtttataatgagttgaggtttgtatttattatttattaagtatcgagtggtaggtgttattttggaagagtgatattagtaaatgattagtgttggtattaagtatttatgtgtattagagtttaatgaatttagataagaattttgaaagaattatatggggttttgtgatagtttttttattttgtaaatggaaaagttgaggtttaggttaatgaaggttttagggtaagaaagtaggggagttgggattgattgtgtagttattgtatgatatgtttaatgatttttttagtatcgttatagaggggattaaatttgttttttgattttgacgttagatttttttttttatcgttttcgttttttttttattttttttaaaatttatgtttaagagggttttagtgagtgattaatttaaggtgaggattaataatagtgtttgggttagtggttataattttttttaggtaagtaaattatttgggttagtgtttagtttaaattgaggtatttatatgtatgagaagtagaggtttaaggtgggttataaatatattaagtatttgtttgttttgtttttttgttttaattaaggttgtagggttttttgtattgaattttttttttatagttttttggttttttagtttttaattaaggttagtgttggagggaaaggaagaaggaagtgagggggaaagttattacggtcggtatgtttatgggaattagttagaaatttacggtggaaatggggtttagtttgtaggtgggagtagtgacgaaggaattgaatggttgatttagcgtttattatatgttaggtatttattaggtaaaggattaataaaatttttaataattttaggaagttataatttggtaatataaatggagaagttgaggtttaaagagataatttataaaagtttttatagaattagtttaatgatttttttattatttttatatagagggtattaatttgttttttgattttgacgttagattttttttttttattattttttttgttttttttttattttttttaagatttatttttaagagggttttagtgagggattaatttaaggtgaggatttaattatagtgtttgagttagtgtttataggatatacgacgcgtttattattggagttttaattagaggattagggttatacgggtggttttttagttttttttttttattttttttgtatttgtttttatttttaaatatatatacggattataggattattttgttttttttttttgttttttagtttttgtttttggttttttaagcgttttttttttaatcggtaatcgttcgtttggagagaaggagaagttgtaaggttagtgtaggagagaggtagtaagaaatttgaagtttagagaatagtttggagaaggaggagtcgttagttggtaggttgcgttttagagttgttgatcggattttggtagttagggttttggacgtgtttggtataaagggaggagttaagtttttagagttttggtatgggtaggtgggggagttttaagggttagtatttttgtttttattttagaagattgtagatagttgtgacggatggttatttggtttgaattgatttttggttttttttttaattttgttttgattttgaggtttgttatagttttttttgattagttttgttgtgggttttcggttttgaggttggttttttttatttgttatgttgttagtatttttttaaataaatttaagatattgggtattataatatgattgtttattttgtggttgtaaaataattaaaaaataatttttttttaaatgggtgggggtagtatgtgtgggtatttttttttttatgtttttttaatttttatagtgttttttaaattttaatgagtatttgaattttttggggatttttttaaaaggatattttgatgtagaaggaagaggatttgaagtgttgatagttggtttaagagtatattttgagtagtgagatttcggaatattgagtagcgagtattagagtagtagtttttattaaaggagggtattagaataaatacgcggttttcgttttttgtttttttttttaagatagagatattttgatttagtaggtgtagggtgggttttaatataggtgtttcgaaatagttttaaatggttttatgcgtttatttttttgtaaaaattggttgtttttgaatttaataataatatttatgttaattaagtagtcggcgtgtgttagatgatttaaacgtatttttttaattattttttataatagttttgtggaggaggttttgtgaggagttttattttatagacgaggaaattgggaggtgaaggaaattgttaagttataaagtttggatttttagttacgatgttaaatagttttttttgttaagtagaagaaggaagtattggggtttaaggatttgggtttaagattattgtttaatttcgtgatttaattaagttagttaattaggttaggtatagtggtttatgtttataatttcggtattttgggaggttaaggtaggaggattatttgagtttaggatttttagattagtttgggtaatatagcgagatttttatttttataaaaaatatttaaaaattagttgggcgtggtggtatatgtttgtagttttagttatttaggaggttgaggattgtttgagttcgagaggtttaggttgtagtgagttatgatcgtattattgtattttagtttggtgatagagtaagattttgttttaaaaaaagtaaataaataaaataaataaataaattagttaattaaattagggagatgttttttatttttttataagggtgggtaggtgattagagttttagtatttatatttttttatttataaaatagggtaaatattattaatttaaggtgggggtggggggaggggtagtgaagattgagatgatatatttgataaaaatgttatataaatgttaattaattaattaaatgtaaagttttttttggtttttaagggtagtatattattgtttttaggaaaaatattgtgaatttttttttttttttggggttatagagttaggttttgtagatagtattggagaattaattttggtttttaatttaatattttcgattagtttggaagtagtaggaggaaggttggtttggttattttttttgttgttttgatagggaaagaagtaggtttagagaagtttagttaagttaaagttagggatagggggattttagtttttggagtagaggtatttacggttttaatatattttttgggttttaagttttttttttatgttgtacggttttgttttagaaggtttttttttgaagtattttttttttttgtttttttgtttgttttgagaggaatgggttgtgaaataaatttttcgaaattatatatttgaagttagttaaagagtatggaagtagttttttaaaagtttatttaattacgaattatttttgtttaaaaaattaataaattaatgagaaaatttttagtgaaaagtttgagtagttgtaaggggagggggtattatattgggaattcgaatgtgtggtggtttttgtttgcgttttgtttttaaataattatataattttaaataagttatttagtttggttgggttttagtttttttatcgaggaaatgggagggtgagataaaggatttgtgtgattttttagtgtttttaagttttgtttttcgaggaaaggtgattcgtattttattattcgggaattgttttttatttttttataaggtaaatgagtgtttcgagttttgatttttgtagttaggtagggaaatagagaattaaaatatgaagttaagagttgagaattgtgcgttatttagtagttaagataaaaatttttgaagttatgatttacgtgtgtggaggatgtaattttatttataatttttatttaagatatttgttagaaatatatttattacgaaataaaatgttgtgggggtattttgtagggaggtggaaaaggtttttttttgatggtttattttagagttagggcggattgtaggtacgtgaatttagttttgggtattttttattgtttttaattttaattttgagaggtttttacgagttattttgggagagatttattagttaaaaggttttgttaatattttagaaggtgggggttagggggtttggattagaatttaggtttcggtttttgtttttatataagcggaagaggcgtgtagttgtttttatatagattcggtatagtagatttagtttgtgttgaagttttagtcgtagagcgttttttggtaaattataggaggaagtagttttaattttttatgtttagtagataaggggtgggagagaggagcgggaggtaaaggttaatgtttgttgttgttttgtttttttttttagtttttgacgttattttttgtgcgttaggtaggaggaagggaaattttttttaaattatgatttatgagtttggaattttttaaaaagaatatgtgggagtaaaataaaagtttaaattaaagattatttgaaattaaagtataaggtgatgtgtttagtttttttataatagttaatttaaggtttttgtttttgttgttttttgtttgttttttgtaatttttttgttttggtttatttatgttgaatttattaatgtagataaaaattaagtttgttattaatgatttttgatttgtatttattgttttaagggttagaatggggataaaagtttttagatcgggttttggggtttttgttttttttttattttagagaatttttattttatttttaggtatttgttttgtaattttagtattttgggagattgagacgggaggattatttgagtttaggagattgagattagtttgggtaatatggtaaaaattcgtttttattaaaaatataaaagttagttgggtgtggtggcgggtgtttgtaattttagttatttgggaggttgaggtagaataattgtttgaatttaggaggcggaggttgtagtgagtagagattgtattattgtattttagtttgggtgatagagtgagattttgttttaaaaaaaaaaattattaaattaaaaagaaaggtaataaatatttaaaatttattattttttaattatttgattatattttattaatatttatgtttttgatattatttatatttattgtatttatgaggtgaagatattttattatagtgtatttgaagttggttaacgttagaatatttatattatagatataggtaaaggttataaattaggttttttattattaattttattttttatagagttagttggtaaatattattagtatataattgtttattcgtttaagtttttatttatagttcgaattttttttaaattttagatttatgtagttaattgttattttgagagtatgagtgggatgtttgttagatttaatatgtataaaattgaattgattttttttttaatttgtttttaatgtagttttttttattattagtaaatgataattttatttttttaggtgtttagatttagaaattttgaggttatcgtatttgttagtaaattttgtagtttttatttttaaaatttatttagaatataattgttttttattattttttattattttattttagtgttagttatcgttattttcgtttggattattataggaattttttaattggttttttttgtttatttggattttttatggttgagttttaatacggtagttagagtgatttttttatagttttagttggattatgttatttttttgtgtagatgtttgtagagtttatatattttggttttttatttattatttttttgatttttttttttattattttgtttgtttaggttttggtcgtttagttttttgttttagggtttttgtatttgtttttttcgtttggttaatttttttatgttttttattaggtttacgtggtttatttttttattaatttttttttgttaaaatgttatttttttagtgaggtttatttagattattttaaaattgtaaatcgtttatttttattttttttttttgttttatttttttttatagtatatcgttttttaatatattgtatgataattatatttattttgtttattgtttgttatttttttttttaagagtgtgcgtgttaatgaggatagggatttttgtttgttttgtttttcgtagtatttttagtatttaaaataaggtttggtatatagaaggcgttttataaatatttgttaaatgaataaataaattttatttgtataggattattgttatttttgtatttgaaatacggtataaaggaatatatttttaatggtgattttaagtattgtgatatagtatatagtagtagtttattatttggaataatatttttaataataaaagagttatttatggagtatttaattatatgttaaatgttaggttatcggtgtgatatgtattatattatttaaattttgttataattatatgaggtaggtaatatgattatttttattttagtagggagtagagaggaaattaaggtaaagagaagttaaataatatggttaggcgtagtggtttacgtttataattttagtattttgggaggttgaggtaggaggattattggaggtcgggagtttaaaattagtttggttaatacggtgaaatttcgtttttattaataatataaaaattagttaggcgtggtggtaggtgtttgtaattttagttatttgggaggttgagggagtagaattatttgaatttaggaggcgaacgttgtagtgagttgagattgcgtttttgggtaatagagtaagattttattttaaaaaaaaaaaaaaaaaaaaaaaaaagagaagttaaataatttattaaaggttaagtagttagaggtgataggatttgaatataggtagtttggttttagagttaattttttcgtaaaatgtgattatatttttgaatggtaaaatgtaaaatattgtattatatttatattgtattagtgtagatattgaatagtggtttaaattagataggttgtttttttgttttatgaagttaagttgtttcgaatattaattgcggtaattagtttttgtttttcgggttcgttttgttttttatagtttttttttttgatattatgaagatattatgtataagttttagttgttttgttgaaacgtggaagatttttaagggttagtttttggagaattggttatataagaatattttggatttaaatttttgttatttagtaattatgtatttttagataagttatttaatttttttgtattttaattatagaatgggaaaataaatcgatgggaagtatgtaaggtatttagtataatgtttggtatatagtaagtatttaagaaattttagttgtttttttttttttttttttttaaggagaagtttagttttgttatttaggttggagtgtagtggtacgattttggtttattgtaattttcgttatcggaggtagggcggtttaagcgatttttttgttttagtttttttagtagttgggattataggtattcgttgtttttatgtttagtaaatttttgtatttttagtagagacggggttttattatgttggtaaggttggttttgaattttttaagtgatttgttcgttttggttttcgaaagtgttgggattataggcgtgagttattgggttcggttagaaatgttagtttttattattaaattattagttttacgaatgaagttttttttgttagttttttgaattgttgttaaaattaattaattagttgggcgcggtggtttatgtttgtaattttagtattttgggaggtcgaggtggtggattatttgaggttagtagtttaagataagtttggataatatagtgaaattttgtttttattaaaaaatatataaaattagtcgggtgtggtggtacgcgtttgtaattttagttatttaggaggttgaggtggaagaatcgtttgaattaggaggagaaggttgtagtgggtcgagatcgcgttattgtattttagtttgggtaataattaattattaattatagaaaaatgttaaggaaaaatttagatagttttttatgattttttaattataatgatgaaaaattaaagggatatgatgtataatttaaaatacgttgtttgggcgtggtgttttatatttgtaattttaatatttcgtaaggtttaagtaggaggatcgtttgagtttaggagttcgagattagttagggtaatatagtgagattattgtttttataaaaggtttaaaaattagttaggcgtggtggtgtgcgtttgtggttttagttatttcggaggttgaggtaggacgatggtttgagtttaagaggtggaggttgtagggaatcgtgtttgtgttattgtattttagtttgggtaattaagtaagattttattttttataagtaaaagattttttatttttatataaaaaagtaaaaagataaaataaaaaatatgtttatttgatattagtttttttttatttgttgttttttatgagttatgggtttgttgtgggtgtagggggagtgggtaaggatatttttttttagaagtttttatttttggttaagtatttaaggttgggtgagttgatttttagagatttagagaggtttgtttttggaaaatcgtttattagattcgggtacgggaaacgttatgtgaaattcgagggttaattaatgttaaagattaagtaggtttcgggggaaatttcggagtttttttttttttggaatttagtttcgggaagtttagggaaaggatagttcggtcgttcggggcgattttggagggagtttggtcgttttttgagtagttttaaagtcgttagttttaggtttcgtggggttggtagcgtaggtttcggggttcggcgcggtttcgggttcggcggtagcgcgggttggaggcgtcggggtcggggcggcggcggggtcggcggggggcgtttattttttttcgcgcggcggcgtaggtcgttttttcgggatacggtcggggcggcgttgagggtcgggttcgttttcgagggtttttttgcgttttgggtcgtattttttttttcgtagggttcgttatttcgataagtgcgcgtgttacgcggttacgcgtcgtacgatatttcgatatcgttcgcggagttcgcggcggtcgtaggggaaggcgcgaggttaaggttagttcggtcgttatttcgttttaggttttaggttttaggtttttatcgttttgcgtttagtaagattggggttcgggtcgggggcgcgcgcggcgggggcgcgcgcggcgggggcgggggcggggcgggggcgtcggcgaggttacgtttttcgttggcggtcgtcggggcggggtttcggagttttcggggcgaggcggtgggttagtttcgagttttcgttttcgttttttttttcggttttttggtggtcgtgcgttttagagttgttttgtcgcgttcgagacgcgcgcgggatttagaagtggtcgagggacgtggttgtgtcgtggaggggattcggggtgttggttgttttttacgatttggtattcgttttgggattttttaggtttcgtttttttttatttgtagaatgagcggttcggtttttttcgtttttaatatttagagtagggatttagaagtcggagcgtatacgttggttacgttttcgcgtatagttttagatttttgttattttttattatttgtgtgattttgagtttagtttttttatttgtatagtggggataatgggagtatttgttttcggggttgtttggtatttgggtgtttagtaagcggaagtttggattcgtgtggtaaatagaagatttttgttaagatattgttaagaaagatagtaaatggaattagggtttttttgtagggtgagaggtatttaagtgagaaaacgggattagttgttttttagagtatttagttttttttttgttttttattattattaggtagtaggtggtttttattatgttttttaatttgttttttattttttttttttttttttttttttttttttttttttttttttttttttttttttttttttgagatagggtttcgttttgttatttatgttggagtgtagtggcgttattatagtttattgtagttttcgttttttaggtttaagtgattttttcgttttagttttttaagtaattgggattatagatgttcgttattatttttgattaattttttaattttttgtagagacggggttttattttgttgtttaggttggtttcgaatttttgggtttaagtgatttttttacgttggttttttaaagtgttgggaggagattttgatttgagagagaaattgtgttgtagttttttatttttcgatggttttattagaggtgggagcgtttggaattagtagtggtaatttggtagtggtcggtaggattgaatggggttaataggtatgattattatataggatgttaggtaaggggtttcgggaaggttgggaattgaggggagttgggttttatcgttattaaggttagaggttattcgggcgttcgtagagggttgttaagtttcggtaaggatttaggttatattgagtgggtttggtagaggggggagttagggagttaggtattttttgggttatttttatagttggaagtgagtaggagggtttagggtaggagcgggttagagtagattcgaatgatgtcgggatttttggtttagagttttttttatgttttgtggttttgagtgtgttaggtatttatatagttttgaaaattagggtttaggaaggtatagatagaagtgggtaggtgtttagaggtatgatcgggggttcgttttttagatttttatgtggttattagagggtgatttgttattttgagggttttttataaatagttttaggttaggcgtagtggtttatgtttgtaattatagtattttgggaggtcgaggtaggtggattttttgaggttagtagttcgagattagtttggttaatatgatgaaattttatttttattaataatataaaaaaaaaaaaaaaagttaagcgtggtggcgtgtttgtagttttagttatttagatggttgaggtacgagaatcgtttgaatttaggatgtagaggttgtagtgagttaagatcgcgttattgtattttagttagggtaatagggtgaaattgtgttaaaaaaaaaaaaaaaaaaagttaggtacggtggtttacgtttgtaattttagtattttgagaggtcgaggcgggtggattatttgaggtcgggagttcgagattagtttgattaatatggtgaaattatgtttttattaaaattataaaattagttgggtgtggtggcgtatgtttgtaattttagttattcgggaggttgaggtaggagaatagtttgaatttgggaggtggaggttgcggggagttgagatcgcgttattgtattttagtttgggtaataagagtgaaattcggttttaaaaaaaaaaaaaaagaaaaaaaaataaagttttaaattaagttagttgtaatttgtttattaagaaaacgtttatttgattaggtaacgttggggtggggtttgaggggggaattagtttagggggttataatgtttttttaattttatgtttatttttatattattttgagatgttttattttttcgtttgtttttttttattttatttttattttagttttattttgtttttgtattttttagttttttttgggtaattagttgttttgttttttttttattatgaagacgattaggtcgtgttaagatttagttattttggtgtgagagtattgttatttaaaatataaaaatcgaaaattttgtttttgtgggttttggtattggtttttgtatttttgtttgtttgaagttttttttgttttcgtgttgatcgtagttataagggattaggtgtgtttagaatttcgtgaaggaagtcgggagaatgaaggaagtcgggagaaaggaatgatgttttatgggtggtttagggggtgttttgtgattagaattttgtttgtggtttatttcgtgttttataaggagcgttttggggttttatttatgaagtggatttttggggatttttttttttagttttttaattgtggtgtaggtagaagttagggtgaatttagtttgttttatagataaggaaagtgagatttagagagatgaatgatttatagagatgtttgtggagttagaaataaaattttattgtagtttttatttttaggtgttattttttaaggtagttttgttggtttcgttttgtttttcgtaggaggtggggagggagggaaataggtagagattttttagttacgagtagatttttttatttttagatataaggagtttttttttaaaaatttttattttattttttgagacggaattttattttgttatttaggttggagtgtagtggtacgattatagtttattgtagttttaattttttggtttaagtgattttttcgttttagttttttgagtatttgaaattataggtgtacgttattatgtttggttaatttttttttttttttttttttttttttgtagagttaagtttttattatgttgtttagattggtttttaatttttaggtttaaggtatttttttatttcggttttttaaagtgtaaggattataggtatgagttattgtaatagattttttttattttttaagattagttttttaaagtttatataaagtagttatgtaatggtttttattgttgttataataatatattattatttagtggtttaaataatttaaatttattattttatagttttggaggttagaatttagtttttattaggttaaaataatgggttagtataaatttttatttggaggagttatttttggttaaggtataatttagtattttgtggttttaggacggaaattttcgtttttttgttggttttagttgaagggtatttttagtttttagagggtattatattttttggtttgtggttttttttttttatttttaaagttagtaatgggagatttagtgattttttttttttttgtgttttttttagggttatttcgttgatttagttggggaaggttttttgcgttttttttttttgttttttttttttttttgagatagagtttcgttttgtcgttcgggttagagtgtagtggcgtgatttcggtttattgtaattttcgtttttcgagtttatgttatttttttgttttagtttttcgagtagttgggattataggcgttcgttattacgtttggttaattttttgtatttttagtagagatggggttttatcgtgttagttaggttggtttcgattttttgatttcgtgatttatttatattggttttttaaagtgttgggattataggcgtgagttattacgtttggtcgggtttttgtttttaaaaatttatgtgagttaggtttggtggtttatatttataattttagtattttgggagattaaagcgggtagattatttgaggttaggagtttgagattagtttgattaatatggtgaaatttcgtttgtattaaaaaaataaaaataagtcgggcgtggtggtgggtatttataattttagttattcgggaggttgaggtaggagaattgtttaaatttaggaggtagaggttgtagtgagttaagattgtgttattgtattttagttatttgggaggttgatacggtagaatagtttgaatttgggaggtagaggttgtagtgagttgagatgatattattgtattttagtttgggtgacggagtgagatttcgttttaaaaataaaaaatttttatgattagattgggcgtatttatataatttaggataatttttttatattagggtgtatatatttaattatattttgtaaagttttttttgttataaggtaatagatattagtttaggtatcggggttcgtttttttgttgttgttttgttttgtttttttgaaatagagttttatttggttatttaggttggagtgtagtggtataattatgtattcgtgatttcgtgtttaaatagtttttttgttttagtttttttagtagtcgagattatagatatatatttgatttgttttttgtagtgataaagttttattttgttgtt

SEQ ID NO: 749 - DNA, 6782 bp, Artificial Sequence
  chemically treated genomic DNA (Homo sapiens)
tttagtagttatttgttgtttaatgaatgaatgtggatggatggagggagtttgggaagaaaatatttgttttttttaggaggttttttttagtttattaagatatattttgtatttattttgtaagtttttagaaggaagggttttagttatttttgttattggtattttttaggtttgtagtaggttgggttaatggagggaaggaggggtgatagttaagaatttttttaatggaaaatttaatttgtttagtaggagtttgatgagaagttgggggttggtttggggaggatgtagttggaggggttgtttatttggatttcgtaggtttttggatgttgatacgttatttttagttatttttttttttgtttttatttttttgtaattaggttttttttgaatttgcgattgaaggtttttttattttttttttttaaagtaatgattttttatatagtaattttttttttttttagattttttaaagttggtgggtggttttttttgtgtttagatattttgtaaattgttttttatttagttttttttttgaatgtttttgtggttggtggagatttatgatgtgtgttgggtatttggtttttatttttttgtttataataatttttttgttaatgatatttttttagtaatatttaatatgagtatatttttcgtttattttttttttattttatgtgttttgaattttgttggattaatttagttggagttttaagaggtagtaaaatcgagggtaggtggttaagttttaatttttggtttttgcgttataattataattatttttattgatatagtgtttcgtggttaataagtatttttatattttatagttttttagtttttagaatagtagaagttaaggtttttggggtttggtgatatttttagtattatatgtataagaggaaaggtttggatttgaatttttttttttgatgttaaattttttattattttttttagtttaggtaaagattttaaagttaaatgtttttaggggttaggtagatagtataaatgaaattgtttggagtagaatatattaaggattagtaaggattgtgggaaattggtcggtatgttttgtttaaaggtattaaaatgtaaaatagagtttagtatttatagttttagtaatttaggaggttgaagttggaggattatttgagtttgggagtggtgaggttagtttgggtaatatagtaagattttgttttttaaaaaatatataaaaaaaaagaaagaaaaaaagaaatatttaaaaaataataggaaaaaatttatttaatttattttttatttagtgtttagtttataatttatttttttgttgggaaagggagaacgtttgtatggtgttttttttattattgagtagtatttatttgatggtttgggtaagtatgattttggttgtagtaagtttatagtatagatgattttgttgtttttagattttgttgtttttagaatagaattatagtttttagaatagtataatggatttaggtatgtatagattttgagtttatttattatttttttttttttagagtttttaagatatggtatttaaagtaatattattttaatgtttgtgtaagttttagatgtttttatttataattttggttaaaggttttattttttttttacgtttttttttttttttttattttatttgaaattatgggaattggttgtttaagtttatatgttaagtgatagtgatagtggtagagtagtaggtagagtttttaaatagattttaattttattttttgttttagggtagggatgtggagaaaagagagaggaaaggatggtttatgtttttaagtagagtaattcggtttattaggaataggtggtttagtgaaggttatgggttttggttaattagataaaaattttttttttgagggttttaggaaggtggtaggttaaggtggggttagtatgggaatgaggattgacgtatattttttattttaaatagaatagtagttaagattgtggttttagagagtatatatttgttatttaattattttgtgattttgggttggttatttaatttttattttttagtatttttttttatagaatatgggtaattgtaggggtgatgcggattagttgagataggtatgtattttggtaagtaaatgtgagttatttttgttgttttgaattttgtttttttgttatatttttgagttatttattgtagttagaaattgaggaagtttttaaatgttggtagaaagaatatggagagaataatttatagaataaaagataattttttgttaattttttttttttaaaatttgttatttatttaaatgttttgattttattttttttttttagttttatatttttaagatgattttagtgagttggaatttcggtcgagggatttgagatttggttagatgagatttggcgtttagatgtgttttttgtgaagtataattatgatttttttttaaataattatttaaatttaatttttagttaagattttttttaagtagtgtttttttttgtgtttatgtggttttttgtgagatagataatttaaaaaatttaaaaattgttttattatttaaatataatattgttgtgtgttttttttttttttttagtttttggagtttatttttttttgtatgttttatatatattaatgataaatagtttatagtagatattgtttaggtatggaattagtttttttttgttttgttttgtttgtttgttttgagatggagttttgttgtgtcgtttaggttggagtgtaatggtacgatttcggtttattgtaatttttgttttttaggtttaagcgattttttcgttttagttttttgagtagttgggattataggtatttattattatgttcggttatttttttgtatttttagtagagatagggttttattacgttggttaggttggttttgaatttttgatttcgtgatttatttattttagttttttaaagtgttaggattaaaggcgtgagttattgtgtttggttagaattaggtttttataaatgtgaagtattagatttttattaatcggtaaaagtagaattgaggaattatattatatgtttataaattgatttttttttagtttttatttttatgatgtttttgttgagattagttgatagagtaggagtgttagtatggaaaaagtatggattattttgaaatatggattatttattaattatatgtgttttagaatggagttagtgatatatttttggagatgattttttttattttttatttttttttttttttttttttttatatttgtagttattttttgttagcgaaatttagaagaaaaatttgatagaagtaaagggtatttagagaattatgatttttaggttgtagttttagttttgttatgttttaagcggttattttttttttgggttttaggttttttatgtataagataagtaggagattggggttataatatttgagattaaaggaattttaagtttttattattttacggattttatttttgttagtttgggatttggtaggttttagtagttggttatgtagttaatttttaaagtagataaatgtttgtaggataattgtgaattgattttaattatagtagagtttagttgttttaatagatgttggtgtttttggttgtttttcggagttattagttaatttagagttgaagttggttggaaaagtagatatgttggagaggttagtattatttttaaatatagtatttgggaaatatttatgtttttagaaagaggttattgaaattttttatttggtggtgtagtgtagagatttaggaaaattaggttttgagttttgattttgttatttatattagcggtgtgattttgggtaaattttttggttttatgttattttttttttttatataatgagggtagaaatagagttattttgtagaagtatagtaaggattaaggttttaggaggtttaatagtatttattaagtagaggtttttagaggtatttaataaatggtagtagtagttattattttgtgttttttgtttataggagttttttataggggtgttggttttagtgtttttttttatggttaggttgtattggtttatgtttaaggcgtagttttgttagggagtttggtatagagatgttgttgattgggatgttgattaaattttttgattgaggagttttagtattttggtttagagtaggagggttagtaatatttagtataatttgtttggatttttaattaaattgtttttttaaattgttttttttaaggttttgttttttttttttatttttttttggttttttttttttgggtttttgttagagaagggaaataaagttttgtggggttttatttgtttttttttatttagaagaaggtgataaggttgttttcgttgtagaagatgtggttaaaataagttttggttatttaaggtggttgtagttttattttggaggttaaagtttttgcgtattttaggttgatttttgtttttttggtaaaattgagtttttaatttaaatttgttttttttttttattttttatttcgatagttcgtaagtgttttgttgggaaggaggattaagtgttatttagtgtatttttttatttttttgtgtttatttggtaaaaagaaaataaaataaaataaaggaggtttaggattgaattgttattattttttaaatggagagagaaggggttatatgattgcgagtaattgatttagttaagtggttgtaatttcgagtttgttgtagagtcgttttttttcggcgggggcgttgacgttacggaaaagtttcgcggcgggtcggttgggttggttataaatcgttcggtcgcggcggttgtaggcggcgggtaaggacggcgggtatagcgtagtatttttcgttcgttggttcgggtattttagcgcggatttacgcgatacgttgacgtttcgacgtcgattcggtcgagttaagtaagggggacggttcgagacggagaagggagagagtgggagttttttagttcgtagaattttcgaagttgagaagagaatttttggaacgtgcgtttagtattgggattttttggtaggggttagagttttaagtgtaaaggatgtcgttttttattagtaggttttttagtttaattcggtagaagggttatttttttttatagatcgagtggttagagagggtagtttttaatgatgttttatgtatttgttgtttgaatgtaagtttgttaattgaggtgttgtttttgagattaaaaaatcggttggtcgttttggttagtggcgagatgttggggtacggagtgtgggggtgagggtgggagaggagtgtttgtgtattttgttgattgtaacgtaagtatttatattttgttattagtagtcggaaaaatagatttttcggttaggggaggtagtttgtaaagggaaagttgtagagaagttgttgaatattatttaggggagtttttagttttttgatttgttttaagaaggggatttgagaatggtggtttaggtttgtgattttagtattttcggaagtcgaggtcggaggattatttgattttaggagttcgagattagtttgggtaatttagtgagattattgtttttattaaaaaataaaaataaaaataaaaaaattagtggacgtggtagtgtaggtttgtagttttagttatttgggaggttgaagtggaggattttttgagtttggtagttggaggttagttatagtgagttatgatcgtgttattgtattttagtttgggtgatagagtaagattttgatttaaaaaaggaatttgagttgaattaaagaatttttgagaatggatgtggttttttaagaatgaggtattttttttgtaaattttataggtttgaatatgagtaggttatttttttgttagggtgtttaggtttggagtcgggatgttttaaaagtggtatttgtgggtaagagggtatagttgaggtataaattttaaatagaaaattttttttttatttttaataatggtaggtggatgttttttaggtagttggagagtattaaggtaattttattaaatatggaagttttaataagtgtttgtttagtttagttagggttgtagtgggtaggggaggggagggtgatgttattgttacgtgttttttattgaggtataaaatttgttggatattggtgtaattaagagttaagtttagataagagtagttaatttgattagttggtttttagtaatattaatttgttgttttttaagttatttttggagtttgttggttttttttagttgtttttgtgttagttttgagtgtagttttttttttatttaagtttgttttgaggaagggggaagtttatgggtagtgggtgatgttaatcgtatttgtttttttatgtaaatgatagtttgtttgaggagttggttattgatagtgtgggtagtatgtgtgtgtttagttgaaagtttgttttgttggggtttgggggattgtttaattggtggtttttatgttagggatatttgttttttattttatttaataaaatattattgatgattgattatgtatttgagcggagtttttatttatgtttattaatgttgttattttggttgttttgttttttagg

SEQ ID NO: 750 - DNA, 6782 bp, Artificial Sequence
  chemically treated genomic DNA (Homo sapiens)
tttggggagtaaagtagttaagatggtagtattagtaagtatgagtgagagtttcgtttaaatatatggttagttattagtaatattttattagatgagatgagaagtaagtatttttaatataaagattattaattaaatagttttttaaattttaataagataggtttttaattggatatatatatgttgtttatattgttagtaattagttttttaggtagattattatttgtatgggaaaataaatacggttaatattatttattgtttatgggttttttttttttttaaagtagatttggatgaaagaagagttgtatttagagttggtataaaggtagttggaaagaattagtagattttaaagatggtttgaaaagtaataagttaatgttgttggggattagttggttaggttagttgtttttgtttaaatttggtttttaattgtattagtgtttagtaggttttgtgttttagtgggaaatacgtggtaatgatattattttttttttttttgtttattgtaattttggttggattggataggtatttattggaatttttatgtttagtaaagttgttttgatgttttttagttgtttggagagtatttatttgttattattgggggtaggggggaaattttttgtttaaagtttatgttttagttgtgtttttttatttatagatattatttttaaaatatttcggttttaaatttagatattttggtagagaaatgatttgtttatgtttagatttatgaaatttgtagagaaagtgttttatttttaaaaaattatatttatttttaagagttttttaatttaatttagattttttttttgagttagggttttgttttgttatttaggttggagtgtagtggtacgattatagtttattgtagttagtttttaattgttaggtttaagagattttttattttagttttttaagtagttgggattatagatttgtattattacgtttattagtttttttatttttatttttattttttggtagagatagtggttttattaggttgtttaggttggtttcgaatttttggggttaagtgatttttcggtttcggttttcgaaagtgttgagattataggtttgagttattatttttagattttttttttgaagtaaattagaaggttgaagatttttttaaatgatatttaataatttttttataattttttttttgtagattgttttttttagtcgggaggtttgttttttcggttattggtgataaagtataagtatttacgttgtaattagtaagatgtataaatattttttttttatttttatttttatatttcgtattttaatatttcgttattaattaggacgattagtcggttttttagttttaaaagtagtattttagttggtagatttatatttaaataataaatatataaagtattattaagggttgttttttttgattattcgatttgtagagggaggtgatttttttatcgaattgaattaaggaatttgttgatgagaagcgatattttttgtatttgaagttttgatttttattagaaaattttagtgttgagcgtacgttttaggggttttttttttaatttcgaaagttttgcgggttgggaaatttttattttttttttttttcgtttcgggtcgttttttttatttggttcggtcggatcggcgtcggggcgttagcgtatcgcgtgggttcgcgttgggatattcgggttaacgagcggggagtgttgcgttgtgttcgtcgtttttgttcgtcgtttgtagtcgtcgcggtcgggcggtttataattagtttagtcgattcgtcgcggggttttttcgtgacgttagcgttttcgtcgggagggggcggttttgtagtaaattcggagttgtagttatttggttaaattagttattcgtagttatgtgattttttttttttttatttaaaaaataatgatagtttaattttgggttttttttattttgttttattttttttttattagatgaatataggaaaatggaaaaatatattaagtgatatttaatttttttttttagtaaagtatttgcgagttgtcgggataaaggatggaagggagaggtaggtttgagttgagaatttagttttgttaagaaaatagagattaatttggaatgcgtagagattttagtttttaggatgagattgtagttattttgaatagttaaggtttgttttaattatattttttgtaacgaagatagttttgttatttttttttggatagggggaagtagatggagttttataaggttttgttttttttttttggtaaggatttagagagaaggggttagaaagaggtgaggaaagaggataagattttgaaaagggtagtttggaaaaataatttaattgaggatttaagtagattgtgttaaatattgttggtttttttgttttgggttagaatgttgaggttttttaattagggaatttaattagtattttaattagtagtatttttgtattaggttttttggtaaggttacgttttgggtatgagttaatatagtttggttatggggaggagtattgagattaatatttttgtaagagatttttgtgaataaagggtataggataataattattattattatttattaagtatttttgaggatttttgtttagtaggtattgttaggttttttgggattttaatttttattatatttttgtaaggtggttttatttttatttttattgtatggaggaggaagataatatagggttagagaatttgtttaaggttatatcgttggtataagtggtagggttaggatttaaagtttggtttttttgagtttttgtattgtattattaagtgaaggattttaatgatttttttttggggatatgggtattttttagatgttgtgtttagagatgatgttggtttttttaatatatttgtttttttagttagttttaattttgggttggttggtggtttcgggaagtagttaaaggtattagtatttattgaagtagttggattttgttgtgattagagttaatttatagttattttgtaggtatttatttgttttgagaattagttatatgattagttgttgagatttgttaggttttaagttagtaaaggtggaattcgtagagtaatgaaaatttagaatttttttagttttaggtgttgtggttttaattttttatttattttatatataagaaatttgagatttagagaggagatgatcgtttaggatatgatagaattggaattataatttggggattataattttttggatgttttttgtttttgttaagttttttttttgggtttcgttgataggaagtggttatagatgtggggaaaggaaaaggagaggagatggggggtgggggagattatttttaagagtatattattgattttattttaaaatatatgtaattgatgaataatttatgttttaaaatgatttatgttttttttatattgatatttttattttgttaattggttttaatagaaatattataggagtaaaaattaagaagaaattagtttataagtatatgatatagttttttagttttatttttgtcgattgataagaatttaatattttatatttataaaaatttaattttggttaggtatagtggtttacgtttttaattttagtattttgggaggttgaggtgggtggattacgaggttaggagtttaagattagtttggttaacgtaatgaaattttgtttttattaaaaatataaaaaaatagtcgggtatggtggtggatgtttgtaattttagttatttaggaggttgaggcgggagaatcgtttgaatttgggaggtagaggttgtagtgagtcgagatcgtgttattgtattttagtttgggcgatatagtaagattttattttaaaataaataaataaaataaaataaaaaaaaattaattttatatttaggtaatatttattatgaattatttgttattggtatatgtgaaatatataaaagaaaatgaattttagggattggggaaagggaaggggtatatagtaatgttgtgtttggataatagaataatttttaaattttttaaattgtttgttttataagaagttatatgaatataaagaagaatattatttaagaagagttttgattaaaagttaagtttgagtaattatttagagaaaaattatagttatattttataaaaagtatatttgagcgttaaattttatttagttaagttttagatttttcgatcgggattttagtttattgggattattttgagggtgtggagttggagagaaaaggtagaattagggtatttgggtaagtggtaagttttgaagaggaaaaattggtagaaagttgttttttgttttatgaattattttttttatattttttttgttagtatttgaaggtttttttagtttttagttataatgagtagtttaagagtatagtaaagaggtagaatttaaagtaataaaaataatttatatttatttattaaaatgtatgtttattttagttaattcgtattatttttatagttatttatattttatggggaaaggtgttgaggaatgagggttaaataattagtttagggttatagggtggttaggtggtagatgtgtattttttggggttatagttttaattgttgttttatttagagtaggggatatacgttagtttttatttttatattagttttattttggtttattatttttttaaaatttttaaaggagaagtttttgtttgattggttaaagtttatgatttttattgggttatttgtttttagtgggtcgagttattttatttaaaggtatgagttattttttttttttttttttttttatatttttgttttagggtagaaggtgaagttggggtttgtttggggattttgtttattattttgttattgttattgttatttagtatgtagatttgagtaattagtttttatgattttaaataggatgagaaaggaaggaaagacgtagggaaagaataggatttttgattagggttgtaaataagggtatttgggatttgtatagatattaagataatattattttgaatattatgttttgaaaattttaagagaggagagatgatgggtaggtttaggatttgtatatgtttgggtttattatattattttaaaagttgtaattttattttaaaagtaatagaatttaaaagtaatagaattatttatattatagatttattataattaaggttatgtttgtttaagttattaagtaaatgttatttagtggtaaaggggatattatgtaaacgtttttttttttttaataaggaggtagattatagattaaatattgagtaagaaataaattaaatgggtttttttttattattttttaaatgtttttttttttttttttttttttttgtatgttttttgagagatagaattttgttatgttgtttaggttggttttattatttttaggtttaagtgattttttagttttagttttttgagttattgggattataggtgttgggttttgttttgtattttaatgtttttaggtaaagtatgtcggttagttttttataatttttattaatttttaatatattttattttaagtagttttatttatattatttatttggtttttaaaggtatttgattttgggatttttgtttgggttgaaagaaatggtaggggatttaatattagaaaaggaggtttaaatttaggtttttttttttatgtatgtgatgttggggatgttattaagttttagaggttttggtttttgttgttttgaggattaaagagttatggaatgtggaagtgtttgttaattacggagtattatgttaataagagtgattatgattatgacgtaggagttaaggattgaagtttagttatttgttttcggttttgttgttttttaaggttttagttaaattaatttagtagaatttaagatatatggggtggagggaggatgggcgagaaatatgtttatattagatgttattaggaaaatattattagtaaggaggttgttgtaaataagaagatggaggttaaatatttagtatatattataggtttttattagttataaaaatatttaggggaggagttgggtgggaagtaatttgtaaagtgtttgagtataaaaagaattatttattaattttgggaagtttaaagaaggaaagaattattatatggaaaattattgttttagagaagggggataaaaaagtttttaatcgtaaatttaagagaggtttgattataagaaaataaagatagaagaaaagatggttaagaataacgtgttagtatttagaggtttgcgagatttagatggatagtttttttagttgtattttttttagattagtttttagttttttattagatttttgttgagtagattgaattttttattgaaaaaatttttagttattatttttttttttttttattggtttagtttgttgtaggtttggagagtgttagtggtagagatagttagagtttttttttttaaaagtttgtagagtaagtgtagaatgtattttagtaggttgggaggagttttttaaagaaagtaaatgttttttttttaggttttttttatttatttatatttatttattaaataatagataattattgag

SEQ ID NO: 751 - DNA, 5532 bp, Artificial Sequence
  chemically treated genomic DNA (Homo sapiens)
tattttagtttgggtgatagagtgagatttggttttaaaaaaaaaaaaaagtgatttgatttgttttgtttgttagaataatttagaaatgagttatatttttaatagtaggaatatagtttgtttggtgattttttttgttagaaatttatttggtattaatagttttttttatatgtttatttttgttattttttttttttaggataatagttttcggtggatggtttagaaatttttggggtttttaaagataaaattattgtagtaatattgagatatttatttttttaatagttagtatttgtattgatgatgtaaaagtaatggtgggtaaaagtgttggtaattaagtaggaatgaagattatggtattaaattgtagtagtagttattgtattttttaatgttatgtatttgtaatttttaaaaatgttattttttattaagaacgtttttgatgaagttgggtgtggtggtttatatttgtaattttagtattttgggaggttaatacgggtggattatttgaggttacgagttcgagattagtttgattaatatagagaaattttttttttattaaaaatataaaaattagttgggtatggtgggtgcgtgtttgtaattttagttatttaggaggttgaggtaggagaatcgtttgaattagggagttaggttgtagtgagttaagatcgtgttattgtattttagtggggcgatatagtgagattcggttttaaaaaaaaaaaaaaaaaatgagtatttttgatgaagtagtataaattattaattgtattaaattttgattttatagtatatgtttttttaatattttgtgtgaagaaatgggaaatatgtatatagtatttttgtatataatagttgttttatggtttgttaagaaaaagtatttgtgtaattaaattaatttttggtttggtgtagtggtttacgtttataatttaaatattttgggaggttagggtaggaggattgtttgagattaggagttcgagattattttgattaatatggtgaaatttcgtttttattaaaaatataaaaattagttgggtatggtggtgcgcgtttgtagttttagttatttaggaggttgaagtagaattatttgaatatgggaagcggaggttgtagtgagttacgattgtgttattgatttagtttggcgatatagcgagattttattttaaaataaataaataaattaattaattaattaatagattattttggggggataattttagttttatagaaaaattgagtagaaagtatagagaattttaggttgggagtaatggtttaagtttttaattttagtattgtcggaggttaaggagggaggattatttgagtttaggagtttgagattaggttgggtaagatggtgaaatttcgtttttataaaaaataaaaaaaattagttaggtatagtggtgtacgtttgtagtttagttatttgggaggttgaggttgaaggattatttgagtttagaaggataaggttgtagtgagttaagattgtgatattgtttttttagtttaggcgatagagggagattttgttttaaaaaaaagaaaagaaaaaaaaaaaaagaagaagaagaaagtatcgagagtttttatatttttttttaggttttttattttttttattattaattttttgtattagtgtggtatatttgttataattgatgagttagtattggtatattattaatatagtttagtcgggcgcggtggtttatgtttgtaattttagtattttgggaggtcgaggcgggtggatcgtttgaggttaggagtttaagattagtttggttaatatagtgaaaatttatttttattaaaaatataaaaaattagttgggcgtggaagcgggtgtttgtaattttagttatttaggaggttgaggtaggagaatcgtttgaaattgggaggtagaggttgtagtgagtcgagatcgtattattgtattttagtttgggtaataagggggaaatttcgttttaaaaaataaataaataaaaaaatatagtttatattgatatattataattaattaagtttataagttatattaggttttatttttttttatatataagtatgatatgtatttattatgatattattatattatataaaatagttttatttttgtaaaatttttttgtgttttatttattattttttattttttttaattttatttttttggtagttattgatttttttattatttttatagtttagtttttttagaatattatatagttggggttaaacgtattgttttatgtttgtaattttagtattttggaaggttgagtaggaggattgtttgagattagaagtttaagattattttgggtaatatagtaagattttgatttaaaaaaatatatatatatatgttatatggatggaattatagtttgtagtttttttatattgatttttttcgtttagtaatatgaatttaaggtttttttatgtttgttaatggtttgatagttatgtttttttttttttgagatggattttattatgttgtttcggttagttttaaatttttgaattaaattgattgttttgttttagtttttcgaaaagttgggaatagttgagattatagaaatatgttatttttttttttttgtagtagaagttagaaagtttttttttttttttgagatggagtttcgtttttttattttggttggagtatagtggcgtaatttgggattattgtaatttttgtttttcgggtttaatcgatttttttgttttagtttttttagtaggtgggattataggtacgtgttattatattcggttaatttttgtatttttagtaaagacggggttttatcgtattggttaagttggtttcgaatttttgattttgtgatttatttgttttagttttttaaagtgttgggattataggtgtgagttatcgtgttcggttttttttttttttttttttttttgagatagagttttattttgttatttaggttggagtgtagtggttcgattttggattattgtaatttttatttttcgggtataagtgatttttttgttttagttttttgagtagttgggattatagacgtttgttattatattcggtttattttttttgtatttttagtagagacggggttttattatgttggcgaggttgattttaaattgttgattttaagtgatttaatcgtttcggttttttaaagtgttggaattataggcgtgagttatcgcgtttggttttaaaaaaaaaaatttttttttttaggacggcgttttgttttgtcgtttaggttggagggtagtggtgcgatttcggtttattgtaagttttattttttgggtttacgttatttttttgttttagtttttcgagtagttgggattgtaggcgtttgttattacgttcggataattttttgtatttttagtagagacggggttttatcgtgttagttaggatggtttcgattttttgatttcgtgatttattcgtttcgtttttttaaagtgttgggattataggcgtgagttatcgcgttcggttaaaaaaatttttaatacggtaaatattgaaagatataatttatataaataaagtttttagggttttttataatttttaatattgtaaatggttttaagatttaattgtttgagaatcgtttttttgggatgtttttttttttttttgttggttaattttagtggagagatttaggtatttaattttgttttagatttatttttgagaattttttttgatgggttatattttatttattgtttttgttttgtattttttttttagttatgttgtttttgtttttttggttgtttttaattttttttttttttttttttttcgtttttttttttttttttttttttttttcgttttttgttttttgagacggagttttattttgtcgtttaggttggagtgtagtagcgcgattttggtttattgtaattttcgttttttaggtttaagcgatttttttgttttagtttttcgagtagttgggattataggcgtacgttattatgttcggattatttttgtatttttagtatagacggggttttattatgttggttaggttggtttttaatttttgattttaagtgattcgttcgttttggttttttaaagtgttgggattataggtttgttgtcgtattcggtttgtttttttttttttttttttttgagacggggttttattgtgttttttaggttggagtgtagtggtgcgattatagttttttgtagtttcgaattattgggtttaagcgaattttttattttagtttttcgagtagttgaaattataggagcgcgttacgatatatagttaattttttttttagtgttttttttttttttgttgttgttttttttttttttttttatcgattttttcgtattggttttttaaattgttgggattataagcgagagtagtgttcggtttttattgttttgaaatttcggttttttgtaggttttggaaaagaaagtgaaggggtcgtgtaatggtttaaaatttaggtaatatttttaggcgcgtttttaattcggcgttattttgataaaaagtttgttttttgcgttcgattttttatattagagagtatcgtagggacgtagggacggagaggattaatggggtcggggaggatttaaggaagttggggaatttagattttttttagtgtttaaaaagtagaggttttttcggaaggtataataggcgagtttaataatgtttttggagattaacggtattaaggggtatttttgtttcgttttaaggttttttgtttcgttttttgtcgttaagtaaggaattcggcgtcgtcggtcgtgggtagtatttacgatagtgttggcgttttgcggtcggtcgtatagtcgttgacgcgtcgggaggcggagtttagggaagtaaatttttttggcggttttcgtttagacgcggtagttgtgatttatttgtttttttcgtagagtaatggcggtgtttgtcgggttcgcgcggatttcgtttagtttaggtaggtttaggatttcgtttttcggcggagagtttttaggagcgttggttttagaggggcgggggcgggaggacgtttagtgtttttcggtgaggcggggggggggttttttgtggggaagggggcgtgttgtgagatatttgtagtttgcggtttttgaatgatgatgatattcgggaatattgcggttaggggattgtagtttgaggggttttgggatattaggggatcgtggagagggggttgtattgtagggatgttttttatagttagattattgaggtaattttattgagtcgattcgggtgggcggaagttttgagttgttggtgtagtgatttttttgatttgaggtggagtttattttcgtatatatattttttttatttattgattgtaga

SEQ ID NO: 752 - DNA, 5532 bp, Artificial Sequence
  chemically treated genomic DNA (Homo sapiens)
tttgtaattaataaatggagaaaatatgtgtgcgggggtgggttttattttaaattaaagaaattattgtattaatagtttagagttttcgtttattcgggtcggtttaatgaggttgttttaatgatttgattataggaaatatttttgtagtgtagttttttttttacgattttttaatgttttagaattttttagattatagttttttaatcgtagtgttttcgaatgttattattatttagaagtcgtaggttgtaaatgttttatagtacgtttttttttttatagaggatttttttttcgttttatcgggagatattgggcgttttttcgttttcgtttttttgagattagcgtttttaggaatttttcgtcggagggcggggttttaagtttatttgagttgggcgaggttcgcgcggattcggtagatatcgttattgttttgcggaggaggtaggtgggttatagttgtcgcgtttgaacggaggtcgttaggagaatttgtttttttaggtttcgtttttcgacgcgttagcggttgtgcggtcggtcgtaaagcgttagtattgtcgtaaatattatttacgatcggcggcgtcggattttttgtttggcggtagggggcggaataaggagttttggagcggggtaaaggtattttttagtgtcgttgatttttaggggtattgttagattcgtttgttatgtttttcgagggggtttttgttttttaaatattgaaaagagtttgagttttttaatttttttgggtttttttcgattttattagtttttttcgtttttgcgtttttgcggtgttttttggtgtgagggatcgggcgtaaagggtaaattttttgttagagtgacgtcgagttgaggacgcgtttggaaatgttgtttgggttttgagttattgtacgatttttttatttttttttttaggatttgtaaagaatcgaggttttaaagtagtaggggtcgggtattgttttcgtttgtaattttaatagtttggaaggttaatgcgggaggatcgataaagaaaaaaaaaaaaggtaataataaaaaaagaaaaaatattaaaaaaaaagttagttgtgtgtcgtggcgcgtttttgtggttttagttattcgggaggttgaggtgggaggttcgtttgagtttagtagttcgaggttgtagggagttgtgatcgtattattgtattttagtttgggggatatagtgagatttcgttttaaaaaaaaaaaaaaaaaaaaataagtcgggtgcggtagtaagtttgtaattttagtattttgagaggttaaggcgggcggattatttgaagttaggagttaaagattagtttggttaatatggtgaaatttcgtttgtattaaaaatataaaaataattcgggtatggtggcgtgcgtttgtaattttagttattcgggaggttgaggtaggagaatcgtttgaatttaggaggcggaggttgtagtgagttaagatcgcgttattgtattttagtttgggcgatagagtgagatttcgttttaaaaaataaaaaacgaaaaagaaagagaaagaaaagaaaaggcgggaagaaaagaaagaaagaaaattaaaagtagttagggaaataggaataatataattgaagaggggatatagagtaagggtagtgagtagagtgtggtttattagggaaggtttttagaggtgagtttggagtagaattaaatatttaaatttttttattgggattagttagtaggaaaagaagaaggtattttagagaagcggtttttaaatagttgggttttggaattatttatagtgttagaaattatagaagattttaaaagttttgtttatgtggattatattttttaatatttgtcgtattagaaatttttttggtcgggcgcggtggtttacgtttgtaattttagtattttgggaggacgaggcgagtggattacgaggttaggagatcgagattattttggttaatacggtgaaatttcgtttttattaaaaatataaaaaattattcgggcgtggtggtaggcgtttgtagttttagttattcgagaggttgaggtaggagaatggcgtgaatttaggaggtagagtttgtagtgagtcgagatcgtattattgttttttagtttgggcgatagagtaagacgtcgttttgaaaaaaaaaatttttttttttgaggttaggcgcggtggtttacgtttgtaattttagtattttgggaggtcgaggcggttggattatttaaggttagtaatttgaaattagtttcgttaatatggtaaaatttcgtttttattaaaaatataaaaaaaatgagtcgggtgtggtggtaggcgtttataattttagttatttagaaggttgagataggagaattatttgtattcgggaggtggaggttgtagtgatttaagatcgaattattgtattttagtttgggtgatagagtaagattttgttttaaaaaaaaaaaaaaaaaaaaaaggtcgggtacggtggtttatatttgtaattttagtattttgggaggttgaggtaggtggattataaagttaggagttcgagattagtttgattaatacggtgaaatttcgtttttattaaaaatataaaaattagtcgggtgtggtggtacgtgtttgtaattttatttattggggaggttgaggtaggagaatcggttgaattcgggaggtagaggttgtagtgattttagattgcgttattgtattttagttagggtgaaagagcgagattttattttaaaaaaaaaaaaaagttttttaatttttattataaaggaaaaaaaatggtatgtttttgtagttttagttatttttagtttttcgggaggttgaagtaagataattagtttagtttaggagtttaagattagtcggggtaatataatgggatttattttaaggaaaaaaaaatatagttattaagttattagtaaatatggaggaattttaaatttatattgttaagcgaaagaaattaatgtggaaagattataaattatgattttatttatatgatatatatatatgtatttttttgagttaaggttttgttatgttgtttaagatggttttaaatttttggttttaagtaatttttttgtttagttttttaaagtgttgggattataggtatgaggtagtgcgtttggttttaattgtatgatattttgaaaaggttaaattatggagataataaaaagattagtgattgttagggaagtggagttggggggagtaagggatggtaggtggagtataggggagttttatagaagtgaaattattttgtatgatgtaatagtgttatggtggatatatgttatatttgtgtgtggaaaagagtaaagtttaatgtaatttatggatttagttaattataatgtattaatatggattatgtttttttgtttgtttgttttttgagacggagttttttttttgttgtttaggttggagtgtaatgatgcgatttcggtttattgtaatttttgttttttagttttaagcgatttttttgttttagttttttgagtagttgggattataggtattcgtttttacgtttagttaattttttgtatttttagtagagatgggtttttattatgttgattaggttggttttgaatttttgattttaggcgatttattcgtttcggttttttaaagtgttgagattataggtatgagttatcgcgttcggttgggttatgttaataatatattaatattggtttattagttgtaataaatgtattatattaatgtaaaaagttaataataggaaaaatggggagtttgaagggggatatgggaattttcggtatttttttttttttttttttttttttttttttttttttttttgagatagagtttttttttgtcgtttaggttggaggggtagtgttataattttgatttattgtagttttgtttttttgggtttaagtgattttttaattttagttttttaagtagttggattataggcgtgtattattgtgtttggttaattttttttattttttgtagagacggggttttattattttgtttagtttggttttaaatttttgagtttaagtgattttttttttttggttttcgatagtgttgggattaaaggtttgagttattatttttagtttggaattttttgtattttttgtttagtttttttgtaaggttaaaattgtttttttagaatagtttgttaattaattaattaatttatttatttattttgagatggagtttcgttgtgtcgttaggttggattagtggtataatcgtggtttattgtaattttcgttttttatgtttaagtaattttgttttagttttttgagtagttgggattataggcgcgtattattatgtttagttaatttttgtatttttagtagagacggggttttattatgttggttaggatggtttcgaatttttgattttaagtaatttttttgttttggttttttaaaatgtttggattatgggcgtgagttattgtattaggttaaaggttagtttaattgtataagtgtttttttttgataaattatgagataattattatatgtagaagtgttatatgtatattttttatttttttatataaaatattaaaaagatatgtattgtagggttaagatttaatataattaataatttgtattgttttattagggatatttattttttttttttttttttgagatcgagttttattatgtcgttttattagagtgtagtggtacgattttggtttattgtaatttgattttttggtttaagcgatttttttgttttagttttttgagtagttgggattataggtacgtatttattatgtttagttaatttttgtgtttttagtagagaaggggtttttttatgttggttaggttggtttcgaattcgtgattttaggtgatttattcgtgttggttttttaaagtgttgggattataggtgtgagttattatatttagttttattaaggacgtttttaatagaaagtggtatttttaaaaattgtaagtgtatggtattgaggaatgtaatggttattattataatttggtgttatggtttttatttttgtttagttgttagtatttttatttattattgtttttgtattattagtataaatgttagttgttaaaaaggtaaatattttagtattattatagtaattttgtttttgaagattttaggagtttttaggttatttatcgagaattattgttttaaaggaaaagaatggtagaggtagatatataaaagggattattggtattagatggatttttagtaggaggaattattaggtaaattgtgtttttgttattgaggatatagtttatttttaggttattttaataggtaaggtaggttaagttatttttttttttttttgagattaagttttattttgttatttaggttggagtg

SEQ ID NO: 753 - DNA, 6056 bp, Artificial Sequence
  chemically treated genomic DNA (Homo sapiens)
aattacgttacgtgggttatatggggagatattagtttgagttaggaggtagaaggagtaatggtagagtaagatttagagtttttattgtagtttttttatgaaggaatgagtgaggtagagtaggtaagtttgagtaagtttaggattggatagtttgaataatttttaattgggttataagtggtttttgtaaagtattttgttttgaggtgattgagggtaaaggaaatattggtttagtgtatgagagttagataaaggaggtagttttgggtgtggattttggattgtttggtttgtatatgaaagatacgttgttagtaagttgtttattatttttaggaattagttaattttgggaggagtattttttaggattagtaaggtttaagatattaaagtattataaaatagaaaataaaaggtatgattaatataaatatttaggaaggttttgtttggtaaatgaggaataattagtttaagattgagcgttggatttgaataataagttataaaaataatatattaaaatatgaaattgttttttcggattaattaaatatatttaagaataagatttaaaaagatttataggaatataaaaatgtttagtattttatatagtaaaatttattgtttggttttagttagagattgttaggtatgtaaagatgtaggaaagtatagtatataatgagattaagagatttaaaattatatagatgttagaattagtaaagaaggatattaaaagttataattgtgtattttaaaagttgagtagattttaaaagaagattttttgattttaagaattattatagagttgtatttattaaaatagtatggtattttattaagttaagtaaatagattaaaggaatagagtttgaaaataaatttatatatgtatataaaatgagtttttttaaagttataaaggtaatgtattggagaaaggatagtatttttaataaatggtgttagaataattggatatttgtatggaaaaattttttaaaatttgggtttatattttatgttatataaaaaaattaattttaaatggattatttatttaaaattataaaatttttagaagaaatgtaattttaaattttgggttaagtaaaaatttagatataatattaaaagtattatttatgaaagattaaattaatatattagattattaaaataaaaaattgttttttaatgatattgttaaaagattaattacgaaattttggtaaagttaagtttaataaaaaatgtgtatttagaatatataaagaatttgtggttaggtatcgtggtttacgtttgtaattttagtattttgggaggtcgaggttagattatttgaggttaggagttcgagattagtaatatggagaaatttcgtttttagtaaaaatataaaattagtttagtgtggtggtatatatttgtaattttagttatttaggaaggttgaggtaggagaatcgtttgaatttaggaggcggaggttgcggtgagtcgagatcgtgttattgtattttagtttgggtaataagagtaaaattttgttttaaaaaataaagaatttgtaaagtttaataataagatatggggaaaaaatttgaatagatttgagaagatatagatggtaaatatgtatattaaaatatgtttaatattattagttattagggaaatgtttaagttaaagttagagagatattgttatatatttagaagaatggttaatgtttaaaaaatttattatgttatgtgttgttgaatatgtaaagtaataagaatttttaaatattgttgatggggatgtaaaattgtattattattttggaaaatagtttgatagttttttaagatattaaaaatatatttattttatgatttttatattttatttttaggtatttatttaagagaaaaggaaatatatgtttatgtaaaaatttatatatgaatttttatagtagttttatttgtaatagttaaaaattggaaataatttaaatatttattaatagatgaatggataaattgtggtatatcgtttagtgtaatattcggtaataaaaaggaattattggtatacgtgagtgagtttttaaataattgtgttaagtgaaaagttatatagaagagagtatattcggttgggtgtggtggtttatgtttgtaattttagtattttgggaggttgaggtaggtagattatttgagattaggagtttaagattaatttggttaatatggtgaaattttatttttattaaaaatataaaaattagttgggtatggtggtatgtttttgtagttttagatatttgggaggttgaggtaggataattgtttgaatttgggagggggaggttgtagtgagttgagattgtattttagtatgggtgataaagtgagattttatttaaaaaaaaaaaaaaaaaagtatattttatatgattttatatatttttaaattttataaatgtaaattgtaaaaaataaagtaaattaatggttgtttttggatgttagtgggtatggagaggcgggagggagggattattaagaggtatgataaaattttcggggtgataggtatatttattattttgattgtgatagtggttttatagatgtatatatgtgtaaaatgtattatattgtatattttaattttgtgtagtgttcggaatgtttattttttgtgttttaattatattttaatgaagggttattttaaaaaataaaatatttttaaaaaataagtcgagcgtaatggtttatgtttgtaattttagtattttgggaagttaaggcgggtagattataaggttaggagtttaagatcggtttggttaatatggtgaaattttgtttttattaaaaatataaaaattagttaggtatgatagtagttttttgtagttttagttattcgggattttgaggtaggagaatgttttgaatttggtggggtagaggttgtagtgagttaagattatgttattgtattttagtttgggtgatagagtgagattttgttttaaaaaaaaaaaaaaaaaaaaaaaaagttgtgtatagttggaaaagaaaatattagattttatgggtgattggtaattagttttaagtggaataagtgtatttttttttttttttaggttttagagaaaaatttttatgttgggttgatagtagtagttaggattagttgtttaagattttggattttcgagatgaagatcgttagtagaggttgattttttttgtgggtttatgttttaaagtattttatttgggtttaaatatttttttttttaggatagaaaagaagttttcgagttttggttatgttgggtttgtggagtatattattttttttacgtgtttttttttgatgtttttagtatttttgtaagatgtttttagtatttttgtaaggtaggttaaggtatgaggagttataggtttagggagttgaaggtagattttaagagttgggtgtggatgttgtatttttgagtttgggtcgtttgggttttgtttagtttgggaagtatttttaaatttattttttgttagttttttataattttgcgggagggtaaagtttagattattatggttgtttttattatgtagttgtagattaggaaattgaggtttagggaggtttttattggttttgttttagggataacgaggtttgaggtttgttttttataggaggattatgatggtttttttgttttaaatggtttttttggaaggggtttgtttatttaggtgaattttggggtcgagtagttttagtgatagtttttgggatggttgtaggagagggagtagtatgtaggcgttaacgttatagattggtattaggttattcgggtttatattttggtttttttagtttttggttttttgaatttggataagtaattttttttttttattttttgtttttttgagatagtttcgtttcgttatttaggttggagtgtaatggtataatttcggtttattgtaatttttgtttattaggtttaagtaatttttttgttttagttttttaagtagttgggattataggtatttattattacgtttgattaattttttttttttttttttagtagagatggggttttgttatgttggttagtttggttttgaatttttgatttttattcgtttcggttttttaaagtgttgggattataggtatgagttacgtcgtttggttaataagtttttttaatttttttttgttttagtcgatttatttggaaaatagagtatttattttttttaaatgagaagagaagtaaaggagtataaggttattagaatagtatttggtttaagggaggttatggaagtgtttgttgaataaaaaaatggttttatttttggtttagttttaaaggtttgagtttttgttattgttatttagatagttttgggtggaggttttgttgatattgaagagtgtttgtttttttttttttaatgcggtagatattttttaaaatttacgttatttttatttttattttagtgggataatgggaggtttggtgtattttatttttaagatgagggaataggttttgagaggattatatcgttagtaagtgataggttgggattaaggttaggtttgtttgttttttagattaggtttgagtgaggatcggtttgagtacggtttatttgttttttttttcgtttagagtttgggttggagttgttttggttagtgttttttgttttattaggttgtatgagttataagttgttatttgtggagttcggtggttttgttttcgatagttttgttggtggtcgtgaaggttttaaatatttgtatggtaatgaggttaatttttttcgtttgattcgttttaggttttggtttcgttattgtatcgtgtgtttttgtttaagaggtagagagattgaaattatttgttgtcgtttggatttttttagagattgtttggaatattagttcgggttttcgtatattattttggtaggaattttttagtgataattgagagtttgtgggttggtttagggttagtggtgggtagggagttagtagggcgtaagggattggagagtttggtatttttttaataggagttttagggagagtttagaggtttgtttatgtgataggtttattagtttgtttggtttagggtcggtttttatatcgttttgatttaaataatagattgtttatagaataaatgtatgttggtttaagtttttatttttttataattttttttgttggttttttttattatttattttattttgttttattttggggagtttgaatattttgttttagagtaggggtatagggaaatatttttatggtttttgagttgttgggtagggttagtttttaaaataaggagagttgggagggagttggattttaggatggagtgttgagagttgaaagttttatttaatagaggggagggagtagagattttaaaaagggaaaggtttggttaggttttatagtaagttaggagtagagcgggtttgaattgtgagatttttaatttttttaaagtttttgggtaagaagttcgtttaaagtagtgagattagtggggtttgaggaaaatttttttttttattgtttttattttagttttgggatttaatattattttgtttttattttttttggttatttttttttgttttgagaagttgttatgtatttagttagattgggaatgtgttggaatttatgtattataggggatggatgcgtcgtttatagtttttgtgggttatggttgtgagggaaagttagagttggtggttggggtgtgtaggtttaggaggatttttgttttttttttagttttggagtttttttttgttgttgagtttttttttatttagtagggttttattgtttttagattttattttttggtttagtatatgatttttttattttgggttttagtattttttcggatatttttaaattt

SEQ ID NO: 754 - DNA, 6056 bp, Artificial Sequence
  chemically treated genomic DNA (Homo sapiens)
gaatttagagatgttcggggggatattgaggtttagagtggggaagttatgtgttaagttaggaggtaaggtttgggggtagtggggttttgttagatgaggaaagatttagtagtagaggggggttttaaggttaaggaggaggtaggggtttttttgggtttatatattttagttattagttttgatttttttttatagttatggtttatagggattgtaagcggcgtatttattttttgtggtgtatggattttagtatatttttagtttggttggatgtataatagttttttagggtaaaaggagatggttaaggagggtgaggataggatggtgttgggttttaggattgggatggaggtagtgaggaaaaggattttttttagattttattgattttattgttttaggcggattttttatttaaaggttttggagagattggagattttatagtttaggttcgttttgtttttgatttgttgtgggatttggttaggtttttttttttttgggatttttgtttttttttttttgttaaataggatttttagtttttagtattttattttggggtttagtttttttttagttttttttgttttagggattggttttgtttagtagtttagaagttatagaagtgtttttttatgtttttattttggaatagggtgtttaggttttttagagtgaggtaaaatggggtagatggtgggaggggttagtagagaggattatgagaaagtgaaagtttaaattaatatatatttattttgtgagtaatttattatttaaattaaaacggtatgagagtcggttttgggttaggtaagttgataaatttgttatataagtaggtttttgagttttttttgaaatttttgttggagaaatgttaagttttttagttttttgcgttttgttgattttttgtttattattggttttaagttagtttataaatttttaattgttattgagagatttttattaggatggtgtgcgaggattcgagttggtgttttaggtaatttttgggagaatttaggcggtagtagatagttttagtttttttgttttttggatagaagtatacgatgtagtagcggagttagagtttgaaacggattaagcggagaaggttggttttattgttatgtaggtgtttagagtttttacgattattagtaaggttgtcgagggtagggttatcgagttttataagtggtagtttgtggtttatgtagtttggtgaggtagagagtattggttaggatagttttagtttaagttttaaacggaggaggaagtaggtgggtcgtatttaggtcggtttttatttaggtttagtttaggaggtagataggtttggttttggttttagtttgttatttgttggcgatgtggtttttttagagtttgtttttttattttgggaatgaggtatattaagttttttattattttattggagtgagagtgaggatgacgtaagttttggaaagtgtttatcgtattgaggggaggagggtaggtattttttaatgttagtagggtttttatttagggttgtttgggtggtaatggtaggaatttaaatttttggggttaggttagagatgaagttatttttttatttaataagtatttttatagttttttttgggttaggtattgttttgatggttttatatttttttatttttttttttatttgaaggaggtaggtgttttgttttttaggtgagtcgattgaggtagaaagaggttaaggggatttgttggttaggcggcgtggtttatgtttgtagttttagtattttgggaggtcgaggcgggtggaggttagaagtttaagattaggttggttaatatggtaaaattttatttttattaaaaaaaaaaaaaaaaaattagttaggcgtggtggtgggtgtttgtaattttagttatttgggaggttgaggtaggagaattgtttgaatttggtgggtagaggttgtagtgagtcgagattgtgttattgtattttagtttgggtgacggagcgagattgttttaaaaaaataaaaaataaagaaaggggattatttgtttaagtttaaagagttaggaattggaggagttagagtgtaagttcgggtggtttggtgttagtttgtgacgttaacgtttgtatgttgtttttttttttatagttattttagggattattattggggttgttcggttttaggatttatttaaatgagtaagttttttttaaaggggttatttgaagtaggagaattattatggtttttttgtggggaatagattttaagtttcgttgtttttggagtaaagttagtaaggatttttttggattttagttttttgatttgtagttatatggtggaagtagttatgatgatttgggttttgttttttcgtaggattgtaaaagattagtaaagagtgggtttggaagtattttttagattgagtaaaatttaggcggtttaggtttaggggtgtagtatttatatttagtttttagaatttgtttttagttttttgggtttatagttttttatgttttagtttgttttgtagggatgttgagaatattttgtagggatgttgagaatattaaaaggaaatacgtagaaaagatgatgtgttttataggtttaatatgattaagattcgggaattttttttttgttttaaaagggaggatatttgagtttaaataaggtgttttaggatatgagtttataggagagattagtttttgttgacggtttttatttcgagaatttagagttttgggtaattgattttagttgttgttattaatttagtatggaggtttttttttgggatttggaaggaaaggaaaatgtatttgttttatttagagttagttgttaattatttatgaaatttagtatttttttttttaattatgtataattttttttttttttttttttttttttgagatagagttttattttgttatttaggttggagtgtagtggtatgattttggtttattgtaatttttgttttattaggtttaaggtatttttttgttttaggatttcgagtagttgggattataggagattgttattatgtttggttaatttttgtatttttagtagagatagggttttattatattagttaggtcggttttgaatttttgattttgtgatttgttcgttttggttttttaaagtgttgggattataggtatgagttattgcgttcggtttgttttttaaaaatattttattttttaaaataattttttattgaggtataattgaaatataaaaagtagatatttcgagtattatataagattaaaatgtgtaatatgatatattttgtatatgtatatatttatgaagttattattataattaagatagtaaatgtatttgttatttcgaaagttttgttatgttttttggtaatttttttttttcgtttttttatgtttattgatatttaaaagtaattattgatttgttttgttttttatagtttgtatttgtgagatttggggatatatggaattatataggatatatttttttttttttttttttaggtgaagttttattttgttatttatattggagtgtagttttagtttattgtaattttttttttttagatttaagtagttattttgttttagttttttaggtatttgggattataggagtatgttattatgtttagttaatttttgtatttttagtagagatggggttttattatgttggttaggttggttttgaatttttgattttaagtgatttgtttgttttagttttttaaagtgttgggattataggtatgagttattatatttagtcggatgtatttttttttatatggttttttatttagtataattatttagagatttatttacgtgtattagtagtttttttttattgtcgagtattgtattggacggtgtgttataatttatttatttatttgttgatggatgtttgagttgtttttagtttttggttattataaataaagttgttatgaaaatttatgtataagtttttgtatggatatatattttttttttttttgggtaaatatttaggaatggaatgtggggattataaggtagatgtatttttaatgttttaagaaattgttaaattgttttttaaagtggtggtgtagttttatatttttattagtagtgtttgggagtttttgttgttttatatatttaatagtatatagtatggtgagttttttaaatattagttatttttttgggtgtgtagtaatatttttttggttttaatttgggtatttttttaatgattaatgatgttgaatatgttttaatgtgtatgtttgttatttgtatttttttaagtttgtttaaattttttttttatgttttattattgagttttgtaaattttttattttttgagatagagttttgtttttgttgtttaggttggagtgtaatggtacgatttcggtttatcgtaattttcgttttttgggtttaagcgatttttttgttttagtttttttgagtagttggggttataggtatgtgttattatattgggttaattttgtatttttattagaaacggggtttttttatgttgttggtttcgagtttttgattttaggtgatttggtttcggttttttaaagtgttgggattataggcgtgagttacggtgtttggttataaattttttatatattttggatatatattttttattagatttagttttgttaaaatttcgtggttagttttttaatagtgttattggaaagtagttttttattttggtggtttaatatattagtttggttttttatggatagtatttttggtattatatttgaatttttgtttaatttaaggtttagggttatattttttttagaagttttatagttttaagtggatgatttatttggaattaatttttttgtatggtatgaggtatagatttaagttttgagggatttttttatatagatatttaattgttttggtattatttgttgaaaatgttattttttttttagtgtattatttttgtggttttgaaaaaatttattttgtatatatgtgtggatttgtttttagattttgtttttttgatttatttgtttaatttgatgaaatattatgttgttttgatgagtatagttttatagtaatttttgaaattagggagtttttttttaaaatttgtttagtttttgaaatatatagttataatttttaatgtttttttttgttaattttaatatttgtgtagttttggattttttaattttattatgtgttgtgtttttttgtatttttgtatgtttagtaatttttgattggagttagatagtgaattttattgtgtggggtattggatatttttatatttttataaatttttttgagttttatttttggatatatttaattggttcggaaaaatagttttatgttttaatgtgttgtttttatgatttgttatttaggtttagcgtttagttttgggttaattattttttatttattaggtaaggtttttttggatatttgtattaattatgttttttgttttttgttttatgatgttttggtattttgggttttgttaattttgaaggatgttttttttagggttagttaatttttagagatagtaaataatttgttggtagcgtgttttttatgtataaattaaataatttaaagtttatatttaaaattgttttttttatttaatttttatatattaagttagtattttttttatttttaattattttagggtaaggtattttatagagattatttataatttagttgaaaattatttagattatttaattttaaatttgtttaaatttgtttattttgttttatttatttttttatgagaaaattataatgaaggttttgggttttgttttgttattgttttttttgttttttgatttaggttggtgtttttttatatggtttacgtaacgtggtt

SEQ ID NO: 755 - DNA, 5333 bp, Artificial Sequence
  chemically treated genomic DNA (Homo sapiens)
atgtttgtaattttagtattttggtaggttaaggcgggtggattatttgaggttaggagttcgaggttagtttgatgattatggtgaaattttatttttattaaaaatataaaattaatcgggtatggtggtatatgtttgtaattttagttattcgggaggttgaggtaggagaatcgtttaaatttaggaagtggaggttttagtgagttgagattgtgttattgtattttagtttgggtaataagagtaaaattttattaaaaaaaataatatatgtatatatatattataattttatatatatatatatattatgtaattttttttattattttatatatatatattacgtaatggtaaaatgttttttttgtttttttagtagattgttagttttagaagagaaaggattatgtttttggtttatttagatatgtttatcggtttggtatagtttttggtttatgttataggtaataattatttgtagaatcggtgaatgtatgaatagaagaatgagtgaatgaatgaatagacgaaaggtagaaatttagttttaggtcgggcgtgggtggtttatatttgtaattttagtattttgggaggtcgaggcgggtggattataagattaagagatggagattaatttggttaatatagtgaaatttcgtttttattaaaaatataaaatattagtcgggtatggcggtaggtttttgtagttcgagttattagggagtttgaggtaggagaatggtatgaatttaggggggcggagtttgtagtgagttaagatcgcgttattgtattttagtttgggcgatagagtaagattcggttttaaaaaaaaaaaaaaaagaaatttagttttaaagagtttatagtttggtaagaggaataaaatgtttgtaaatagttataggataggttaaaggaaggagaggttatttttagttgagggtattttattaggaaagtattttagattttttataattattagatatatttcgatgttttttatttttttattaatggatcgtttttttggagaataatttttaatgtgaaattatttagtacgttaagttaggtagatttttgtgtattttttggttgtttagagattattaattagtgtaaataatttttttattaatatatagtagtgtttgttttttttttttttaagtttttcgaggtttttttttcgtgtttgaattttttggatatattatgtggtaaattgaagggtttaacgagatataggaagtgaaatacgatgtatattgaaacgtgtaatataaatatgtagtatgaagtgtttcggtttattaattcgagttatgttgggtgttttttttttattattttttttaatgtttatggatattttattttgtggttgaagttttttgtgtttaattttttttatttttattgaatattttttgtgtagggatttgatttttgttttgttagttttgtattgaggtaagttttgtttatgtttagtagtgttattatttttattagatgaggtttttaaagagtttggtatggaaggaaagtttggggggttttagaagttattatttaggaattgggagagttttaggtaagttattttatttttttgggttttagtatttttatttatatttttatggttagtagagtgttaagtatatagtggatacgtagaagtattgattattttttttattttttttaggagagtttttgggaatttttatataatattttttgaagattttaatttaatgagttaagtaattgattcggtagtaaatttatggaaaggatattagaagttaaaaggaggtagagtatgttttagtataataattagtttttgattttaaggaagaaagaatagagttgtaggtgagaagtgtgcgttttaaattattaaagtgagagtggaaggagtatttattagttttttggaggcgatttttaagatcggtgagaatggtttcgaaaaatgtgatcgtttttaattttatagttttgaatttaataggagattttgaagtttgaaagatattattttaggattaatagtagatttgtgattttttatagtaggtatatagaattttagagttagtcgaggttggatataggaagggtttttaaatatatagagaaatttatggattttaaattataaagggaggttttttaaaagaattaagatgattttgagatttattttgagtttttttttttttttttttttggatgtagagtttcgttttgtcgtttaggttggagtgtagtggcgtgattttggttaattgtaatttttatttcgcgggtttaagtaattttttgtttcggttttttgaatagttgggattataggcgtttgttattatatttggttaatttttgtatttttagtagagacgggattttattattttggttaggttggttttgaatttttgattttatgatttatttattttggtttttttaagtggtgggattataggcgtgtgtttaattttttttgagttttttgaggttgatattagaggtgagaagtttagtttttttttattggttatgtggggagaggttttagtttgtagtaattagggatttggttttaagtgatgttttaatagtgggcgattttttagtattgttaggagaattttaagtttaatttaaagttgattttttattagtaatgaatgatagatatggtttttattgtttaaggttttgggaagatttagattagagaaaacgattatcgatttttatttatatttgtgggttttagtttttttttttggtttatggttattatagtaattttttgtaaaggtgtttttttaggggtttttagagttttttgagttattataattttgggttaatagaaatggagaggtaagaggagatatttttttgttttggttggttttacgtgtttatggtagtaatttgtttggggagtttcgttatttttgtgtttatttgtagagttatgtagtggtttttaattagggtttttgttatttttatttttaagggaggttggagattttttttatggtcgaaaatttatatttaagttttcggtattagtaaaaaggttttgttatgggggttttttgttttagttgagattggaggaatatggaagaagttaaaataattaaataatttagtagtattatattatttgttttggagaaaaaaaaatttaatattattattttttgttttttgagatggagttttgttttgttgtataggttggagtgtagtggcgtaattttggtttacggtaatttttgttttttgggtttaagtgattttttcgttttagtttttcgagtagttgggattataggtttatgttattacgtttagttaatttttgtatttttagtagagatggagttttgttatgttggttagtttggttttgaatttttgattttaagtgatttatttattttaaagttatttaaagtttggggattataagcgtgagttattgtgttcggtttggagaaaggattttaaatgacgtaatgtaggaagagtaaggttgtggagatttgttgttttggttgaggtagtttatgtaattagtttttttgagttatagttttttgatttgtgaaatcggaagaaaataatattttttttataagataagtggtaggttagatgtgagaatgtataggtaggttttcggtaattggaaaagttttatatagatttgaaaaggaggaggagaaaaaagaggaggggtttttatggttggatagggtatttttttttttttttttttttttttttttttttttttttttgaggtggagttttgttttgttgttaaggttggagtgtagtagtacgattttcgtttattgtaagttttgtttttcggatttacgttatttttttgttttagtttttcgagtagttgggaatataggcgttcgttattacgtttagttaatttttttgtatttttagtatagagtggattttatttggttagttaagatggttttgatttattgatttcgtgattcgttcgtttcggttttttaaagtgttgggattataggtatgagttatcgcgtttagtttgatagagtatttttcggcgtgatgtgttttgagttttaaagttgaggaagagatttaaatttttaagagtttttttaattttgagattttttgatggttttagggttatgggaggaagagtttgtggttcgtgtttgttttcgggatttttgttttttggtttgtgtttttgttgtaagtttaaggagttggggtaatattttgagtttgggtttttcgtttttagggatttgggggagttttagtaatgtttagggaaaggggagagtaaagtgtggggttggttttttttagtggttagtgttggaattgtatttagttgatttaggttgatttaggagtttttagtagaagtggaatttaggattgaatcgtgtttataatttttataatttattggttgtgtttggtttttttttttaatatatatattttgtttggtgggtggaggttaaatatgcggggaggaggaaagggataggatagagaatgggatgtggtcggtagggggttttaaggattggttattttgatattttttttcgcgtttaggttggttattatggtttgcggttagagggtatttacgtgatttttaaagagaggataagttgggtggtatttttggttgatattttgtgtataatttttataatattggtgacggtgggaagggaaagatgataagttagggggtatgattttagtatgtgtgggaggagtttttaaattatttattagtataagttcgttagtggttttatgtataaatgtatatagaaataggtgggggtaatagtgggagagaaggggttaggtataaaaagggtttataagagattagtttaaggattttaaggtttaatttttcgaattatttagggttttgtggatagtttatttagcggtaatggttataggtaagcgtttttaaaatttttttgggtataatgtgttttgaggggagaggtagcgatttgtagatgggacgggggtattaatttttaggtttggggtttttgaatgtgagtatcgttatgtaagtttagtatttggttaattttagaaagtttttggtttttggagggatggagagagaaaaataaatagtttttggagtagggagagtgttggttttttgtttttcggttttttttgttgttttttggtttttttttagg

SEQ ID NO: 756 - DNA, 5333 bp, Artificial Sequence
  chemically treated genomic DNA (Homo sapiens)
tttggggagaaattagagggtaatagagggagtcggagagtaagaggttagtattttttttgttttaggagttgtttgtttttttttttttatttttttagggattaggagttttttgagattggttaaatattgggtttatatggcgatatttatatttagaagttttaaatttgagggttagtgttttcgttttatttataggtcgttgtttttttttttaggatatattgtgtttaaagggattttaggggcgtttatttgtagttattgtcgttaggtgagttgtttataggattttgagtggttcggggagttgggttttgggatttttgagttggttttttgtgggttttttttatatttggtttttttttttttattgttgtttttatttgtttttgtgtatatttatgtatggggttattgacgggtttgtgttaatggataatttagaagttttttttatatatgttgggattatgttttttggtttgttatttttttttttttatcgttattagtgttgtgagggttgtgtatagagtgttagttagagatattatttaatttgttttttttttaagggttacgtgggtgttttttggtcgtaggttatggtggttaatttgaacgcggagaaggatgttaggatagttagtttttgagattttttatcgattatattttattttttattttattttttttttttttttcgtatgtttaatttttatttattagatagaatgtgtgtgttgggaaaaggggttaagtatagttaatagattgtgggggttgtgagtacgatttagttttgaattttatttttgttgaggatttttgggttagtttgagttagttggatgtagttttaatattgattattagagagaattaattttatattttgtttttttttttttttgagtattgttggggtttttttaggtttttggggacgaagaatttagatttaaggtattgttttagttttttggatttgtagtagagatataaattaagaaatagaaatttcgggagtagatacggattataagtttttttttttatagttttgaaattattagagaattttaaagttagaagagtttttgaagatttgagttttttttttagttttggaatttagaatatattacgtcgaaagatgttttattaggttgggcgcggtggtttatgtttgtaattttagtattttgggaggtcgaggcgggcggattacgaggttagtagattaagattattttggttaattaggtgaaatttattttgtattaaaaatgtaaaaaagttagttgggcgtagtggcggacgtttgtatttttagttattcgggaggttgaggtaggagaatggcgtgaattcgggaggtagagtttgtagtgagcggagatcgtgttgttgtattttaattttggtaatagagtaagattttattttaaaaaaaaaaaaaaaaaaaaaaagaaaaagaaaaagaaagatgttttgtttagttatggaagttttttttttttttttttttttttttttttagatttgtatagagtttttttagttgtcgagggtttgtttgtgtatttttatatttgatttgttatttgttttgtgaaggaggtattattttttttcgattttatagattaagagattgtggtttagagagattgattgtatgagttattttagttagggtagtagatttttataattttgttttttttatattgcgttatttaaagttttttttttaggtcggatatagtggtttacgtttgtaatttttaaattttgggtggttttgaggtgggtggattatttgaggttaggagtttaaggttagattagttaatatggtaaaattttatttttattaaaagtataaaaattagttgggcgtggtggtatgagtttgtaattttaattattcgggaggttgaggcgggagaattatttgaatttaggaggtagaggttgtcgtgagttaagattgcgttattgtattttagtttgtgtagtagagtagaattttattttaaaaaataaaaaataataatattaaatttttttttttttagagtaggtagtgtgatgttattgagttatttagttattttagttttttttatgtttttttaattttaattggggtagggagtttttatgatagggtttttttgttagtgtcggggatttagatgtggattttcggttatggaagaagtttttagttttttttaggaatgagggtggtaggggttttagttggggattattgtataattttgtaggtggatataggggtggcgaggttttttagataggttattgttatgaatacgtgggattagttagggtaggggagtgtttttttttatttttttatttttgttgatttagaattatggtgatttagaggattttagggatttttggggaaatatttttataaggggttattgtggtaattatggattagagggaagaattgaggtttataggtgtgggtagaagtcggtgatcgttttttttagtttagatttttttagagttttgagtaatggagattatgtttattatttattgttagtaaaaaattaattttgaattagatttgggatttttttaatagtattgggaagtcgtttattgttggggtattatttgaggttagatttttggttgttgtaggttggagtttttttttatatggttagtggggagaggttgggttttttatttttggtgttagttttaaaaggtttaggaaaagttgggtatacgtttgtaattttattatttagggaggttaaggtgggtggattatgagattaggagtttaagattagtttggttaagatggtgaaatttcgtttttgttaaaaatataaaaattagttaggtgtggtggtaggcgtttgtaattttagttatttaggaggtcgaggtagggaattgtttgaattcgcgaggtggaggttgtagttagttaagattacgttattgtattttagtttgggcgatagagcgagattttgtatttaaaaaaaaaaaaaaaaaaaagtttaggataaattttagaattattttggtttttttaaagaatttttttttataatttaggatttatgaatttttttgtgtgtttggaagttttttttatgtttaatttcgattaattttagggttttgtgtgtttgttgtggaaagttatagatttgttgttgattttaaagtggtgttttttaggttttaagattttttgttaggtttaagattgtggggttgaggacgattatatttttcgaagttatttttatcggttttagggatcgtttttaagggattggtgggtgttttttttatttttattttggtgatttgaggcgtatattttttatttgtagttttgtttttttttttttgagattagaggttggttattgtattgggatatattttatttttttttggtttttaatgttttttttatgagtttgttatcgagttaattatttggtttattggattgaggtttttagagaatattatatggggatttttaagggtttttttaggggaggtgaggaagatgattaatatttttgcgtgtttattatgtgtttggtattttattgattatggggatgtgagtgaggatattgaggtttaaagagataaggtggtttgtttggagtttttttagtttttaagtgatggtttttaaggttttttaggttttttttttatgttaagttttttagaaattttatttagtaaagatggtggtattattaggtatggataaaatttgttttagtgtaaagttagtaggataggggttaagtttttgtatagaggatgtttaatgaagatggggggaattgaatataaggaattttagttatagaatgaggtgtttataggtattaaggaaagtggtagaaaagaagtatttagtatagttcgggttagtgaatcgaggtattttatgttgtatatttgtattgtacgttttagtgtatatcgtgttttattttttgtatttcgttggattttttagtttgttatatgatatgtttagggggtttaggtacggaggaagggtttcggaaggtttggggaggagaggggtagatattgttgtgtattgatggggggattgtttgtattggttgatgatttttgaataattaagaagtatataaggatttatttaatttgacgtgttaagtaattttatattggggattattttttagggagacgatttattgatagagaagtgaaaagtatcgagatgtgtttagtagttgtaggaagtttggggtgtttttttgatggggtgtttttagttggaaatagttttttttttttttgatttgttttgtggttatttgtagatattttattttttttattagattgtaagttttttgaggttggattttttttttttttttttttgagatcgagttttgttttgtcgtttaggttggagtgtagtggcgcgattttggtttattgtaagtttcgtttttttgggtttatgttatttttttgttttaggttttttagtagttcggattataggagtttatcgttatgttcggttaatgttttgtatttttagtagagacggggttttattgtgttagttaggttggtttttattttttgattttgtgatttattcgtttcggttttttaaagtgttgggattataggtgtgagttatttacgttcggtttgaggttggatttttgtttttcgtttatttatttatttatttatttttttatttatgtatttatcgattttataagtagttgttgtttataatatgggttagagattgtattaggtcgatggatatatttagataaattaaagatatgatttttttttttttggagttaataatttattgggggggtagagaaaatattttattattacgtaatgtatatatataaaatggtaaaaaaaattatataatgtgtatatatatataaaattgtaatatatatatatatatattattttttttgatggagttttgtttttgttatttaggttggagtgtaatggtataattttagtttattgaaatttttattttttgggtttaagcgatttttttgttttagtttttcgagtagttgggattataggtatgtgttattatgttcgattaattttgtatttttagtagagatggggttttattatggttattaggttggtttcgaatttttgattttaggtgatttattcgttttggtttattaaaatgttgggattataggtat

SEQ ID NO: 757 - DNA, 8979 bp, Artificial Sequence
  chemically treated genomic DNA (Homo sapiens)
gttatcgggtttaattttaatatgtatttttatgggattaagaggtgagaagaaattataaatattatttttagtggttttgtaaggtaatttttttatgtgtatatagtgttttgtggtgttttggaaattggatttattattttcgtatttatgattagatatttttgaaaaatagtaattgaggttttttttaaatttattagatttaaagttatatttattattatagttattatagttattatagtttttatattttttattataggtattacgttttatttttttaaatttagtttttttgttaatgttattatattttttgttagttttcggtttattatagggatttggtcgttgtatagttatgagttttcgagggggattatagtgggttcgaattttagttcggttatttttgaagattttaatgtatttgtgttttattttttttttgtgtttttttaaggtttttttagttattttttgtgaagtaaattgtataaaggttttttttgtgtttcgtttttgaaagtttattggtagtgttattttatttggtataatttttaattttgaaaagaattgaataattttttttttgttatagttaaatgggagttttttaagtcggacgaagttatcgttggtagtattagggttattcggatttgtatgttttaatatttaatttattttaatattgttagatttgaatattttaacgtatttgtgttttatggtttttttgtttttttttaaagttaattttattttttttttagatttaagtttaataaatgttttattatttggtttgttttttttggtgtagatgaaacgaatatttgatgtgttattttggattttgtaattagagaagaagcgtattattttatcggttgagtaggattagggtaggtttttgatttttattacgaatttttttttgtttttcgtgtttagtattatggtgattgttgggtttttggtggtaagtttggtttaatgtaattttggtgtagttgaaaaaaaaaaaaagaagattattgttatggaaaaatgttcgtgatatagtaagagaaaaaagtaaattattaatagaaaatttaattatgttgatagtttttttgtaagacgtttgtataaatagagagtttattaaatttttaatttatttattttttagtagttatttatttaatgtttattacgtgttagatattattaaaaattaatagtaatcggtcgggtgcggtggtttacgtttgtaattttagtattttgggaggttgaggtgggtgtattatttgaggttagtagttcgagattagtttggttaatatggtgaaatttcgtttttattaaaaatataaaaaattggttgggcgtggtggtaggtgtttgtaattttagttattcgggaggttgaggtaggaaaatcgtttttatgtatttaggaggtggaggtgagttaagattacgttattgtattttagttttagcgattagagtaaaatttcgttttaaaaaaaaaaaaaaaaaaaaaaaaaaaattaatagtaataaattagtgggagatgttaataaataaaagatggttatatttgaatatataaatataaaaaattttattagattaaaagattaaataataattaaaatataaataaaatataggttatgtaagttttttatataatatttttattatataaaaatgtatgtaaattaataaaattagggaaatatttgggttttagagataaatgaaaaaaagatattattgggaatttatatatttattttagaaatattttttagttgttatgtttaatattcggttttggtatataagaattaataagtttagaatgggtttatggttttataggagtatcgaatgttattattaaagatgtaaatgtaaatatatattatatttgttatgattttttgagtggagtgtaagtatagtattaaagagggattagttgattagttttattggttggaggttaaatggttaaatgaaatagattaatttgtttagggatttataaatattttttttttttaattatgatgaagtataaataggagagggaaaagtaagtgaaaagattggtaaggtatagattagattttaaagattttgatatataaatattaagcgttttttaagatttttaaatcggggagtatgtagggtgattttattaaaatttttttagatagattattttggtaatagcgtggtatttaaatagaagggggtcgacgtggaattagggagattagttagaatttgttttataaatatatgttaaaggaatcgtttaaggtaataggagtaaaatggagaaaagatgtatttatatatattaaaaaaagtggaatttgcgggatttgataatagattaagtatgagagaatataggtataggaggatataggagaggaatttgggaaatgtttaaatttaattaattttttagtaagttaaaattagaattaatcgttattttttatttattaagataatggaaattaaatagtaatagtaaattagtgttatgtagtttataaattaatatattattagaagagtgataattgatataaattattttttttttgataaattttattatattttgaaagtaatttgataatatgtattacgttttttgatagtaaatatattttagttatgtgttttaaggagatgatttgaaatttagatagatttatggagttatatattttttgaaaagtattttattaagaaaacgaatattatgtatttaattttaaaagttataaaaatatttaataatatgagaaattatttatgttataattgtaagtgatttaagagtataattgttttataatattaattgtgtataaaatatatgtttttatattttttgatattgttagaatttttttaggaatttagttaatagaaatatttataaatgttttttgtagtattgttagtaatggtagaaaattggaaatttaaatagttattattagaggaatggttgaatgaattatattttatttttaaattggaatgtaatgtagttatttaaaaaaaatttatttgttttgatttagaaagatttttaaaatatattaaataaaagaatatatatagtatgattttatttatagtaaaagattggtatgtatgtatatacgtatgtaaataaataaaagatttggaagtaaatttgtttttgagagaattgaagggtgggggggtgaagtgggtttttcgttttttattttatatatttttatatagttttaattttttatatttgttgtattgggattttttttttttaagttagaaagaatatattagtggttattttgagtgggaggtttatggattttttatgttatttttttaatttttttatgtagttttaaatttttatagaaataattatttttattttagtaaaaaaagtaatataaaataaattaaaatgtttgtatttttgggatttggtataggaaattttataaaattttttaattttgtatgtggatggtttatttgaaatggtttgggagtattgggttttttggaaataaagtataaagtgtaataacggttataaaattatattgaggaaacgatttaataaatatttattgattgtcgattatgtgtttagtatattgtatttgtagtgataatagtttttttattaattattttaaggttttagtgatagatttataagttgtttttttattttattttgtaggatttttttttttttttttgtttgttttatttttgggataattcgttttatttaattttttgtatcgttttattttttaagagtttttttgtaggggtagagaggttttattttattattgcgttttttgggaaggttattaggattgttggttaaagtgggaattaggattttttgtgagttaagaatttgtgtatttatatgtgtgttatatatattttttaaaaaattgtaacgatattaggttgagtagtcgttttcgggtggtgaattatgtgtatttttaaattttatattatattgttattttttaaatgttcgaaattgaatatgtagattgttgttattagtagaaaaataaatattatttaaatattttatttagtaaagtaatttattgggcgtttttgttaagtacgtatttgtttagatgtgattttatagataaaatttatttggggtttttttttatagataattaggtagtggagattgagtgtttgaatggatagattagtatttagattattatttttagtatttgttttttttaatttagggtcgtggtttttaaacgtttttcgttttacggttatttttaggggtttttcgagatcggtttagatagatagatatataaaaatatatatatagttatgagcgtttattatttttttattaggcgtagtataggcggtttttcggtattgagatgggggggaggagggagagagcgcgaggggggaggggaaagtagagaacgaaagaggcggaggcggttttcgaatttcgttttggtttttattattattatttttgggtttttagtttttatttatatattaatttttaacgatatcgggtaatttttttttttttttttttaaacggttatagcgagacggtagacgacgattagaattatttttgtttacgtaagcgagtaattacgtgagcgtttacgttatgtgagatttcggttacgtgagtaattttcggtttaaattcgggattattaaggtgtcgtatttttttttggtatggaaatagggcgggttaatattaagaaaggaagagggtgattggttagcggaacgttttacgtgattgattattggtttatttttggggataatcgttttagttgttagagaaataataacgttattatttaataagttatcggtgattggttcgtttttgaggttaattttaaaagtttaggttattcgcggaaatttatgttgttcggttatcgtgataatgtagttgaggaatttagaattatatttgggttgcgcgtttgcgtttcgttttttggttttcgttttttgggatatttttggggttagagtattggataatggattggtaaggacgtttattatgggttggttgtattgggagcgttttatgtgtaattttgattgttaggaagagttagatttttgtattaggtattagatattgggtatttttttttttttgtttttttatgtgtttgggtgtgtttggggaattggagagttttaacgggaatagttgagttcgagggagagtttttttattcgattttgttgttgtttttttatttttagtaaattgtttcgaattaggattagttttaaattttttttgtgtgattttttttgggatgggagttcggttagcggtttttgtttttttttttttttttttttttttcgttttttttttttttttttttttttttttttttttttttttttttttttttttgttcggttttttttttttattgttttttgtagagtagggttattttataggtagtgtgtttaaagtagttttgttcggttttatttagattttttttgtgaatttttgttttttttttgtcgggtgttaatcgttagaatatttagggtgggtaggaggaatggggaattaagattcgtgttattttttttttttttggggtcgtggatttttcggtagtatttcgagggagttagagagattataaggtcgttgagattttttttatttcgtttatgagcgtggtattaggttggaaggttgatatggaggaattttatatatttatatttttgcgtgagggttgaggttggattagataggtattgaatatatttgatttttataatttttatttgtaaattgggattataattttttaattttagggagttgataaaaaaaatttgaaaaatagtttttattttatataggtgagtttttaaggagataatttatttaaagtatatagtatagcgtttgattatttaattgcgtttatagagtaaatgtttaatgggaaaatgaatgtaaatttataaatttgaatgaatatgtgtatttttttggagagaggatatttatttttttttaaatttttaaagggttttgtgatttaaaaaaggttaggaattattgatagatgttggtaaaaggtggtagttatagtatatttttgtgtttataagttatttttatgaatatttttatagataaagttaggatgttggttagatattatagaagaaattggttttgtaagttttatgtgattttgtggtatagtatgtgtggtaattttgtttattacggatttttttttattggtatttgtatttgattataaaattaatgtatgattattgtaaaaaatgtagataaagaagagtaaaatgaaaataaagatttttttttatcgttttattatttagaaataattatggtttaaatgttaatatataattttataattgttttttatataaatgaaaatatagatttttttattttattattttttataaaaaatggattatgtttatgttatgtttggttaatggtaagattttggtatttagtttgggtttaaattttgttttattgttatttagttttgtgatattgggtaaattatattttttttttttttttttttttgagacggggtttcgttttgtcgtttaggttggagtgtagtggtacgatttcggtttattgtaagtttcgttttttgggtttacgttatttttttgttttagtttttcgagtagttgggattataggcgtttgttattacgtttggttttttttttttttttttttttttttagtatagacggggttttattatgttagttagggtggttttaattttttgatttcgtgattcgttcgttttagttttttaaagtgttggtgtgagttatcgtgtttagttttatttttttttttgagagggggttttattttgttatttaggttggagtgtagtggcgcgatttttgtttagtgtaaattttatttttcgggtttaagtagtttttttgtcgtagttttttgagtagttgggattataggtatattattacggttagttaatttttgtatttttagtagagacgggttttattatgttgtttaagttggtttcgaatttttggttttaagtgatttgttcgttttggttttttagagtgttgggattataggtgtgagttatcgtattcggtttttttttttttttttagtttattatattttgtaaatatagtggttttttttatgtgttggttttgatatttatgtaattaaatatattagttttttttttttgatttttgattttggggttatgttgagaaagtttttttttatttgaagataatatagtatatacgttttttattagtatttttgtggatttttaaaatatttaaatttttagtttatttgaattttgtttttttattagaaatgttatatttaataaataataagttttatggtattagatggttggaaggatttttttcgaaattttgtttaattttattaatttgtgtatttttattttaatgttaatagttttatattagttttttttattttttttttttttttttttttttttttgagttggagtttcgtttttgttgtttaggttggagtataatgttacgatttcggtttatcgtaattttcgttttttaggtttaagtaatttttttgttttattttcgcgagtagttggaattataggtatgcgttattacgtttagttattttgtatttttagtagagatggggtttttttatgttggttaggttggttttaaatttttagttttaggtgatttgtttgtttcggttttttaaaatgttgttattataggcgtgagttattacgtttagtttttattttttaatgaatgtatatgtatgtaattttttaggtgaattttttgtaatgttgtgttaagttttttaaaaagtttttttggaagttgggtaggtggtttacgtttgtaattttagtattttgggagtttgaggtaggtggattatttgaggttaggagtttaagattagtttagttaaaatgtaaaattttgtttttattaaagatataaaaattagtcggatgcgatggtatatgtttgtaattttagttattcgggaggttgaggtagaagaatcgtttgaatcggggaggtagaggttgtagtgagttaagatggcgttattgtattttagtttgggtgatagagggagattttattttaaaaaaaaaaaaaaaaaaaaagataaaaaggaaatttaagtatttttgggttttgttaaggattttgttaaatatataaaggattgtagggaaaattaatttatttttaatattgagtatgtttatttaagagtaaaataatatttttttatttatttaaattatttaggagtattatagttttaatatatgggttttgtacgtattttaaatttatttttaggtattttaggttgtttagttgtttttgtgaatgggatttttttttttaaataggattattgttgatatttgttgattatgttaattttgtagtttttgattttattgaattgtttttttagatttaatattttttttaattttattatatattttttatttttattttgtttggggtttttagggcgggaatattaacgggataagagagataaaagaaaatttggaaaaataatttattttattttatattgtttgtgattattattatattattattgggttggaaaaaattgtgaaattttaaggtgtttaataaatgggaggtatttaagtgtttatttaatgaattgtaatgattattggaattttttttttagt

SEQ ID NO: 758 - DNA, 8979 bp, Artificial Sequence
  chemically treated genomic DNA (Homo sapiens)
attgaaagagaaattttaataattattataatttattaaatgaatatttaggtattttttatttattaggtattttgggattttataattttttttaatttagtaatagtgtggtagtaattataagtaatgtaaggtaaaatgaattgtttttttagatttttttttgttttttttatttcgttaatattttcgttttaaaaattttaaataaaataggaatgagaaatatatgatgaaattgaaaagagtattagatttaagaagatagtttagtaaagttagaaattataaagttaatataattaatagatattaataataattttatttggagaaaaagattttatttataagaataattgaataatttaaaatgtttagagataaatttaagatacgtgtaaggtttatatgttaaaattatgatgtttttaaatgatttgaataaatggagaaatattattttgtttttggataagtatatttaatattaaaaataagttaattttttttgtaattttttgtatatttaataaaatttttaataaagtttaagagtatttaggttttttttttatttttttttttttttttttttttgagatggagtttttttttgttatttaggttggagtgtagtggcgttattttggtttattgtaatttttgttttttcggtttaagcgatttttttattttagtttttcgagtagttgagattataggtatgtgttatcgtattcggttaatttttgtatttttagtagagatagggttttgtattttggttaggttagttttgaatttttggttttaagtgatttatttgttttagatttttaaaatgttgggattataggcgtgggttatttgtttagtttttaaaagggttttttaaggaatttggtataatattataaaaagtttatttaaaagattatatatatgtatatttattaaaagatgaaggttgggcgtggtggtttacgtttgtaataatagtattttgggaggtcgaggtaggtagattatttgaggttgggagtttgagattagtttgattaatatggagaaattttatttttattaaaaatataaaatagttaggcgtggtggcgtatgtttgtaattttagttattcgcgaggatgaggtaggagaattgtttgaatttgggaggcggaggttgcggtgaatcgagatcgtgatattgtattttagtttgggtaataagagcgaaattttagtttaaaaaaaaaaaaaaaaagaaaaaaaagataaaggaagttagtgtggaattattagtattagaataagaatatatagattaatggaattaaataaagtttcgaaagaggtttttttagttatttgatattatgggatttattatttattaaatgtggtatttttgatagaagaataaagtttagatggattaaagatttaaatattttaaaaatttataaaaatattagtaagaaacgtatatattgtattatttttaggtaggaaaggatttttttagtatgattttaaagttagaaattagaaaggaaaaattgatgtgtttgattatataaatattaaaattaatatataggaagaattattgtatttgtaaggtatgatagattaaaaaagaaaaaagaggtcgggtgcggtggtttatatttgtaattttagtattttgggaggttaaggcgggtagattatttgaggttaggagttcgagattagtttgggtaatatggtgaaattcgtttttattgaaaatataaaaattagttggtcgtggtggtgtgtttgtaattttagttatttaggagattacgataggagaattgtttaaattcgggaggtggagtttgtattgagtagagatcgcgttattgtattttaatttgggtgatagagtgagatttttttttaaaaaaaaaagtaaggttgggtacggtggtttatattagtattttgggaggttgaggcgggcgaattacgaggttaggagattgagattattttggttaatatggtgaaatttcgtttgtattaaaaaaaaaaaaaaaaaaaaaaagagttaggcgtggtggtaggcgtttgtagttttagttattcgggaggttgaggtagaagaatggcgtgaatttaggaggcggagtttgtagtgagtcgagatcgtgttattgtattttagtttgggcgatagagcgagatttcgttttaaaaaaaaaaaaaaaaaaaaagtgtaatttatttaatgttatagggttaagtaataatgaggtagaatttgagtttagattgggtgttagggttttgttattagttaaatatgatataaatatgatttattttttatggaaaataatgaaataaagaaatttatgtttttatttatatagaaaataattgtaaggttgtatattaatatttaaattatgattatttttgggtggtggaacggtggggggaaatttttatttttattttgtttttttttatttatattttttgtaatgattatgtattagttttataattagatgtaaatattaataaaaaaaaattcgtgatgggtaaaattgttatatatattgtattatagggttatatgaaatttataaggttaattttttttgtgatgtttgattaatattttgattttatttataaagatatttataggaataatttatggatatagaaatgtattgtgattgttattttttattaatatttattagtgatttttaattttttttaaattatagagttttttgagaatttgaagaaaggtaaatattttttttttagaaaaatatatatatttatttagatttgtagatttatatttatttttttattgaatatttgttttgtaagcgtagttgaatggttaagcgttgtgttatgtattttaaataggttatttttttgaaaatttatttgtgtgagataagaattattttttagattttttttgttagttttttgaaattaaaaggttgtaattttaatttatagataaggattgtgagggttagatatgtttaatatttatttaatttagttttaatttttacgtaaaggtgtaaatgtataaagtttttttatgttaattttttagtttgatgttacgtttatgggcgaggtgggagagattttagcgattttatggtttttttaattttttcgagatattgtcgagaaatttacgattttaaaaggagaaaaaatggtacgaattttagttttttattttttttatttattttagatgttttaacggttagtattcggtagaggaagagtagaagtttataagaagggtttgaatagaatcgggtagggttattttgggtatattgtttatggggtggttttgttttgtaaggagtagtgaaaaaagagaatcgggtagggagagagagaaagagagaggaaagaagagaaagagaaagagaaggagaacgagagagagagagagagagaaagaaataggggtcgttggtcggatttttattttaggaaaggttatatagagaaagtttagggttagttttgattcgggatagtttgttggggataaaaaagtagtagtagagtcgggtgggggagttttttttcgggtttaattgttttcgttgagattttttagttttttaaatatatttaaatatatggaaaagtaaagggaagggagtatttaatatttgatatttgatgtaggaatttggttttttttggtagttaaggttgtatatgaagcgtttttagtgtagttagtttatggtaggcgtttttgttaatttattgtttagtgttttagttttagggatgttttaggaaacgagggttaggaagcgaagcgtaagcgcgtagtttagatgtagttttgggttttttagttgtattgttacggtgatcggatagtataaattttcgcgggtaatttgggtttttaagattaattttaggggcggattaattatcgatgatttattaaataatgacgttattgtttttttggtaattgggacggttatttttagaggtagattaataattagttacgtaagacgtttcgttaattaattatttttttttttttttgatattgattcgttttatttttatattagaaggaagtgcggtattttagtgatttcgagtttaagtcgagagttgtttacgtgatcgagattttatatgacgtaggcgtttacgtgattattcgtttacgtgagtagaagtagttttggtcgtcgtttatcgtttcgttatagtcgtttgagggaagaaggaggaaaattattcggtatcgttagaggttggtgtgtgggtgggaattggggatttaggggtggtgatgatgaagattagagcggggttcgggggtcgttttcgtttttttcgttttttgttttttttttttttttcgcgttttttttttttttttttttattttagtgtcgggaagtcgtttgtgttgcgtttggtggggaaatggtggacgtttatgattgtgtatgtgtttttgtatatttgtttgtttgggtcggtttcgggggatttttaagggtgatcgtaaggcgaaaaacgtttgaaaattacggttttgagttaagaaaaatagatattgaaaatagtggtttgagtgttggtttatttatttaggtatttagtttttattgtttgattgtttgtaaggggaggttttaagtgaattttatttgtagagttatatttaggtaaatgcgtgtttgataaaggcgtttaataaattattttattgaatagagtatttgaataatgtttatttttttgttgataataataatttatatatttaatttcgaatatttgaaaaataataatatagtataaaatttaaaaatatatataatttattattcggagacgattgtttaatttgatgtcgttatagttttttaaaaaatgtgtataatatatatataaatatataaatttttaatttataaagagttttggtttttattttagttagtagttttgatggtttttttaggagacgtagtaatgaagtagaatttttttgtttttatagaagggtttttaaggaatagagcggtgtagggaattaaatgggacgggttattttagggataaggtaagtaaaaaaaaaaaaaaaaattttgtaaaatgaaataaaaaaatagtttgtaaatttgttattgagattttaggatggttaataggaaaattgttattattgtagatgtagtgtgttaggtatataatcggtaattagtaaatgtttgttaaatcgtttttttagtgtagttttatggtcgttattatattttgtattttgtttttaagaggtttagtgtttttagattattttagataaattatttatatataaaattagaaaattttataaaattttttatattaaattttagaaatgtaaatattttaatttgttttatgttattttttttgttgaagtaaaagtaattatttttgtagaaatttaaggttgtataaaaaaattggaaaaataatatggaaaatttataaattttttatttagagtaattattaatatgttttttttaatttaaaaagaaaaaattttagtatagtaaatgtaaagaattaaaattgtatagaagtatatagggtaaaaagcgaaaagtttattttatttttttattttttagtttttttaaaaataagtttgtttttagattttttatttatttatatacgtatatatatgtatgttaattttttattataagtaggattatattatgtatatttttttatttaatgtattttggagatttttttgggttaaggtagatagattttttttaaatggttgtattgtattttagtttaaggataaagtataatttatttagttatttttttaatgatggttatttaggtttttaattttttgttattattaatagtgttgtaaggaatatttgtaagtatttttgttgattagatttttggaaggattttagtagtgttaaagggtatgggaatatgtattttgtatatagttgatattgtaaagtagttgtgtttttgggttatttataattatagtataagtaattttttatgttattaaatatttttgtaatttttaaaattaaatgtataatattcgtttttttaataaagtattttttaaagaatatatagttttataaatttgtttgaattttagattatttttttagggtatataattgaaatgtatttgttgttaaaaggcgtgatatatattattaaattgtttttaggatatagtggggtttattaaaaaggaaatagtttatattaattattatttttttggtagtgtattagtttgtgaattgtatagtattgatttattgttgttgtttaatttttattattttgatgggtgaaaaataacgattagttttgattttaatttgttggaagattgattaaatttgaatattttttagattttttttttgtatttttttatatttgtatttttttatatttaatttgttattaagtttcgtagattttattttttttggtatgtgtagatatattttttttttattttatttttgttgttttaggcgatttttttaatatatatttatgagataagttttaattaatttttttagttttacgtcgatttttttttgtttgagtgttacgttgttgttagggtgatttgtttgaaagagttttggtgaagttattttatatatttttcggtttaaaagttttaaaaggcgtttagtgtttgtatattaaagtttttgggatttgatttatgttttgttagtttttttatttgttttttttttttttatttgtgttttattataattaagaaaaaaaaatgtttatggatttttgggtagattagtttgttttatttaattatttggtttttaattaatagaattgattaattagtttttttttgatattatgtttatattttatttagagggttatggtaagtataatgtatatttgtatttatatttttaataatgatattcggtgtttttgtaggattataagtttattttgggtttattgatttttgtatgttagagtcgaatattggatatggtaattaaaaaatgtttttaaaatgaatgtgtgaatttttaataatgttttttttttatttatttttggagtttaaatatttttttgattttattgatttgtatatatttttatataatgaagatattatataaagaatttatataatttgtgttttgtttgtgttttaattgttgtttaattttttgatttagtgaagttttttatgtttatatatttagatatagttattttttatttgttgatattttttattgatttgttgttgttaattttttttttttttttttttttttttttgagacggagttttgttttggtcgttgaggttggagtgtagtggcgtgattttggtttatttttattttttgggtatataaaagcgatttttttgttttagtttttcgagtagttgggattataggtatttgttattacgtttagttaattttttgtatttttagtagagacggggttttattatgttgattaggttggtttcgaattgttgattttaggtgatatatttattttagttttttaaagtgttgggattataggcgtgagttatcgtattcggtcgattgttgttaatttttaatggtatttaatacgtaataggtattgaataaataattgttaaaaaatgaatgagttaaaaatttggtgaattttttgtttatatagacgttttatagaaaagttgttagtataattgaattttttattaatagtttgttttttttttttattatattacgagtatttttttatgatagtagtttttttttttttttttttagttatattaaaattgtattgagttaaatttgttattaagagtttaataattattatgatgttgagtacggaaggtagggaggggttcgtggtgaaggttaggggtttattttggttttgtttagtcgatgaagtgatgcgttttttttttgattgtaagatttaaaatggtatattaggtattcgttttatttatattagagaaggtagattaagtggtgaagtatttgttgaatttgaatttgaagaggaagtgaaattggttttgaagaaggatagagaaattatgggatatagatacgttgaagtatttaagtttaatagtgttgaaatggattgggtgttgaagtatataggttcgaatagttttgatattgttaacgatggtttcgttcggtttagaggatttttatttggttgtagtaaggaagagattgtttagttttttttagggttggaaattgtgttaaatgggatgatattgttagtggatttttaggggcgaagtataggggaagtttttgtgtagtttgttttataggagatagttgagaaggttttaaagaaatataaggaaagaatagggtataggtatattgagatttttaagagtagtcgagttgaagttcgaatttattatgatttttttcgaaagtttatggttatgtagcggttaggtttttatgataggtcgggggttggtagagggtataatagtattggtagaggagttgggtttgaaaggatgaggcgtggtgtttatggtggagggtatggaggttatgatgattatggtggttataatgatggatatggttttgggtttgatagatttggaagagattttaattattgttttttaggaatgtttgattatagatacggagatggtgggtttagtttttagagtattatagggtattgtgtatatatgagggggttattttatagagttattgagaatgatatttataatttttttttattttttaattttatgagagtatatattgaaattggattcgatggt

SEQ ID NO: 759 - DNA, 6235 bp, Artificial Sequence
  chemically treated genomic DNA (Homo sapiens)
attttatagattttttgtaattttatatgaaaataagtatatttatattttttaaaaatttatgtaaattaaaaattggtttggaaaaggttaaaagagtttttttgtttttttgataatgataatagtatattttagtagtatgtattataaatagtatacgatataaaaagatttgaatttttttaattaattttagtaataatattagaaaatgtttaggttggaagggaaattttattttttttagatttttatttgtatagatgagaggaaaggattttttaatgattattataattttgtttagattgatttagtaggtagttttttgagatggggttaaagttttagttttttggttattgtttttttattataaagtttttagggatttttttgaataagattaagttaaattttaagtataatttaattgtagggagaaaattttttttgtattttttgttgtttaatatgtatattgaagttaagaaataattaattatttgtttttattaattaagaaatttaatattgggaggtcgaggcgggcggattacgaggttaggagatcgagattatttcggttaaaacggtaaaatttcgtttttattaaaaatataaaaaattagtcgggtatagtggcgggcgtttgtagttttagttatttgggaggttgaggtaggagaatggcgtgaattcgggaggcggagtttgtagtgagtcgagatttcgttattgtattttagtttgggcgatagagcgagattttattttaaaaaaaaaaaaaaaagaaagaaatttaatagataaaaagtttaaggattttataggtagattcgcgggttttggggaaagggtgtgttaagggagaagaaaggatgtaatgaaggttggtattaagttttaggaagaattatattgaaggtagttattagttttatttaggttaagtggtgtagtagatagttttgaaatattattggagtttaaattttagtttagttattatttgttatttagtattattggattttagttgttttatttataaaatgtggtaaagattagtattgttttacggatattagtttaaagtgtttggtatagaatgtgatatattgggatttaagcgatagattattaaggttaagggatatttaagttaaagagagcggtaaaggtaggggtagataatttagaagtgttttttttagagttttttgggtattttttttgttttttttatttgatttcgcgaagtcgttgatttaagggaaattgggaatggcgtgattatagagaaaatgatgtattttttggtttttggaggttcgaaatttatcgtgtttgaaacgattgcggtaattttagtagtagtagtagtttagaggttaggagtgatggattgagattttgttttaagaagttttttttagattgattttcggttcggagttcgtataaagcgttgagttacggggaggcggtgtcgcgcgcgggggaggcgggttcgcgtagttacgtggcgggggttgtattataataattgcgcggcgtgcgtcgttcgcggtttatatcgttttttttcgcgataggtcggtttttcgagtatgtttagtttggttttacgattgtacggcgtttttttatgcggatttttacggtttaggtttttcggacggttttgggggcggggtttgtgttggttcgcggggttgcgaggcgaggttgcggtgttagggcgtcgttgggtagagatgggtttttggagagcgggtttcgcgttttttcgcggaagatattattgggaatcggtttttggttatggtttagggaagagttgattttgtaagatatgagtttttttttttttttttagttatcgttatagttttgatggagttgtttgttgaaaatttatttttagatgtcgaaatttggttttgggtgtagtttatagaatgaaatcgagtagtagtggatttatgtaggtaaagtattgttagaggggagtaatttttgttaaatatgattttagttgattcgtgatgggatttttgttttttttttgtaatagaaaaggttaaagatattgagagattaaggtttaaattgggtataattgttttgtggtgtagtagcgtcggcgttttttttgggattgtttaaagttttgggattttcgttgggggagttggtttagaattcgggggggtaggatagggtgagggaggttttttatgtgagtgtgagtcgggatttaggatagagtaattttaattatagtgttaaatttttattaggtttagtgtcgcgtagggttttggttagattagaatttagtttattattgaatcgtttaggtttatgatttttaataggtgtatgggaaaagtgtatggtgtgtagtaggtgtatgggaaaattgttttgtaaagtgtaaattaaggtttatattagtattgttttaataaagtggaatgagagttatatatgtaattttaaattttttagtagttttttttaaaattaaaaataaaagtgggtgggggtggtggtaaattaaataatatattatattatatttaatttaaaatttttaaaatgttatatcgttatgtaattaatataaaatttttaatgagatatttatatttttttattttattgttttagaatttggtgtgtgatttatatttataatatatttgggttattaagtttttattggaaatatttgatttgtaattatattttataaaatttatagttaaaaatggatttatatttttaatttgttttaaatttatttaaaagttttttagtaattgaatggaatattagtttttaaatttatatttaaattgattaaattaaaatgaaaatttggtttttcggttatgttagttatattttaaatgtatattggttaatgtggttgatggttgtcgtgttgaataatgtaggtttatgagaatgttagatgatattatgagaataatttaatgatttttggatgttttatttatatgggaaatattgttttttttttttttttattatttgttttttacggagaagttaatatttattaagtatatattttatattaagtatttttttagaattaaaggtataaaaggtataagttatttgtgttttagaggaatttattatttagtgtggagttatttttaaaatgattttattattaatgtacgaatgtaattaaaatatagagaggaataattgtgatttaagagatgaatatgagtgtgttagatggagaattttaagtaggaaaaataatagagtgttagaattatatatagatttggtgaggttggtgggagggtaaaggaggttgttgaaaaggttgtggaaaaattagaatgtggtttgatttttattttatttgtgtgatgaggatggaaatatttttttttgagttttaaatatttttattatatatagatatatatatatagatatatagatatatatatatattattgtggaaattttagttagattttgggtatttatgtttttaagttttgtgaggggtatatttaatatgaaggttgtgggagaagagaattttgttattatgtatttatttatttagtaattaataagtgtttattaaatgttaattttgtagtgcgagggaagagggtatgataaatatatattttttgggtaggtatatgtatgatttagttgtttttattttttttttgataggttattgttttgttaatatatatttattaaataattatttgggggtacggtattttttttttttttttttttttcgagataaggttaattttaggtgtttttattatttttaattttattttacggtaggtttataagaacgttattttgattatttaagggatgaattttaggtttagatggaggataaatttttggagatggttttttatatggtttgtttggagattttttgtaataaatggtgttcgtgttatttagagaatataggttattagttaattaagatagtagggaataatgatttatatatgttgataaattgattttttttaataattaggttaattttttggttaatattatatatatgtatattatgtatataattacgatatttataaaagatagaattaatttaattttatgtagatatgggaagaattcgttttaagttttatagttagtaagtgatggagtttagagttgaattgttttattttattattatgttaatattttttttaatatattttgtcgtttttattttaagtgtgaggttttgtttaattaaaatataatatggtgagttcgttattgatttaaataattaatttttttttcgaattttaagtttattttttttgattaggaaaaaaaatgtattttgatatgtcgcgtttgcgtaaagcgaggtcgatcgtacgtttttttttcgcgagttgttttttttaattgcgatttaattatttttgtatacgttttttgagttttcgcggtttttatcgggttttaggttacgttttcgtcgttgtatcgtttttttttttcgttttcgttcgtagtttataaaatttggagcgtaggatcgcgtttaggagcggcgagttagcggacgtaaagattgggtatgtttcgcggcggcgtaggttttggttataagtaggaagaagttagtgtattagatcggtaaagagaagcgggagtcgtcgcggtagcgcggtcgtggggttcgtcgtcgtcgtatcggagcgggaggaggagtagcggggagggcgaggtcgtcgggtcgagagtcgtttcgtttgttttcggttttttgttttcgttttcgcgcggtgcgtcggatttagggtttgttatttgggcgttaggggtcgtcgtcggggagtcggagcgggtaggatttttttttcgtcgattgcggttcgagagcgttttcgcggggtggagcggtagtcgttttttgcgggcggttgagtgttcgtttcgcgttcggagcgggcgatcgtcgttagttcggaggaggaggaggaggaggagggggcggttatggggttgttgttttagggttcgtcgttgagttgggaggaaattaagcgttatgtcgattacgtgcggcggtacgggattttttagtttttgtatatttattacgtcgttaaggatcggtataaggacgtttttaagtggggcgatgaggtgagcgttcgcggttttcgttttcgtcgggtattcgtgtttggtcgttcgcgttgtttttgttttgttttacgttttcggttttatcgcggttcgcgttttttattgcgttcgggggttttcgagcgtttttcggtttcgggagtatcgtttttgttttcgtttagttcgcgtttagggttatttttttgattagattttttttttgtttatttatttttttgggtttttttttttattttataaatacggattgggcgttgggagggcgtgagtatgaaaaagtgatattaggtgttgcgagtttttaatttagtgtatttgtagatcggtaattattatgatttattttataggtttaaaattcgtttttgcggttaatatgaaagagatttaagtttttttagtaggtttgttgtttttagaaattaggtttttaggatgtttatttttgttttattttatgtaggtgttttttttttaaatttttttaattttttatttttttttttttttaaaatatatatattttatagttataaattgaaattagtaaattacggtttagttttttatatgggggaggaatttttttttttttgtttaattttaagtgggaatgtatttagagttttaatattaggatttgtttgtgtttttttatggtttaggtttagtaattaaattttataaattagtgttttgtttagagatgaaatgtttttagatttttagtaggttgaattattgtttattggaatgatttggaatgtagtaatgttaaaattgttgatttagtgttatttgttaaaattttttgtgttttttttttttgtttttgaaaattacgtgtgtatgtagtatatattaaatgattttttgagaagtttatttttgtttttgtttttagtttttgttttagatggtttgttatttgtgtaaattgtttattttttggttagtgttgttattaattttggtttaagtgttgacgtgttgt

SEQ ID NO: 760 - DNA, 6235 bp, Artificial Sequence
  chemically treated genomic DNA (Homo sapiens)
atagtacgttagtatttaggttaagattgataataatattggttaaaagataaataatttatataggtggtaagttatttaaggtaaaagttaaaaataaaaatagagatggattttttaagaagttatttaatgtgtattgtatatatacgtaatttttaaaaatagaaagggaaggtataaaaagttttggtagatgatattaaattaatagttttaatattgttgtattttagattattttaataaataatggtttaatttattgagaatttagagatattttatttttaggtagaatattggtttgtaaagtttagttgttggatttaggttatggaaagatataagtaaattttaatgttgaaattttaaatgtatttttatttagaattaaataggaaagggaaggttttttttttatgtaggaaattgagtcgtaatttattggttttaatttatagttatgaagtgtgtgtgttttggaggggagggaagatgagaagttggagaggtttaaggaaaagatatttgtatgaggtagggtagaagtggatattttgaagatttgatttttaaaagtagtaggtttattaggaaaatttaaattttttttatattgatcgtaaaagcgaattttgagtttgtaaggtggattatggtagttgtcggtttgtagatatattaggttgaagattcgtagtatttaatgttatttttttatgtttacgtttttttagcgtttaattcgtgtttatggaatgaaggggaaaatttaaaagaatgaatgaataagaaaggagtttagttaggaggatggttttggacgcggattaggcgaaagtagggacgatgttttcggggtcgggaggcgttcgaggattttcgggcgtagtggagaacgcggatcgcgatagggtcgggggcgtagggtaagataaaggtagcgcgggcggttagatacgggtgttcggcggggacggggatcgcgggcgtttattttatcgttttatttgagaacgtttttgtgtcggtttttgacggcgtggtagatgtgtaggaattggaggatttcgtgtcgtcgtacgtggtcggtatggcgtttggtttttttttagtttagcggcgagttttgggatagtagttttatggtcgtttttttttttttttttttttttttcgggttgacggcggtcgttcgtttcgggcgcgagacggatatttagtcgttcgtagaaggcggttgtcgttttatttcgcgggggcgttttcgggtcgtagtcggcggagggagggttttgttcgtttcggtttttcggcggcggtttttggcgtttaggtgatagattttgggttcgacgtatcgcgcggaggcgaaggtagaagatcgagagtaggcgggacggttttcggttcggcggtttcgtttttttcgttgttttttttttcgtttcgatgcggcggcggcggattttacggtcgcgttgtcgcggcggttttcgtttttttttgtcggtttggtgtattggtttttttttatttgtgattaaaatttgcgtcgtcgcggagtatgtttagtttttgcgttcgttagttcgtcgtttttgggcgcgattttgcgttttaggttttatagattacgggcgaaggcggggagaggaggcggtgtagcggcggaggcgtggtttgaagttcggtgggaatcgcgggggtttaggaggcgtgtgtaagggtgattgggtcgtagttgaggggagtagttcgcgagaagggggcgtgcggtcggtttcgttttacgtaaacgcgatatattaaaatgtatttttttttttaattagaagagataaatttgggattcgggaagaaagttgattatttgaattaatgacgaatttattatattatgttttagttggatagggttttatatttagagtgagagcggtagaatgtgttgagaaaagtattaatatggtagtgaagtgaaatagtttaattttaggttttattatttattgattgtgagatttgggacgagttttttttatatttgtataaaattagattaattttattttttatagatgtcgtaattatgtgtatagtgtatatgtgtatagtgttggttaaaaaattgatttggttattaagaggaattaatttgttaatatgtgtaaattattattttttattgttttgattaattggtgatttatgttttttggatggtacggatattatttattgtaaaaagtttttagatagattatatgaggaattatttttaaaagtttattttttatttaaatttaaaatttattttttaagtgattaaaatgacgtttttgtgagtttatcgtggggtggggttgaagatagtgggaatatttagagttggttttatttcggagggaaaggagaggaaggaggtatcgtgtttttaagtgattgtttaataaatatgtgttgatagagtaatgatttgttaggggaaaagtgaaggtaattagattatatatgtatttatttagaaagtgtgtatttattatatttttttttttcgtattatagagttaatatttagtaagtatttattaattgttaaatgagtgagtatatgatagtaggattttttttttttatagtttttatattggatgtgttttttatagggtttgggggtatgaatatttaaggtttggttgggatttttataatggtgtgtgtgtgtgtttgtgtgtttgtgtgtgtgtgtttgtgtgtggtagggatgtttgaagtttaggagaagatgtttttatttttattatataggtgggatagaaattaaattatattttaatttttttatagtttttttaataattttttttgtttttttattaattttattagatttgtatatggttttggtattttgttgttttttttgtttgaaattttttatttgatatatttatgtttattttttgagttatagttatttttttttgtgttttggttgtattcgtatattaatgatagagttattttaaagatagttttatattaaatagtgaatttttttggggtatagatgatttatgttttttgtatttttaattttagaaaagtgtttggtatagagtgtgtgtttaataaatgttagttttttcgtgaaaagtaggtagtgggagagggggagaaatagtgttttttatgtaggtaagatatttaaggattattgggttatttttataatgttatttgatatttttatagatttgtattgtttaatacgatagttattagttatattggttaatgtatatttgaaatgtggttaatatgatcgagaaattaaatttttattttaatttaattaatttaaatgtaaatttaaaaattgatattttatttagttattggaaaatttttaagtaaatttgaaataagttggaaatgtgaatttatttttgattgtaaattttatgaaatgtaattatagattaagtatttttaatgaaaatttagtggtttagatgtgttgtgagtgtaagttatatattagattttaagatagtagaataaaaagatgtaaatattttattaaaagttttatattgattatatagcgatatagtattttggaaattttgagttaaatatgatgtggtatgttatttaatttattattatttttatttatttttatttttaattttaaaggaggttattgaaaaatttaagattatatatgtggtttttattttattttattgaaatagtattgatgtagattttgatttatattttgtaaagtagtttttttatatatttgttgtatattatatattttttttatgtatttgttaggaattatggatttgggcggtttaataatagattaaattttagtttagttaaagttttacgcgatattgaatttagtaagagtttaatattgtaattggagttattttgttttagatttcggtttatatttatataagggattttttttattttattttattttttcgaattttgaattagtttttttagcgggggttttagagttttggataattttaaaaagggcgtcggcgttgttgtattatagggtagttatgtttaatttaaattttgattttttagtgtttttagttttttttgttataaagaaaaaataaaaattttattacggattaattgaagttatatttaataagagttatttttttttgataatgttttgtttgtataggtttattattgttcgattttattttgtagattgtatttagggttaggtttcgatatttggaagtgagtttttagtagatagttttattagggttgtaacgatagttgaaggggaaagaaggagtttatattttgtagaattagtttttttttagattatgattaaaggtcgatttttagtagtgtttttcgcggaaaaacgcgagattcgttttttaggaatttatttttgtttagcggcgttttggtatcgtaatttcgtttcgtagtttcgcggattaatataggtttcgtttttagagtcgttcggaaaatttggatcgtggagattcgtatggggggacgtcgtgtagtcgtgaggttaagttgagtatgttcggagagtcggtttgtcgcgggaggaagcggtgtgggtcgcgggcggcgtacgtcgcgtagttgttgtgatatagttttcgttacgtgattgcgcgggttcgtttttttcgcgcgcggtatcgttttttcgtgatttagcgttttgtgcgggtttcgagtcggaggttaatttgggggaggttttttagggtaaagttttagtttattatttttgatttttgggttgttgttgttgttaggattgtcgtagtcgttttagatacgatgggtttcgggtttttaaggattaaaaaatatattattttttttgtggttacgttatttttagttttttttgagttagcggtttcgcgagattaaataaggaaaatagagagagtgtttaggggattttgaggaaggtatttttaggttatttgtttttgtttttatcgttttttttggtttgagtattttttgattttggtggtttgtcgtttgggttttagtatattatattttatgttaggtattttgagttggtattcgtaaaatagtattaatttttgttatattttataagtgaggtaattgagatttagtaatattaagtaataggtagtggttaagttggggtttgaattttagtgatattttaaagttgtttattatattatttagtttgggtgaagttggtggttgtttttagtgtgattttttttgggatttgatgttaatttttattatattttttttttttttttgatatattttttttttaaaattcgcggatttgtttgtgaagtttttaagttttttgtttgttaaattttttttttttttttttttttttgagatggagtttcgttttgtcgtttaggttggagtgtagtggcgggatttcggtttattgtaagtttcgtttttcgggtttacgttatttttttgttttagttttttaagtagttgggattataggcgttcgttattatgttcggttaattttttgtatttttagtagagacggggttttatcgttttagtcgggatggtttcgattttttgatttcgtgattcgttcgtttcggttttttaatgttaaattttttaattggtgaaaataaatagttagttattttttaattttagtgtatatgttaaataataaaagatatagaaggaattttttttttataattgaattgtatttggaatttgatttgattttatttaagaagatttttgggggttttatgatggaagagtagtagttaaaagattggggttttggttttattttagagggttatttgttgggttaatttaagtaaagttgtgataattattggagagttttttttttttatttgtataaatgagagtttggaggagataaagttttttttttagtttaaatattttttgatgttattattaaaattagttgaaagagtttaaatttttttgtatcgtgtattatttgtaatatatgttgttgaggtgtgttattgttattgttaaaaaagtaaggaaatttttttgattttttttaagttaatttttagtttatatggatttttgaaaaatataaatgtgtttgtttttatgtagagttataaaaggtttgtgaagt

SEQ ID NO: 761 - DNA, 6171 bp, Artificial Sequence
  chemically treated genomic DNA (Homo sapiens)
aaaatttatttttatattaaattgtatttatttatttattagaaaattggagtaattttttttttttttattttttttgagatagagttttattttgttatttaggttggagtgtagtggcgtgattttagtttattgtaatttttgtttttcgggtttaagtgatttttttgttttagttttttaagtagttgggattataggtataagttattatatttggttaatttttgtatttttagtagagacggggttttattatgttggttaggttggttttaaatttttgatttcgtgatttttttgttttagttttttaaattgttgggattataggcgtgagtttttattttcggatttttttttttttttttttttttttttttttttttttttttttttttttttttttttttttttttttttttttttttttttttttttttttttttttttttttttttttttttttttttttttttttttttttttttttttttttttttttttttttttttttttttttttttttttttttttttttttttttttttttttttttttttttttttttttttttttttttttttttttttttttttttttttttgagatagggttttattttgtcgtttaagtaacgtgattttattttattgtaatttttattttttaggtttaagtgatttttttattttagttttttaagtagttgggattataggtatgtgttattatatttggttaatttttgtatttttagtagaggtggggttttattacgtagggtagatttggagtaattttttatatgaatatatgttatttttatttttttttttgtaaattgtttatttttttttttggttatttttttttatcgagttatgtgttttttttttattgatttttaatagtttttatatattttggatattgaatttttgttggttatgtgtgttgtttatatttttttttggtttatggtttaattttttattttttagggtgtgttttagtttttttttatatttcgtgtttttatattttattaagaaatttttttttttttttttttttttttttttggagatggagttttgttttgttatttaggttggagtgtagtggtacgatttcggtttattgtaatttttgttttttaggtttaaataatttttttgttttagtttttcgagtagttgggattataagtatacgttattacgtttggttaattttttgaattttagtagagacgaggttttattgtgttgtttaggttggttttaaatttttgaatttaggtaatttatttgttttagttttttaaagtgttagtgagttatcgcgtttagtttttattaagaaatttttattatgaatttataaaggtattttttaatattttattttttaaggttttaagttttgtttttttatatttatgtttataatttttttggatttacgtttttttttatggtatgaaatagagatttttttttattatatatataattaattgtttttattttatttattgaaaaaataattttttttttattagtagtaagataatatatattaaatttatatatatatatatatatatagagatataaatatggtatgtgtgtatattggttgtttattaatgtataataatttattttaaaatttagtagttgaaaataataaatatttattattttatagtttttgtggtttaagaatttgggaatggtttagttaggtagttttggattagggttttttataagatagtgattaagaggttggttaaagtagtagttattttgaagttttattgaaaaaggatttatttgtaattttattgtgtagttgatgggaggtgtttggtttttattggttgttgattagagatattggttttttgttatatgtatttttttttagagttgtttataacgtgataatttgtttattttttaagtgagagattaaagaaagtgatagagtttttaagataagaattataatattttattttttaattttagaaatgatatgaagtgatattttattatgtttattatgttttttgtattagaagtgagttattaaatttagtttatatttaaggttagggaagtagataagattgtgaagattcggaggtggggattattggggttattttagagtggtttattatagtttttatttgttgatttatgttagtttttttattatattgtttttttttttttttttattttgttttaattattgtagtttgtataaagttttgttattcggtagagaatgtttttttatttaattattatttagtatattttttttatttggggttttaaaaatagaatgtagaatttgtttgtttattttaattgaaaatttttgggttaggtatagtggtttatatttgtaattatattttggggaggttaaagtgcgaggattatttgagtttaggagtttaagattagtttgggtaatatagtgagatgttgtttttataaaaattaaaataaaataaattatttggttttggtggtgtatgtttatagttttagttatttgtgaggttgaggtgggtgggtgggtggattgttggagtttgagaggttgaggttgtagtgagttgagatagtattattgtattttatattgggtaatagagtgagattttattttgaaagaaagaaagaagaaagaaaagaaagaaagaagaaagaaagaaagaaataaagaaagaaataaataaagaaagaagaaagaaagaaagaaagaaagaaagaaagaaagaaagaaagaaagaaagaaagaaagaaaggattttgttgggatttttattggaattttattatatgaatagattaattagtaaatgaattgatattttatgatattgagtttttttatttatttatatgttttatattttatatagtttgagaagtttattagaaagattagtgtaaaagggttgggaatagtggtttatgtttgtaattttagtattttgggaggtcgaggtgggcggattatttgaggttaggagtttgagattagtttggttaatatggtgaaatcgtgtttttattaaaaatataaaaattagttagtatggtggtaggtgtttgtaattttagttatttgggaggtttaggtaggagaatcgtttgaatttaggaggtggaggttgtagtgagttaagattatattattgtattttagtttgggcgatagaggaagattttatttaaaaaagaaaattaatgtaaaagaagataatttgggggtttttttaataatttagtggtaatatatagtatatggagagtttgtgtattgttttaattttcgagtttaaaaggtttaaggtttagttttatatagaagttttgtagttttaatagattgtgttttgatgaaatatttttagtaagttagtatgaggtatgtataatatttttgttgaaatttttattttgtttattattttgtagtggatatttatggtttagtttgtttggtaattttttttttttataagaatattatcgttttttttttagggaattaatagattttttttaaattttaattaggtggttttaatttaggttgttaatcgtagtgttttaattataggagtaagtataggttttaggttaggttaattatagtttttttttggattttttaatttgataaaatttaggttggttggataaaatttagagggagagtttatttttatttttagtgagagaatagttgttaaatttttagttttatggagttggtgtttgataaattgaagttgagatgtagaaaaaagttgagatgagagacggggatattttggtggtggttaggtggttagtgttatatatatttttgtttaattttattttggttaggtgagtattagttatttttatttatttttttaataataggaagtatttaatgagtatttattattatgagttaattattgaagatatagtgatgattaagttttttagtgaatataaaatatatattaatgtaaaaagtattgtaagttatggatatttggaatttaagtaggtaaattatgatttaaattttatttaggttgggtatagtggttatatttgtaattttagtattttgggaggttgaggcgggagggttattttagtttaggagttgagattagtttgggtaatatggtgaaatttttattttaaaaaaatataaaaattaattggttttggttttgtagtttgtagttttagttaatcgggaggttgaggttagaggatagttagagtttcggaagtcgaggtagtagtgattgtagtaagttgagagtatattattgtattttagtttgggcgatagagcgagatattgttaaaaaaattaaaaaaaaaaaaaaaaagaaagaaagaaagaaaagaaaaaagaaaaaggaaaagaaaatttatttaatttttaataaattttgttaggaagtttagagagggttagtaattattgtaagtttttagcgttaatatatagcggaattaagatttgaatataggttttcgatttaataattgttttaattattttgcgttgcgtaaattgagaaatttttgaatttttataattttaaaagaataatttatagtttttagtttttattagattttaattttttattaaattgtagttttgaggtatgaatggttattaaattttagttaaataaataaaattagtttattaagtaatagagaaattattttgtttagtttgtattttttttttttttttgtatgagtttgttttttttatgcgtaaggttttttgggagttgtagtttgaggtatagttttgtgggtggaggcgttgatttattgggatttaattagtagagagttaatttgtttttcgcgtagcgattggttggaagttagcggtttttcgttcgcggcgttatcgcgttatttttagttaaggcggtatagggtcgaggcgtagtgtgggtgattttttcgttttttgggtttcgtcgtttgtgatattgtagtgtagttatggtagaatcgtagttttcgttcggcggttttacggacgaggtcgtttttagttgttgtttcgacgcggattttagtattaaggtgggtataggatcgaagggaacggtttttttagtttcgttgggtcgggatcgggtcgtattttatttaattttatttcgtcgtcgttgtaggttcgtcggtttcgggcggacgggagtgtgatgggaagagggataatggtgtttgatggggcgatcgtggggttcgcgaagtgtggaggggatttgttgttttagttagttttaaagattgcgattttgttttgaattggtttgtttatgttgcgacggtggttggaagttaggttaatttagggttagtttttttaaattagtcgttaaggtttacgagaatagtagttttagaatttttagaaataggtttaaagatgtttgttttgtattagttttgtttagtttcgtttttttttattattttgattgtagttttaatttttgtaaattaatttgatcgttttaagtttaatcgcgtttagaattttatttttgtttgtttggtttttgttgtgggttataatagttttttttgttttttttattttcgtggggtttaggagagattatagaattatagagtttggatttgaaaggaattttagaaatttttttttttattttttcgttttatagtaatgatttagtaagagaaatgatttgttgtatataaaggtttttatttatcgaatatgtttttattgagtaagaattagtgtaatttatttaggtgtggtgtttcggttgttttgttaagattagatatagttggcgggcgcggtggtttacgtttgtaattttagtattttgggaggttaaggcgggcggattacgaggttaagaggtagagattattttaatacggtgaaatttcgtttttattaaaaatataaaaaaatgagttgggcgtggtggcgggtgtttgtagttttagttattcgggaggttgaggtaggagaatggtatgaattcgggaggcggagtttgtagtgagttgagatcgtgttattgttttttagtttggg

SEQ ID NO: 762 - DNA, 6171 bp, Artificial Sequence
  chemically treated genomic DNA (Homo sapiens)
tttaggttggagggtagtggtacgattttagtttattgtaagtttcgtttttcgggtttatgttatttttttgttttagtttttcgagtagttgggattataggtattcgttattacgtttagtttatttttttgtatttttagtagagacggggttttatcgtgttaggatggtttttattttttgatttcgtgattcgttcgttttggttttttaaagtgttgggattataggcgtgagttatcgcgttcgttaattgtgtttgattttaataaggtaatcgaaatattatatttgagtgagttatattgatttttatttagtaaagatatgttcggtaagtgaaagtttttgtatgtaataggttattttttttattgggttattattgtaaaacgagagggtaagagaaggaatttttaagattttttttagatttaaattttatgattttgtaattttttttgggttttacgaagatgaggaaggtaagaagggttgttgtgatttatagtaaaggttaagtaagtaaaagtgaaattttgggcgcggttaaatttagagcgattaaattagtttgtaggagttaagattgtagttagggtggtaaggaaaaacgaggttgggtaggattggtataggataggtatttttgaatttatttttgggagttttgaaattattgttttcgtgggttttggcgattgatttgggaaagttgattttgggttggtttggtttttagttatcgtcgtaatataaataagttaatttaaaatagggtcgtagtttttgaaattagttgaggtaatagattttttttatatttcgcgggttttacgatcgttttattaaatattattatttttttttttattatattttcgttcgttcgaggtcggcggatttgtagcggcggcgggatggggttggatagaatgcggttcggtttcggtttagcggagttgggggagtcgtttttttcggttttgtgtttattttggtattggggttcgcgtcggagtagtaattgagggcggtttcgttcgtgaggtcgtcggacgggggttgcggttttgttatggttgtattgtagtattatagacgacgggatttaaggaacggaggagttatttatattacgtttcggttttgtgtcgttttaattaggaatggcgcgatggcgtcgcgggcgggagatcgttgatttttagttaatcgttgcgcggagagtaagttgattttttgttgattgggttttagtgagttagcgtttttatttataggattatgttttagattataatttttaaggagttttgcgtataaaggaggtaaatttatataaaaaaaaaaaaaaaatgtaggttgggtagagtggtttttttgttatttaatgagttaattttgtttgtttaattaaagtttggtaattatttatattttagggttgtaatttggtagaaaattggaatttgatggaaattgaaaattgtaagttgtttttttaaaattgtaaggatttagaggttttttagtttacgtagcgtagagtaattaaaataattgttgagtcgaaaatttatgtttaagttttggtttcgttatatattagcgttagaaatttgtaataattattgattttttttgagttttttaataggatttgttgagaattaaataagttttttttttttttttttttttttttttttttttttttttttttttttttttttttttaatttttttaatagtgtttcgttttgtcgtttaggttggagtgtagtggtgtgtttttagtttattgtagttattgttgtttcgattttcggggttttagttgttttttggttttagtttttcgattagttgagattataggttgtaaaattaagattagttaatttttgtatttttttgagatgggggttttattatgttgtttaggttggttttaatttttgggttgaagtgattttttcgttttagttttttaaagtgttgggattataggtgtagttattgtgtttagtttaaatgagatttaagttatggtttgtttatttaggttttaaatgtttataatttgtagtattttttatattaatatatattttgtgtttattggaaggtttagttattattgtgtttttaatgattggtttataatagtagatgtttattaaatattttttgttgttaaaagaataaatgggaatgattggtgtttatttaattaaaatgaggttgggtagggatgtatatggtattagttatttggttattattaagatgttttcgttttttattttagtttttttttgtattttagttttagtttgttagatattagttttataagattagaaatttggtagttgtttttttattaggagtgggagtaaattttttttttggattttatttagttagtttggattttattaaattggaaaatttaagaaggagttgtgattggtttggtttaggatttgtgtttatttttgtgattgaagtattgcgattggtaatttggattaggattatttgattggagtttggggaggatttgttagttttttaaaagaagagcgatgatgtttttatgagaagggaggattgttaggtaaattgaattatggatgtttattgtaaaatgataggtaggataaggattttagtagaaatgttgtgtatattttatattaatttattgaggatattttattaaaatatagtttattagaattgtaggatttttatatggaattagattttaaattttttaaattcgggaattggagtaatatataaattttttatatattgtgtgttattattgaattattgaaaagatttttaaattgtttttttttgtattaatttttttttttagatggagtttttttttgtcgtttaggttggaatgtagtggtgtgattttggtttattgtaatttttattttttgggtttaagcgatttttttgtttgagttttttaagtagttgggattataggtatttgttattatgttggttaatttttgtatttttagtagagatacggttttattatgttggttaggttggttttaaatttttgattttaggtgattcgtttatttcggttttttaaagtgttgggattataggtatgagttattgtttttagtttttttgtattaatttttttggtgagttttttagattatgtgagatataaagtatgtaaatgaataggaagatttaatattataaaatattaatttatttattaattaatttgtttatgtaatgaaattttaataaaaattttaatagagtttttttttttttttttttttttttttttttttttttttttttttttttttttttttttttttttttttttttatttgtttttttttttatttttttttttttttttttttttttttttttttttttttttttttttttttaagatagggttttattttgttgtttagtgtggagtgtagtggtgttgttttagtttattgtagttttaattttttaggttttagtaatttatttatttatttattttagttttataaatagttaagattataggtatgtattattaaaattagataatttattttattttagtttttgtagagatagtattttattatgttgtttaggttggttttgaatttttgagtttaagtgattttcgtattttggtttttttaaagtgtgattataggtatgaattattgtgtttggtttaggggtttttaattaaaatgaataagtagattttatattttatttttagggttttaaataggaaagatatattgaataataattaagtaggggaatattttttatcggataataagattttgtataagttatagtaattaagataggatgaaaaaaaaaaaaaagatagtatggtagggaggttggtatagattaataaatggaaattgtagtagattattttaagataattttaatgatttttattttcgggtttttatagttttgtttgtttttttaattttgagtatgggttggatttggtggtttatttttgatataaagagtatgatagatatgataaagtgttattttatgttatttttgagattagagaatgaaatgttgtgatttttattttgggagttttgttattttttttgattttttatttggagggtaagtaagttgttacgttgtgagtaattttaaggagagatgtatgtggtaaggaattaatgtttttggttaatagttagtgaaggttagatattttttattagttatatagtaaaattgtaagtgggtttttttttagtagagttttaaaatgattgttgttttggttaattttttagttattgttttgtgagagattttgatttagaattatttagttggattatttttagatttttaaattatagaaattgtgagataataaatgtttattgtttttagttgttaagttttggaataagttgttgtgtattaataggtaattaatatatatatatattatgtttgtgtttttgtgtgtgtgtatatatatataaatttggtatgtgttattttattgttagtggggaaaagattatttttttaatgaatggggtaaggataattgattatgtatgtgataaaaaaagatttttattttatattataaaggaaaacgtaagtttaagaggattatagatataaatgtgaaaaggtaaaatttaaaattttgaagaataaaatattagaaaatgtttttgtgaatttatggtagaaattttttaatgaaggttgggcgcggtggtttattagtattttggaaggttgagataggtggattgtttgagtttaggagtttgagattagtttgggtaatatagtgaaatttcgtttttgttaaaatttaaaaaattagttaggcgtggtggcgtgtgtttgtagttttagttattcgggaggttgaggtaggagaattgtttgaatttgggaggtaggggttgtagtgagtcgagatcgtgttattgtattttagtttgggtgatagagtaagattttatttttaaaaaaaaagaaagaaagaaagaaagaagttttttaatgagatataaaagtacgaagtataaaagaaagttaaaatatattttaaaaggtaaaaagttaaattatagattaggagaaagtatgggtaatatatatagttaataaaggtttagtatttagaatatgtaaaaattgttagaaattaatgagaaagagatatataattcgatagaaaaaaatggttaaaaagaagaataggtaatttataaaagagagaatagaaatagtatatatttatatgaaaaattgttttaagtttgttttacgtagtgaaattttatttttattaaaagtataaaaattagttaggtgtggtggtatatgtttgtaattttagttatttaggaggttaaggtaggagaattatttgaatttgggaggtggaggttgtagtgaggtgagattacgttatttgggcgatagaatgagattttgttttaaaaaaaggaaagaaaggaaaggaagggaggaaagaaaggaaaggaagggaggaaagaaaggaaaggaagggaggaaagaaagaaagaggaaggaaggaaggaaggagggagggagggagggagggaaggaaggaaggaagaaagagagagagaaagaaagaaaggaagaaagaaagaaagaaggaaagaaagaaagaaagaaagaaagaaagaaagaaagaaagaaagaaagaaagaaagaaagagagagagttcgggagtgggggtttacgtttgtaattttagtagtttgggaggttgaggtaggaggattacgaggttaggagtttgagattagtttgattaatatggtgaaatttcgtttttattaaaaatataaaaattaattaggtgtggtggtttgtgtttgtaattttaattatttaggaggttgaggtaggagaattatttgaattcgggaggtagaggttgtagtgagttgagattacgttattgtattttagtttgggtgatagagtgagattttgttttaaaaaaagtaaaagaaaaaaaaattgttttaattttttggtaaataggtaaatgtaatttaatatagaaatgagtttt

SEQ ID NO: 763 - DNA, 6636 bp, Artificial Sequence
  chemically treated genomic DNA (Homo sapiens)
ttttgttaatttttttgtaatatataaaaattatgttgttgtttttaagttttaaaattttttttttgttttttgataattttttttaaatgtgtttttggattatttaagagtttattttttttttttttatttttatttgggtaatgttttatttaggtggtaaaaggttaaaaatgaattttgttatttgttggttaggagataatggtttggtttgttataatttatagattaagtggttgtgtttggaagtttttagatttttgagatttttatggaatagagtagtaagttgtattttttttttggttttttatttttttgttatagttttttatttagggagatatatgaattaagagtattttgtttttttttgtgttatgattataaagtaggtagaaatagtttttttatgaaagttatggtatgggatgttatcgttttaatttttttatgtagattttttttttagattgtttggttttttgtgattggaaaatatattatatgaaagttattttttgtggagtttttttgtaaaaggggatatttaaatgattgtgggatttttttaaataatttgttaaattgtatttttcggttttagatttttttttatttttttaatttagtttcggttttttaaaatatatatagagtaattaataaagagaaaatttttaaaaagaaggattcgttagtaatatagaaagttatttttattattttgggaggttgaggtgggcggattattaggttaagagatggagattattttggttaatatggtaaaatttcgtttttattaaaaatataaaaattagttgggtgtggtggtatgtgtttgtagttttatttatttagtaggttgaggtaggagaatcgtttgaattagggaggtggaggttgtagtgagtcgaggttacgttattgtattttagtttggtgatagagtaagattttgttaaaaaaaaaaaaaaagttatttttatagatttttatgttggttattattttttttatttttttaaataataaaagtgtttaaaagtaatttttttatattgaagtttgtttaaatatagtaatgtatgtttaaaaaagttggaagtatttttatattttggtttttataagtaaatacgatttttatatttgaattagttgaagtatagaaatatatttttatttatgtattagaaaagttttttaggttaggtataatggttttatgtttgtaattttagtattttgggaggttgaggtgagcgaattatttgtagttaggagtttggggttattttggttaatatggtgaaatttcgtttttattaaaagaaatataaaaattagttgggtgtggtggcgggtatttgtaattttagttatttaggaggttgaggtaggagaatcgtttgaatttgggaggtagaggttgtagtgagtcgagattatattattgtattttagtttttatgataaggaaggagattatgttaaaaaaaaaaaaaaaaaaagagttttttaattattattttgtatttggttaagttaaagtttttaagttaatattgttttatttatgtataagataatattgttttgataaattgtggaaatgaagagatttattttttgaaatgtatttttatttatttgttaatatggatataatgaaatatattattttaaaaataatggaaatgttattaaatttagtgagttttatttatatgttaatattttagtttttttggatttttttaaattttggtttatttttttttttttgttgattttttatatttttttttagatttattattaattggagttatatatttgtttaaagtagatttaaatgtttataataaaattagtgaaattgtattaagtgttatttatagtaaaatttaaaatttatttttttattagtttaataaagttattattatatttagtcgttttattagtaatattgtatttgaattggtatttggttgagatattttgttttggtttttaaatggaaataattaatttaattagttgtatatattttttttaggatttatattaattaaaatggaacggtgataaatgaataattatttttggaaatttttattttttttttgataatatgtaaaagtaaaaatttaaaattatattaattttttaaaggagtatagatataattttttttttatttatttgtttttttatatagagattattatattttatattagaaaaaagattaatatattgtttttataatatttaaatatatgatttatttgaaattttttaaaatttatgaatagagatttatatttaatagataggaattttgtttttattgtgttaaagattttttttaaaatttgttagatgaaattttttttgatttattaatttagttaaaaagattttttagggatgttttaattttaagtttggtatataaatgtttgttttttttttttttaaatattttttatataagtttgtttgttgtatgtaagtaaatttttattttgtatatatttgttttttatttgatattaagtttttggtggtttagggattttaggttgtagttatagtagtagaggtggaagttttttggataatattgatttgtgttatagtagttatttttgttagtgttattgtttattaatttatttagatataaaattatttaataaatttattgaaatagagttagttattaattgaggatattgatcgattggtatgtaagttttttatagaatttattaatggagagatttaaagtttttaaaaattttataaaaaaatttttaaatgagttgtataattattttaataaaaatattaaaagggaattaatatagtataaaattgaaataataatggtgtgtgattttagagttagaatgttattttaaaaagatttatttagagtaaatttattatattgtttaatttattttaatgaaattttttaatatttggaaataatttaaaattaatatgtttttttgttaattatattgtttaaatataaatttggtcgtgttttattttttatttaaaattttttaatggtttttttaatttttagaataaggtaaaaagaaattttttagtatggtgtttaatgttttttattatttgattatttttatttttttggttttatttttttttatttttttgtaatgttttagtaatattgatgttttgattaatgtttacgttgtttatgtttaatttaagtgtttatatatattgtgatttaattgtgtggaattaaaatttttgtattaaaaggattttaatttagcgaatttttaattattttgtaaggattatttaagttattttttttgagaaatttttgattttttcgagagggttttttgtttttagatttttcgatgtttgtttatagaataatttttattatattgtttatgagtattagtttgttttttttattttagattattttatagaaggtttttattagtttttatgtagtagttttttatttaatatttaatttatagtaaatagttaaaaaatgtttttattaaaagaaatataaaattaggttagacggagtgtttatatttgtaattttagtattttgggaggttgagttaggtagatagtttgaggttaggagtttaagattattttggttaatatgatgaaattttgtttttattgaaaatataaaaattagttaggcgtggtggttagtatttgggattttagttatttggtaggttgaggtaggagaattgtttgaatttaggaggtggaggttgtagtgagttaagattgttaatgtattttagtttggttgatagagtgagattttgtttaaaaaaagaaaagaagaaaaataaaaaagaaatataaaattaaaagtttaaaaaaaattaattaggtatatatttaagaggtaataggatagttttatttgttatttaagggttgtatatttaagtaagggttatttttttataaggatgaggataatagtattttgtttttataaggtagagattttgtttggtttagatatgtaaaaattattaattttgaatttttggtaaattttttttaagatttgtaattttaagtaaattttttaatataattgagttttagattttttatttatagaaggggatgataaaatttgtttaggaatgtggtgagggttatatgagataaggcgagtgaaaggtgttttgtaattgttaagttttgtatatatgttaattatgtaatagatgttaaatatagtattatttgtatgattatattgttagtaattttgattaatttaagtttgtttagaaagtttaggtttttagaaattggaagattcggagattaagttggatgtttgggttttaggtaaatggtgaaatgatagaaaatgtgttttgttcgttttgatttaagaaggttatttgttgttttgttgtttgttgttagtggttaaaagttgattttaagtaattttagttttttgaaaggttttttttttttgtatcgatattattattttcgtttttcgtttttaatttttttagttttttaaggagtgaggggggtatatatttttgttcggtaatttttttaatgtttgaaggggacgatgtcgtgacgttgttttgtcgggatattttttttttttttcgttcgcggtcgttaggttttttcgcggttcgttgttttcgttgcggtttcgatcgggcgttacggcgtaggttcgcggttcgagtaggcgcgttagtcgagttcggcggtggcgcgggcggttgggatagttgtttcgttcggcgttcgttgtatttttagtagttattgttatttgggttcggagtttttacgatttcgttcggcgattgtgggtaggggcgttttcgggtaagtgttaggagttttatttaggaggaggggacgcgggttggggcggcgacggtggtttgaggacgggaatagacgtttttgcggaaatagcgggttaagttcggggcggcggagcgcgaggatattgcggcgtgttcgggaggacgcgttgtttgcgcgggagaggcgcgggttttggtagcggtagtcgggttttcgttcggtggcgtcgcggagacgtttcgggtggagagatgtagagggtcggggtaattaggaaacgtaaggttggttaggagggttttttgcgttgttttgtttatgaggattttttagttaatgtagttgttttttttgaaagattgggggtgaggatagagtagagtggtgaatttttttgtttttcgaagcgttaggggggttcggtttttttttttgcgggggtaaggatgtgaaagtgggagaagtatttgttgttgtgggtaaggtgtttggaagtaggtgtcgttgtcggatgggggaagggagcgtttaatgttgtgaagttgttagaggagaattttgtgttgttgttgttggtttgatgagttttttttgttgtttttaatttaaagtatttagggagaagtttttttggtttgtttggagtgtgtgtaaaagataaatatggggggaagaattttggggggggggggggaagatgaaaaatatgatataaggagaagtaaatttttgagggtgagatgggaattaagttagcgttgaagaatatgataggttttttattttgcggaaaataatgaaagagaaataatttatggtttggaaatgaaggttgtagaagagtttgaatttttttagtgtaggtagaggtttaattattttttatttattagaatttttggtaagaatatggttttgatttgagtatgaaaatgttattaaaatatggttaggacgataatttgaaaaaaatgtaataatatttgttttattttttgttgtagaatttttgaagtaatttttttgatgataaatgttagtagtaaataagtaagaaagttttaaagttaatttaagaggtatttttttggggtaaaaaggtagtttgttaatgtaatgtgtttaaataaaaaaagtaatgaattttgaatgtggaattttttgatattaatttttttttttatttgttttttttaatatttagaatttttttttttttaaaatatattatttttgaaaaaatatatataagaattttaaataatataaaaatttaaaaagaaaaagatatttttaaagtattagtcgaagataattattttaacgttgtgttaaattatgtttttagatatttttttgaatatatttttgatatattgtgtaatttaatattaatttataattttgtgtagttatagaattagaaattttatatagtaatttattatatttcgttggcggttttgttttttatgtgttattatttaaattgatttttattgttatataaaaaagattttataattattatataaaaaatattaaatatgttgtgaagtattattatataggattgagtaatgaggatttgatgtataaatgtatttgttttttggttagtaatgtttatattttttaaagggatagttatatagttattattttttttataaatgtaaatatttttttgtttttttttgtaga

SEQ ID NO: 764 - DNA, 6636 bp, Artificial Sequence
  chemically treated genomic DNA (Homo sapiens)
tttataagagagaataagaaaatgtttatatttatgaagaaaatgataattatatgattgtttttttaaagagtataagtattattagttaaagggtaagtatatttgtatattaaatttttattgtttagttttatgtggtaatattttataatatatttagtattttttatatagtagttgtaaagttttttttatatagtagtaaaagttagtttaaataatggtatatagaaaataagatcgttaacgagatataataggttattgtataaaatttttgattttatagttatataaaattataaattgatattgaattgtatagtatattaaaaatatgtttagaaagatatttggaagtatggtttaatatagcgttaaaatgattattttcggttagtattttggaagtatttttttttttttaaatttttatattgtttgaagtttttatgtatatttttttaaaaataatgtattttaaagaaaaagaaattttaagtattaaaaaagatagataaaagaaaaagttaatattaaagagttttatatttaaaatttattgttttttttatttaaatatattatattggtaagttatttttttgttttaaaaaggtgttttttaagttagttttaaagtttttttatttatttgttattaatatttgttattaaaaagattattttagaaattttataataagaaataaaataagtgttgttatattttttttaaattatcgttttagttatattttaataatatttttatgtttaaattagaattatatttttgttagagattttgataaataaaaaataattaagtttttatttatattagagaagtttaaatttttttgtaatttttatttttaaattataaattgttttttttttattgtttttcgtagagtaaaagatttgttatattttttaacgttaatttaatttttattttatttttagaaatttgtttttttttatgttatgttttttattttttttttttttttttaggatttttttttttatatttattttttatatatattttaggtaagttagaggggtttttttttgggtattttaaattgaagataatagagggggtttattagattaatagtaataatataaggtttttttttggtaattttataatattggacgttttttttttttattcgatagcggtatttgtttttagatattttgtttatagtagtaggtattttttttatttttatatttttgttttcgtaaaaaggagggtcgagtttttttaacgtttcgaaaaatagagaaatttattattttgttttgtttttatttttaattttttaagggggatagttgtattgattggaggatttttataaataaaataacgtaaggagtttttttggttaattttgcgttttttaattatttcggttttttgtatttttttattcggagcgttttcgcggcgttatcgagcggggattcggttgtcgttgttagggttcgcgtttttttcgcgtaggtagcgcgttttttcgggtacgtcgtagtgttttcgcgtttcgtcgtttcgggtttgattcgttgttttcgtaaaggcgtttattttcgtttttagattatcgtcgtcgttttaattcgcgttttttttttttaagtggagtttttggtatttattcggaggcgtttttgtttataatcgtcgggcgagatcgtggaggtttcgggtttaggtggtagtggttgttaagggtgtagcgggcgtcgagcggggtagttgttttagtcgttcgcgttatcgtcgagttcggttgacgcgtttgttcgggtcgcggatttgcgtcgtggcgttcggtcggggtcgtagcggggatagcgggtcgcgggggaatttggcgatcgcgggcgggggagggaagaggtgtttcgatagagtaacgttacggtatcgttttttttaggtattggaggggttatcgagtagaaatgtgtattttttttattttttaggggattaaaggagttggggacgaagggcgggaatgatagtgtcggtataaaaagaaaaaattttttaaggagttgggattgtttggggttagtttttgattattagtaataaataatagagtaataaatgatttttttgggttaaagcgaataaaatatattttttgttattttattatttgtttggaatttagatatttagtttaattttcgggttttttaatttttaaaagtttgaattttttgagtaagtttaaattggttaaaattattgataatatagttatataggtaatattatgtttaatatttgttatataattaatatgtgtatagaatttgatagttgtaaaatattttttattcgttttattttatgtggtttttattatatttttgggtaagttttgttatttttttttgtagatgaagaatttgaaatttagttatattaagagatttatttagagttatagattttgaaagaaatttattagagatttaaaattagtgatttttgtatatttgaattagatagggtttttgttttataagagtaaaatattgttgtttttatttttgtgaagaagtagtttttatttggatatgtagtttttagataatagataaggttattttattattttttgaatgtatgtttgattgattttttttaaatttttgattttatattttttttttatttttttttttttttttttttgagtagaattttattttgttaattagattggagtgtattggtaattttggtttattgtaatttttattttttgggtttaagtaatttttttgttttagtttattaagtagttgagattttaggtgttagttattacgtttggttgatttttgtatttttagtagagatagggttttattatgttggttagagtggttttgaatttttgattttaggttatttgtttgatttagttttttaaagtgttgggattataggtgtgagtatttcgtttggtttaattttatattttttttaataaaaatattttttggttatttattatggattaaatattaggtagaaagttattatatggaaattagtaagaattttttgtaaaatggtttaaagtgggagaaatagattgatgtttataaatagtgtggtaagagttgttttataggtaagtatcgagaagtttggaagtaggaagttttttcgggggaattaaaggttttttaaaagagatgatttggatgatttttgtaaaataattaggagttcgttggattaaagtttttttggtgtaaagattttgattttatatagttagattataatgtgtatggatatttgaattaggtatgagtaacgtgggtattagttagaatattagtattgttggaatattgtaggaaagtgggaaaagataaagttagggaggtaaaaatgattagataatgaagaatattgaatattatgttaaagagtttttttttattttgttttgaagattaggagagttattgaagaattttaagtaggagataaaatacgattagatttatatttaagtagtatgattagtaaaagaatatgttgattttgaattgtttttaaatattaaagaattttattaaaatagattaagtaatgtaatgaatttattttgagtaaatttttttaaagtaatattttgattttaaaattatatattattgttattttagttttgtgttatattaatttttttttggtatttttattaaaatagttgtataatttatttaaggatttttttatgaaatttttaaaaattttaaatttttttattaataaattttgtaaaaaatttgtatgttagtcgattaatatttttaattgataattggttttattttagtgaatttgttaaataattttatatttaaataaattaataaataatggtattggtaagaatggttgttgtaatataaattagtgttatttaaggaatttttatttttattgttatgattataatttggggtttttggattattagaagtttgatgttagatgggaggtagatatatgtaaaataggagtttatttgtatgtaatagataggtttatataggaaatatttaaagaggaggaagatagatatttatatgttaggtttgaaattagagtatttttggggaatttttttaattagattaatgaattaaagaagattttatttagtaagttttagaaaaaatttttaatataataaagatagaatttttatttattgaatataaatttttgtttatggattttgggaagttttagatgaattatatgtttagatgttataaggataatgtattaattttttttttagtatggaatataatggtttttatataggaaaataaataaatagaaagagagttgtgtttatgtttttttagaaagttaatatagttttaaatttttgtttttgtatgttattaaaagaaaagtaggaatttttagaagtaattgtttatttattatcgttttattttggttagtataagttttagggaaaatatgtgtaattgattgagttaattgtttttatttgaaaattaagataggatgttttagttagatgttagtttaggtatagtgttattgatgggacggttaaatgtaatagtggttttattaggttagtgaaagaataagttttaaattttattataaatgatatttagtgtagttttattgattttattatgaatatttaaatttgttttgaataaatgtgtagttttaattggtaatggatttggaagaggatgtgaaaagttagtaagaaagaggaagtaggttaaaatttaagaaggtttaaagaaattggaatgttaatatgtgaataaaatttattaaatttaataatatttttattgtttttgaagtaatatattttattatatttatattgataagtagatgaaaatatattttaagaaataggtttttttatttttatagtttattaggataatgttattttgtatataaataggatagtattggtttgagggttttagtttggttagatataaaatggtaattgaagagttttttttttttttttttttttgatatagtttttttttttgttatggaggttggagtatagtggtgtgatttcggtttattatagtttttattttttaggtttaagcgatttttttgttttagttttttgagtagttggaattataggtgttcgttattatatttagttaatttttgtattttttttagtagagacggggttttattatgttggttagggtggttttaaatttttgattgtaagtgattcgtttattttaattttttaaagtgttaggattataggtatgaagttattgtgtttggtttgaaaagtttttttaatatatagataaagatatatttttgtattttagttaatttaaatgtgaggatcgtgtttatttataaaagttaaaatataaaaatatttttaatttttttaggtatatattattgtatttaaatagattttaatataaagaagttatttttaaatatttttgttatttgagaagatggaaaaaataataattagtatgagagtttataaaaatgattttttttttttttttgatagaattttgttttgttattaggttggagtgtagtggcgtgatttcggtttattgtagtttttatttttttggtttaagcgatttttttgttttagtttgttgagtaggtaggattataggtatatgttattatatttagttaatttttgtatttttagtagagacggggttttattatgttggttaggatggtttttattttttgatttagtgattcgtttattttagttttttaaagtgataaagatgattttttatgttattaacgaatttttttttttaaaaattttttttttgttaattattttgtatgtgttttgaggagtcggagttgggttaagaaaatagaggggaatttggggtcgagggatatagtttagtagattgtttaggagaattttatagttatttaaatgtttttttttataaggaggttttataaggagtagtttttatgtgatgtgttttttaattataaaagattaggtagtttgaaaagagaatttgtatgagaaaattagggcgatgatattttatgttatggtttttatggaagaattgtttttatttgttttgtaattatagtatagggaaaaatagaatatttttagtttatatgtttttttaagtaaagaattgtggtaggagaatgggaagttaggagaagaatgtaatttattgttttattttatgaggattttaaaaatttggaggtttttaagtataattatttgatttgtggattatagtaggttagattattgttttttagttagtaggtgatagaatttatttttaattttttattatttgggtaaaatattatttagataggagtaaggaaaaaaaaaataaatttttagatgatttaagaatatatttaaaggaaattattaaagaataaagaagaggttttaaaatttaaaaataataatatgatttttgtatattataaaaaggttaatagag

SEQ ID NO: 765 - DNA, 19087 bp, Artificial Sequence
  chemically treated genomic DNA (Homo sapiens)
agaattaagtgagtttatgttcggtagtggtatattattttttgttatatattattgaataaattaaggttaagattgttatttaaggtgaggaggtaaagtttgtttagtgggagggataaaaatatttgggaatagtagtataatttattatagaggttgtttttatttttaagtaggtatttttttgattgatttttggattatatataaaattagttttttttaggttttgttaatatataagaaagatttttttaattttgggttggggtttagtttgatttatttttaatatgaatttatagaaaaataagtattaaaattattttaaaaaattaatatttggaggttttataaatataatggtggtgtaaatataaataatattattttataaattttattaattgaaatttttattatattattttaagtggagaaaaataattgatttttatttaatttttatttcggttattaggaaatttttaaaaagaattttatatagttagtattttaaggtagattatttagatatgttgtttaaatttgatgaatattttttgttattttatatgatgttataatgaatagaggtatatttttatttatatagatggtaaatgatatatttttagatttaattgttatatgttaaggtatttgtatatgatatgtatatttaaggattgtttttttagcgatttttttttttttggaatttttttttttttttagttatttgtgaatagttgttattttgggtattgagtttagttttttttaatttgattgtttttatttttttttattttaagatattttgaaaattattggtttattttttaaaaatgaagtaagtaaattatttttaggttttttttaaatggtattttattattagatggtttaaaataattgtttggttttttaataataagtgtaaaaattgattatattgtatgttaaaatttatttatttatggtttgataataatagttataatatttatagagtgttattgttattattttgggtgttttatatgtgttgtttatttattttatataataattttataagtattaatattattcgtttttttttgtttttttgagatggagttttgtttttttatagtttaggttggagtgtaatggttagatttcggtttattgtaatttttgttttttaggtttaagtaatttttttgttttagtttttcgagtagttgggattataggtatgtattattatgtttggttaattttttgaatttttagtagagatggggttttattatgttggttaggttggttttgaatttttgattttaggtgatttatttgtttcggttttttaaagtgttgggattataggcgtgagttattttgtttggttatattattttttttttatagatgagggatttattatatttattttggtatatatttatatttagtattggaaaaataagttatgtttggtagggtttattagtgaggttaggaatttggttagttaaagtaggaaattaatagaagaaagggaagtagtagtagaagtttgtttagaggttttttgaattttattttattttttaaatagaagaattttaaaaaaaggtttaggtaatttttttaagttgttagttaaaggaaaattattttttttttagttttaggttaataaataatttattagtttttgtgaaggcgtaatttggaatttttatatatatatattattttattttattttattttattttttgagatgtagtatcgttttgttgttaggttggagtgtagtggtgcgattttggtttattgtaatttcggttttttaggtttgagtgatttttttgttttagttttttaagtagttgggattataggtgtgtgttattacgtttagttaatcgttgtatttttagtagagatggggtttaatcgtgttagttaggatggttttaattttttgattttgtgatttgttcgttttagttttttaaagtgttgggattataggtgtgagtttatcgcgttcggtttatatatggattttattatgattttgaaatattagttttttgtaattttcgatagaataaagaagtttaggaatatagaagtataggaatttttttttaagttagaatagatataaagtgtataaattttaattattttttttgatggttgattatttgatgatggttatgggatagtaattttttgtagtgtagttgtatttaggagtaaaaaggaagtcgaagagtagatttgataatttaattatagttaatgtggagagtatttttttatttgtagatattttggtggattatttattgtatgtatataaatgtttttatattttttatatgatgattatatgagtttatgtaatgatataatttaatttaatataattgaaattttaaagttgtgtaatggttataaagttgtagataaaaatatttttaaagattaaaaaattatataagatgaagaaaagaattaaatgaaagtattgagttatatttttattttatttataatagtttttttgttgtttataatttttttattagtttttttaaataaggggttaaattttagtggatttaatttttttaaattttgggagtaatatttatttatttttattaaaagtagaaagtttggaaattattagaaaataaaattttagaaattagaaattttagaaaataatttgttattaggttagtttttttatttgttaagtgaattataaagtttttaaatttttaaatatttaaaataatttttataagaaatttagagaaattaagggagaaattgagaggaaaatagtaattggattgttagttgttttgtgttgttgagaaaaaagaggtagttaaaattgataattaattgtagttaatatattggataatattaaagtttgtaagttattaataagttagggttaggtaggggtaatatttgttattttttttttgaaatttgatgtttttatttttgaatatattattattttgatttattaatatttttggataagtaatattagtaataaaagttatttaagtatttttttattgttttgtttttttttttttaaataaaaaaggtgattatgttttatatatgatagttttttttatgtttttttggttaaagagtagatagaaaaaaaaaatttaaaatacggtaaggttgtaatatgttaaaggttatataatttgtaggtatagttagattttttaattattaatttattgaaatattttatagtttattagattattaaattcggttattaattaatgatgtatttgatatatatttttttagttttataaaaattattttattaggtcgggcgtggtggtttacgtttgtaattttagtaatttgggaggtttagggggtgtagatttttcgaaattagtttgggtaatttggcgaaatttcgtttttattaaaaatataaaaaaaaaaaaaaaaaaaagtaggtgttggttgaggtgggaggattatcggggtttttgagtttaaggttgtagtaagtcgtgatcgcgttattgtattttagtttgggcgatagagtgagatttttttttaaaacgaatatatataataatatagtaataatatattaatttttaaaatattttattaaattttgtggatttattttatttaaatttaattgttttaggaaatagtttaaaaatatttttttgttttggaatgtaatgtgtatgtagttttagggaataatttagtttattaggtttttggttgtttttttataggtttaaaaggataaatggataaagtgatgttgaaataatttagagaattcgtattttaacgtttttattttaaaatagtgaagtagtttttaaaatagaaaagtatttatagttttgtttttaagtaaatagcgttaacggaattattgttatttaaaattatttttgaagtatcggtgtatatttaaaaaaaataatttttaaaaaagaaagttgtcgtattttggatttcgtaatttttttatttcgtttcgttattcgtcgttttttttttatttttatttttttatggtttaagtcgtatagttgaaaggattttgtttattttttttaaaatattttacgtttgggtagtagttaattatggaaagttttaagtaaatgttatatttgggagagggatgaagtttgttcggggttgttttcggaggagtcgttagacgttttgatttgggggttagatgcgagttgggatcggttgagtttcgatagttcggttagatttagttttgttaaatttgttgattttattgttttcggttgcgggggatttcgtttatgagtttttttaatagttcgaatttttagagtggaggagtttattgttttataaatgcgagaatttagagtttttagtatttaattaggttagtttcggagttggtacggcgtgtagaaagtggttattgagtagtcgggtttggtttattcgttttatacgttagtttgattttttttttcgttttttattaatttttcgttttatttttcgcgtatttagagtcgagagaaatttgattgttttaatcgttaattaaaagagaggtcgaggatttgagttaatcgtagcgggcgaaaggggcgggtcgtcggcgagcgttgaaggtttttagtttttttttgcgttttagttttagtgcggagttttaggcggagcgaagagaatcggtcgcggtaattttagcgcgtagtagtagtagtagtagtagtagtagtagtagtagtagtagtagtattcgtattcgttgcgggagttcgagtcggtaattatatttaagtagttgttttttttttttttgttattttatcgttttattatagatcgcgtttttcgaggaaatcggtcgtttacgttcggagtatttttttttgttgagcgggcgttgacggattcggcggtatgatgcggttgcgaggttcggggatgttgcgggatttgtttttgcggtcgttcgtcggcgtgagcgcgattttgcggcgggtatagtttttggttattttgtgtcggcgttttcgaggcgggggacggtcggtcgcgggttcggttgtcgtcgcgcgattttattcgtggtggggcgggggcggttggtcggcggagtttttcgcgcggggtttgtttagttttttttcggagattttgtaggagttgggtaaggggagtacgtattcgtagttcggggtgtcgttattcgttgtttcggcggcgttcggttttaaggacggtttcggggagacggacgcgtttggtaatagcgagggtaaagagttggtggttttaggtgaaaagtgagtgttttcgcgaggcgtaggaggtttcgtttttttcggggttcgggtttaggttgtgtggggttttgcggtggggcgggataggagtcgagggtttagaaaagagaaagaaagaggtgtcgggcggtttgcgtcgtttgcgttatgtgattaggttcggtttcgttcgcgtttttttcgttcgtaatttttcgttaggtatttatttttttttttcgttttcggcgggggtcgttttggtggggtcgcggtggggtttgatgggttcgtttggcgtttttagcgttagagaggtcgtttttttgttcgcgttgcgtgtttagttttttggtttgcggttgtagcgtttggtcgttcgttttagttattcgtgggcgatgttgtacgaatatttttatcgagtgatatttaggagttgggcgtttagtagagtttttatttttttgatttgtcgttttttttggttcgttttcgttttgtttgtttttttttggtttttgttattattcggttggaagttagatgtgatagagagttttttatatttcgggagtggttattttaggtacgtgtagagttatttggggtatcggaaataatgttttagaagtgagattaggaggaattcggttatgtggtcgagaagatggggtacgtagtatagattatttgtttgtataagggattagttttggtttgttaggtttttcgtgagatggggagatttttagaaataaaagttaaatagttaagatgaaatgtgacgtaatatattaatttagtgaaaaatttgagttgagtaggttttgtgattttattgtgataggatgttgatttattttgtatgtgtacggtatagtagtttagttttaaagtaaaattggttttttttaaataatatgtaaagtagttttttatatatttttgttttgtgtaatataaatggattattttgtttttttaaaatgggtaaaaatttacggatttgtttttattatattttattttttttttggttttgtacgttgatattttaatttgttttgttttttttttatttttgttgttatttttagttttagagttttttaagttaaattgaaagtgagaatattgttataattttaattttacgtttgtttgatgtttttttgtaattgaagttgggattttttagaaatttttttaaagttttttttttagattgaaaaagattatttgaaaaaaattatttgatgatgggcgaaatttgtggtattttgtgatgttggttttgtgttataaaatagcgttttgattatggataggttatttaatattttgggttagatgatttaaatttttttaagttttaaaaagttatatttttgttaaatttgtattttttttatgttttagggattagaatgataatttaattttatttgggatttatttttattttaatattattcggtttattaaggaagtaacgagtttatatgtaagtgtttaaggtatagaattgtaaaatgtagttataatcgtttaaaagtttattttaaaggttataagatgggaattgtattttagtaaaattatgtttttaggtttgtgtttttgtagtggttttagtgttttttttttttttttttttttgttaaataggaaattgagttttttttgtgatttatttgtttagaagtttttggttttattgtttttttaataaaaaattattttttagtaagggttttaaggttgtgaagaaagttttttaatttggttaaagtttttatttttttaatgatttggtttttaaatgtagttttttttttttggttttttttattttgtttttatgtgataaatattttttttattttgggaggtaagtttttagttgattttgttattttttttaatgtttagtttgtaaagtataggttattttttagttagtagtttatttggtatgttagtatttatttaggattgtgttagattttatgtagtattattaaaagaaataattatgagaaaattaaattaatattttgtaaaaggtttagaataatatttggcgtgtgttaaatgatatataattatttattaaataaatgagaaaatattgtttttttattattgtaaagtttgttaaagagattggttttggaattttaggtttgtatatgaaggtttttaatttttttagtttttataaaaatgtttattttgagaaattgttatatatttgttttatatgaaattatgtgagttgtattgtttattttttgttttgttgataaataagtttagagtaaatttaatgtttaattatattaattttattagtttatatggttgggatatttgcgtttttttttttttttggttttgagtttatattttatttattttatattttggaaggaggcgtgatataagtaagttattttattttttttttataaattttttgaattaatgttattttagattatgttgtttttattacgtaattttagtgtggtttaggatacgaacgttttaatattatatagaaaaatttaatgatttttgtttagttttgtttttagtgattttatttaattttgttatggtttattttgttattttgaaaattaattttgtttgttttttttcgtttttaaaattgttttttttttttttttagttttttttgaatttttttattgggtaaaaattttgaggttgaggtttttgttttttttttatttgtttgtttttttaatagcgtatttttttttttagttttgatttttatttttgtgtaggtaatattttattttttaatttaaagttttgtttttaaatttgtcgttatatatttaatgattttaaattttaagtttgtattttgatatttatttttttttttaatttaatttattttgcgtattgttatgagagtaattttagagttttaatttgaaaatagtatttttttttagaaaattagtaggatttggaatgagtattatattaaagttataaattatgttatggtttatgttagtatttgtttatatggatatttttattatatttttttttgttaagttggttatatttatttttataaagtttagaagtatgtattttattttagtgaatggtttttaggaagagttagagggatagaggtaaggggtattattaagtttttttatttggatatttattttttaatgagaaaggaaaagagatatataatagaaattgggttggaaaaatattagtatatgtatgttgttagaaaatagataatttatataggatgtaatattgaaagtattttgttaaaataataatgaggttatttttttttttttagattggtagatgttaaattaagtaattgggaaaataggaattttagtattgttagtagaagtataaattattagtttagttattttaggtagtttggtagtttttgttaaaaattgtatagttgtgatgtggtagttggatgtttgtatatttatatgaagtcgtggtatttagaaatatttgtaattatataaataagtatgttttaaaatatatttatatttaaaagtaaaaatgtaagtaaaaatgattttagttagttttagttagtatggatttatgttttgatagtttagttttatgttttgatagttatggataatgaagggtaaagaaaattatcgaggtgtatattttgaaaattgaattttttttttttgagatggagtttcgttttgttatataggttggagtgtagtggtgtgatttcggtttattgtaatttttgtttttcgggtttaagttatttttttgttttagtttttcgagtagttgggattataggtattcgttattatgcgtggttaatttttgtttttagtagagatggggttttattatgttggttgggttggttttgaatttttgattttagatgatttgttcgttgtggttatttaaagtgttgggattataggcgtgagttatcgtatttggtttgaatattgaattttaaagtaagatgaaatgtttatgaattttagcgaatattgaattgggtagattgaataatattagtaaggaagttgagttagtatttggtagatataaatattaagttttagaattgaatgataaaatttttgttaaaatgggggtatatgtttttatgattttttagtattgtatttggttttaattttaaaagttaatatatttataatttatttaagttaaaattaaggtggaaagtatgtttaatttttttttttgggttttttaggtagttttttagttatttttgatttttttattattaaaaatttttttttaggtgatgattattagtgagttttagtttttttttttaaattttatttttatttatttatttatttttgaggtggagttttattttgttatttaggttggagtgtagtggtgtgattttagtttaatgtaatttttgttttttgggtttaagtcgtttttttgttttagttttttatgtagttgggatttataggtacgtgttattatatttggttaatttttgtatttttagtaagatgggaatttattatgttagttaggatggtttcgattttttgattttgtgatacgtttgtttcggttttttaaattgttgggattataggcgtgagttattgtatttagtttagttttgtttttttaaaagtaagtgaaaaaggtattaataattatatgttataatatttttgtgatttaatatttatattgaaatgtgtattagttattgataattttgtttatgatttgtaattaataaatttatgttgttaatttatagttttattaatatttggatgaaatttattgaaagaataagaattagattttgaggggtttagttttttggatttttagttgtatatttttagattttatttttttatagagaagtttatttattttaaagttagttaatttatgaaatgattattaaatagaatttagttttttttatgaggtaatatgtaggttagttaaaagggagggggggtattattttagtttaaagataaatgttattttgaaagaaatttgttgaagatatttgtgggtttttttgagttttaaaaagttatttaaaagaaattaggttgggcgtggtggtttatgttcgtaattttagtattttgggaggttaaagtaggtggattagttgaggttaggagtttgagattagtttggttaatatggtgaaatattgtttttattaaaaatataaaaattagttaggagtggtggcgggtatttgtaattttagttattcgggaggttgaggtaggagaatcgtttgaatttaggaggtggaggttgtagtgagtcgagattatgtcgttgtattttagtttgggtgatagagcgagatttttgttttaaaaaaaaaaaaaaaaagaaagtaatagtaaaaggttgtattattttttttttgtgatatttgaaatgaagaaaaattatgattatataagttgaaagtttaattatagaatttgtgtgagggagtttaattatgttaaattttatataaattaaggttatattttatagttgtttgtttgtgtttttttatttttaagttatttgttagtaagagaaatgtttaagaaaggtgagtaaatagatgtatttataaaaatagttattaattattgatattttttagtgaggtatatagtttttatatagagatattgttagtatagttttattttgaaatttatttaggtgtaaaattgttttggttatgaaatatattatttgtgagttattattgtatttagtgattttttgattttttataacgtagtagaagtaaaatgttaatgtattttgatttttatttgggagtgttttttgtttgatatgttaaatttattataaagaaatgtttatagtaaaagtattattttcgaaatatagaattgtagatgttgtataatgaataaaattgatagtttttaggattaagaaatatatttttgtttatttatttttggtataggtttttaaaaaagatttttaaaattgtttttttgatgaggatattttgagtgatatagattcgttttttaatttttgatggtaaattttttgaagagtaatttttaagttttatgaggaatttataaagtatttatatttttttaggaatttaagtttataaaataaattgaagtgttagaaagatttattttttattatttttggtatagtgttatgtatattagagaaaaatggagaaaaacgtatgtttaatattagtgggatagttaagtaaattgtggtatatttatatgagggttttttatttagttatttaaaatgtttgtaggtattttttaggatataaggtaatgttataacggttaaaagttagaatatagaattttttatgtagtatgattttaagttatttaaaaagtttagaaaaagtaatagaaggaaataagttaaaatgatattagtagttgtggtttatgagaacgagtattgttttttttgtttttttttgttatttttaagattttttttttattataagtgggaaacgtttaaaatagtaaaaaatattttatagttttgaaaattaaaggaattatatttgttaagttttgaatttgtaaatttttattgtttatttttttaatattttgattttggttgtataagaatagtaagtattattatattgaaagaaaagtatgaaaataggttatgtatgaatttgtatagtttttgtttattagtattgtttaattatatttattggtatttttaaatattaaattttaaaaatttaaaattatgtttgatatatttttttagtaaatgttatatatttttttgttatattaaaatattgtaattaatagagtttaatattttttgtttaatttatgtgtattttaaggatgtattattatattgtattgtaatatagtgatgttgtaagataagtgttggtatattttttttgaaaggttaaatagtaaatatttttagtttttggggttttttagttattattataattttttagtttagtggtggtagtaaaatagttgtaaataataggtaaatagatgtggtagttttttaataaaattttatttataaaaagaggaggtttttgttgtagtttgcgtagttttatattaaaatatatttattggtaagtttttttatgttttgattggttttgttttaattagtatttttaagggtgggtttgtttttttgtggatttttgtattttgtattagttgattgttttttatgtttttattttagttatttttttttatttttattttttgtatttagttttgtttagtttttttaaaaaattgtggttaaatatatataatataaaaattattattttaattatttttaagttttttagtttagtggtattaaatatttttgttagttttagaatttagatgaatatgttaatgtgtaaaataaaagtatgtaagttgtgagtgaataaagtttatgattttattttagtgtagtgatttggaggatatttatttttagtaatttaaaaattgagaattaagtttggaagtaattttaaagaatatttaattttagtttattttacgtattatataagttgttcgtagatattaaatgatttaaataagtttagatagtattaggatttgttttgattttttattttttatttattagtagtaaattaatttaatttatagagttaatttttttagattgaggattataagagattttataaatttttttttttagttgttgttttttttttttttgttatatattttttataggttgttgttatttatttttatttgaatattgtttttataagggagtttatttttttagaaggtagtttatttcgtttttatagttgttttatttttttttatgtgtggttgaagttttttattaatttttatttatatatgttagttattttgaataagttgtttatagtggtattagagtgattgtagtgatagaatttatatagtatttgtattattttatttagattgatatattaaaggatatttggttgaagaaatgagttattggaaaaattaatagagttggatgttatagatttgatttttttagattttagtttttttattcgagatagttagattgttttttgggttaaatttttgaagttgtgtaaacgtatggataaattattatgagttgataggggtagtttgattatttttttatataaagtggtttttgtgttttttattttggtgtgttattaaatgaatttgtgttataaagtttagttaaaatagtagtattaattgaatataattttatttttgttttgataggatgtagttttattaaggtagattagtttagtttttttatgtgtattttggttagaaatttattattgtttaagaattatagatattatttttaaaatagagtgttaattattgagagtatgaggtggtagagtaggaagagtttggaattgggaataaaggatgagttttgtaggattaattttggtttagttatttaagatttatgtgatattggatattttgtttgatttggatatttttaaaataaaattttttttaaatttaaaatttaaattaatattttttttttttttttagaaatggaattttgttgtgttatttaggttggagtatattggtgttattatagtttattgtagttttgaatttttgggtttaagtagtttttttgttttagttttttaagtagttgggattgtaggtgtatgttattatatttttttaggatttttttttatttgtatattggggataattaatttattttaatttattttatagggttttaatatgatagaaagtgagagtttttttttagtagtaaagttttaaaagatgtaagtttttatttttaaatttaattaatgattagttttggggtaaaattatttggatgataattagaatttgttaatttgttagatttaatatttatttttatatgttattttattatatggttagttattattaatttaattttttatttaataggtttattaatttgttagtttgttggtgttgatagacggttgttattagttagtttattataaatttaaaatgatatattgattttaaaataattttgaattattatttgaaggattattatttttaaatgaaggtataaagattagtaaatttttttgtattgtgttattattaggttttattttttttaattttatttgaaaagatagttttttattgttttataggtttattatattatattatgtgttttaagagttatgcgaaaaaaaaaataagaaagatttgattttagttttgaagttttatagtttggggaggttaggtaatatgaaatgttatttaataaaataagattatatagttggttttaattatttttttttgtttattttgtagtttttagtaaggattttttttttatttttttttttttatttgatagttttttatttataagatttttgaattgatgaagatgagtttgttttgttgtttttaattatagattagaaatttttttgattttttttatcgattaaggtaaaattaaatattttatttgtatttgttaataaaatattttttgaaaaatatttttattatagtatttgttttatggttttagttatattttttttagattataattttattttagggatttttattgttattgtttggtatataataagtggtataagaaaaggataaaatttagtgatattagagaatgttaaagagtatagagaatttggtgggggtaaagttttgtgaaataattgaaatgattattgatagtttaagatttagggagaggaaggttttatatagaaggtatgataggttaaaaaaaaaaaagatgagatagtatttatttataggttattgagtttagttaattatattggggaattataaggattaagttaggaataaatagtgtaaaattaatttatagagaattgtatattagattgaggagtatgaattttttttttggtatggggaaattaatttggttagtggggtaagtaaagatagtttttttttttatgttgtagaagttggttttgtatttaaatttaatgtagattttggaaggtagtttttttatttattttagatatatatatttagaatatatatatttttaatattaaaaaattaagtatttatataatagtttataggtagaaataggtattttaatttatatattttgtgttttagttgttttttgttttttataaatattaagtgaatgtttatttttatttttttggtttgtttgttagaaatttttttttgttgttatgtttttagtttttatttattttttaggtttagtttagattttattttatttaaaaaaaagtttgattttattagattatagtgaagtagttttttaaagtttggatgttatagatttatttttgtaattttttattttatgtatatgttttttattttttttagattgtaaatgatgtttaatatgatgttatatatggtatgggatttttttttttttttattaagaaattattttttaagatagttaaaggttaaagtaggggaaggaatgggtaaaagaagaaataatatgatggtaagatgattttaaaggtagtatttagaaaggaaacgagagagatagtataagttggagaagaagtaaaaaggtgagaaataaggatttttttttagattattttttgttatattttatttgaattgttgaatattataattattttatgtttttttttttaggggaatttggaggatttatttgggttattaataattgttgatgataagatttgaaagattgttataattttatttgttattaaaatttaaatattttttttaaggattttttagttattatatagttattaaaagttatagtttttagtttttgaattttaatgaaaaatatattattgtgaagaattattagaaagaattaatttagggagagaaaaggggggttaaggtatgaatgattttgagtagtttttgttttgtggaaagtttgaggagaatatttgagtatgtttgttcgttagattgttgaagcgaatttatttttagattaaaatttgaggttttaaatgttgaaataggtagtaatttttttttattagttttgatagtttattttgtgagtttattttttagggttggtttaaatttttttttttatagataaaaattaattttttgtttaaaagtaagtaaatatttgtttttttttgttagttttggtaataacgtggttattttaatttttttttattatgtgttataagttaaaaaagtgtatattttacgttatttatatagtttttaggtaaagtaaatattatttatttgtgtgataaatatatagaaagtttattttgtagttttttaaagtgataaattattattatttgaagtttatttgattaattatttgttgtaaataattggtatgttattatttattgattttttgatagttggtttagttttttttttgaatattaggtggtgagtattgttaagttgtgtttaatggtattaggttaggataagatttagaaaatttgtttgtattttataaaagtaataataagttagtaagttagagagttagtataatgtagtagtagtttggatttagaaaaatttatttttgttattgtgtaattttggaaagttttttaatttttgagtttttgttttttaatttgtgaaatggggatagaggtagttatttttttgaataaataataaatttgttgagtttttaagtatgtattagaaattatattatgttttggataatagtagtatttttgttataaaatttttggaggattaagttagaatgtatgtaaaatatttagtatagtgtgtagaatataagtaagtgattaatatattgtagttattattattaaaatattttaaatgtattttttttggagatagagtttcgttttgttatttattttggagtgtggtggtacgattttggtttattgtaatttttatttttcgggtttaagttatttttttgttttagttttttaagtagtcgggatttaggcgtttgttataacgtttggttagtttttttatttttagtagagatggggttttatcgtgttggttaggttgatttcgaatttttgattttaagtgatttttttgttttagttttttaaagtgttgggattataggcgtgagttgttacgtttagttttaaatgtatttttagaagttgtttaagagtaaaaatagttttagggaataattatgtattaggatatgttattaaatattttaatgataaagttatgtgtttttaaaaaatatttgtgtgatatttagtatttaaaagtttggttaattatagtattttagtgttatattagtttagttaattaagatttttaatgtatatttattggtaacgttttttttttaatagtttttatgatttgtagaatttgatgtatatagttttgttttgtttttttgtatatgttaagagattggttttaggttttttatagtttaagttttttatgtaaaatggtataatatttgtttataatttatatatatttttttatatattttaaattatttttagattatttataatatttaataaaatgtaaatgttatgtaaataagttttatattattttttgaatgtacgtttttttattttttttttgaatattttttattcgtgttggttgaatttatggatgtaaagggttgattaggatatgtaaatttagattattttagaaataataattataattattgttagtggagttttattttttgttagatatgttttaaagatattgaatgtattgagttaattgatttttattataattttatgagggaggtattgttttatttttttttttagatgaggaaattggattatagaaaggttaattaatttatttaaggttatataattatagtattatagttaggatttaagaatttgtgtatttgattttaattattgtgtagtagttaattgttattttttttagattttataattaggttaattatttgaataatatgtaaatatagttattatatttagaaaatttttaaaataattgaatagagtgttgagttttatcggaacgtttgttgaattttataatttgtattgggtgattgtattggggtgtataggaaggtattattataacggatggttgggtattagtataattagagttgatgattagggttttaaaatttgggattaaaaaatgtgttaatgattttttttttatttgttttttagtgtggtttatagtggtattgatttgattttggtaaattaatatttattatgattgtagttttgagtatatgagtttagttgtagtttagtttagtggttatttaataatggatttagttaaaaatttagtagaatgtttatataaggattaattttgtgttttttttatttttttagt

SEQ ID NO: 766 - DNA, 19087 bp, Artificial Sequence
  chemically treated genomic DNA (Homo sapiens)
attaaagaggtagaaagaatataaaattaatttttgtatgaatattttattggatttttaattaaatttattgttaaataattattaaattagattatagttgagtttatatatttaagattatagttataataaatgttgatttattaaaattaaattagtattattataaattatattgaaaaataagtagaaaaaaaattattaatatattttttaattttaggttttgaaattttgattattaattttagttgtgttaatgtttagttattcgttatggtgatgtttttttatatattttagtataattatttaatataaattatagagtttagtaaacgtttcgataagatttaatattttgtttagttgttttggggattttttaaatatgatgattatatttatatattatttaaatagttaatttgattataaaatttgggagagatagtaattaattattatatagtagttaagattaagtgtataagtttttgaattttggttgtaatattatagttgtgtaattttgggtaaattaattaatttttttgtgatttagtttttttatttgagaaagggaataaaatagtgttttttttatagggttgtggtgaggattagttgatttaatatatttaatatttttagaatatgtttggtagagagtaagattttattgatagtagttgtagttattatttttaaagtgatttaggtttatatattttagttagttttttgtatttatagatttaattaatacggataaaaaatatttagaaaaaaaataaaaaaacgtatatttaaaagatagtataagatttatttatatagtatttatattttattaggtattataagtaatttagagatgatttaaaatatatgggaggatatatgtaggttataggtaaatattatgttattttatataagagatttgagttgtgggggatttggaattaattttttaatatatatagaaggataaggtaagattgtatatattaaattttataaattataaagattattaaaagaaaaacgttattaataagtatgtattaaaaattttaattaattaaattagtgtaatattaaaatgttatgattaattaaatttttaaatattgaatgttatataaatgttttttaaaaatatatagttttattattaaaatatttaatgatatattttgatatataattattttttgaaattgtttttgtttttagataatttttaaaaatgtatttgaagttgggcgtggtagtttacgtttataattttagtattttgggaggttgaggtaggaggattatttgaggttaggagttcgagattagtttggttaatacggtgaaattttatttttattaaaaatagaaaaattagttagacgttgtggtaggcgtttgaatttcggttatttgggaggttgaggtaggagaatagtttgaattcgggaggtggaggttgtagtgagttaagatcgtgttattatattttagagtgggtaatagagcgagattttgtttttaaaaaaaatatatttgggatgttttagtaataataattataatatattgattatttatttatattttatatattgtgttaagtgttttatatgtattttaatttaattttttaaggattttatgatagaggtattattgttatttaaaatatagtatgatttttggtatatatttagaagtttaataaatttgttatttgtttaaaaaaatgattatttttgtttttattttatagattaggaaatagaggtttagaggttaagaagttttttaaggttatataatggtaaagatggatttttttgaatttaaattattgttatattatattggttttttaatttattagtttgttattatttttataaggtataaataagttttttaggttttattttgatttaatattattaaatatagtttaataatatttattatttaatatttaaagaaaaaattgaattagttgttaaaaaattagtggataataatatattaattatttatagtaaatggttggttaaataaattttagatagtggtagtttgttattttaaaaaattgtagaataagttttttatgtatttattatataagtaaatggtatttgttttgtttaaaagttatgtaaataacgtaaaatatatatttttttagtttatggtatatagtgaaaaaaaattaaaatgattacgttattgttaaagttagtaaaaaaagataaatgtttatttgtttttaaataagaaattaatttttatttataggggaaagaatttaagttagttttaaaaaataagtttataaaataagttgttaaaattgataaaaagaaattattatttattttagtatttgaaattttagattttgatttgagaatgaattcgttttaatagtttggcgaataaatatatttaaatattttttttaaattttttataaggtagaaattatttaagattatttatgttttaattttttttttttttttttaaattaattttttttggtaattttttataataatgtattttttattaaaatttaaaagttaaaaattatagtttttggtaattatatagtaattaggaaatttttgagagaagtatttaagttttaatgataaataggattatagtaattttttaaattttattattaataattattaataatttaaatgaattttttagatttttttgaagagaaaaatataaaatggttatgatatttagtaatttaaataggatataatagaagataatttgaaggaaaatttttattttttatttttttattttttttttaatttatattgtttttttcgttttttttttaaatgttgtttttaagattattttattattatattgtttttttttttatttatttttttttttattttagtttttaattgttttaaaaaataattttttaatgaaaaagaagaaaaattttatgttatgtatgatattatgttagatattatttatagtttagaagaagtaggagatatgtatataaaatgaggaattataagaatagatttatgatatttagattttggaaaattattttattgtggtttaataaggttaagtttttttttagatgaggtggaatttgagttaaatttgaaagatgggtaagagttggaagtatggtaatagaaaaagatttttggtaaatagattaaagggatgaaagtaagtatttatttagtgtttataaagaataaaaaatagttagagtatagaatgtgtgaattaaggtgtttgtttttatttataggttattatatgaatatttaattttttagtgttgagaatatatatattttgaatatatatatttgaggtaaatgaggagattattttttaaaatttatattaagtttaaatgtagggttaatttttgtaatatgaaaagaggaattgtttttgtttattttattgattaaattagtttttttatattaaagggggaatttatattttttagtttggtatgtagttttttataaattagttttatattatttatttttaatttaatttttataattttttaatgtaattgattagatttaatgatttgtaaataagtgttattttattttttttttttttaatttattatgttttttgtgtaaaatttttttttttttaaattttaagttattaatgattattttaattgttttataggattttgtttttattagattttttatattttttagtattttttggtattattaagttttgttttttttttgtattatttattatatgttaagtaatagtaataaagatttttaaagtaaggttgtggtttaggagaaatatgattaaagttatgagataaatattatggtagaagtgttttttaaaaagtattttattagtaagtatagatgaagtatttaattttgttttaatcggtaggggaaattaagaaagtttttaatttgtaattaggagtaataaggtaaatttatttttattagtttaaaaattttataaataaaaaattattaaatgaaaggaagaaaataaaaaaaaaatttttattaagaattataaaatgaatagaggaaaataattgaaattaattgtatggttttattttgttaaataatattttatattatttaatttttttaaattataaagttttaaggttggggttaagttttttttattttttttttcgtataatttttaaaatatatagtatagtatggtaaatttatgagataatgaaaaattgtttttttaagtgggattaaaaaaaatgaggtttaataataatataatataaaaggatttgttagtttttatgtttttatttaagaataatgattttttagatgataatttagggttgttttaaaattagtgtattattttgaatttatagtgagttgattgataataatcgtttattaatattagtaaattggtagattaataaatttgttagatagaaagttgaattgatggtggttgattatatagtaaaatagtatatgagaatgaatgttaagtttaataaattgataaattttagttattatttaagtgattttgttttaaggttaattattggttgaatttaaaaataaaaatttatattttttaaggttttattgttaaaaaaggatttttattttttattatattaaaattttatgaggtaaattaaggtgggttaattgtttttagtgtatagataaaagagagttttagaagagtgtggtggtatgtatttatagttttagttatttgggagattgaggtaagaggattgtttgagtttaggagtttaaggttgtagtgagttataatggtattaatgtattttagtttgggtgatatagtaagattttatttttaaaaaaagaaagaaaatgttaatttaaattttaaatttaaaaaaaattttgttttaagagtatttaagttaagtagaatgtttaatgttatataaattttaagtggttggattagaattagttttataaagtttattttttgtttttagttttagattttttttgttttgttattttatgtttttagtggttagtattttattttaggaataatatttgtaatttttaaataataataaatttttaattaaaatgtatataagagaattaaattggtttgttttgataaaattgtattttgttaaagtaaagatgagattatatttaattagtgttgttgttttgattggattttatagtataaatttatttaatagtatattaaagtaaaaagtataaaagttattttatgtgaggaaatggttaggttgtttttgttagtttatggtaatttgtttatacgtttgtataattttagaagtttgatttaaaaggtagtttggttgtttcgggtgggaagattaggatttggggagattaagtttataatatttaattttgttagtttttttaataatttatttttttagttaagtattttttaatatattagtttagatggaataatatagatattatatgaattttgttattgtaattattttgatattattatagataatttgtttagaataattaatatatataggtagaagttaatgaaaaattttagttatatataaggaaaaatgaaatagttatgaaaacggaatgggttgttttttaagggagtgaatttttttgtgaaggtagtatttaggtagagatgaataataataatttatagggagtatgtaatagaagagaagaaagtagtagttggggagaagggtttgtaagattttttataatttttaatttaaaaaaattaattttataaattgaattagtttgttgttaatagatgaaaaataaaaaattaaaataagttttaatattgtttgaatttgtttaggttatttaatatttgcgggtagtttatataatacgtaaaatgagttggaattaaatgttttttaaagttatttttaagtttaatttttagtttttgagttgttaaaaatagatgttttttaaattattatattaaagtgagattataaattttatttatttataatttatatatttttattttatatattagtatatttatttgggttttaaaattaatagaagtatttaatgttattgaattagggaatttaaaaatggttaaagtggtaatttttatgttatgtatatttaattataattttttgaaaaagttaagtagaattggatatagaaggtaagagtgaaggaggatagttaaagtagagatatgaagaatagttaattgatataagatataaaaatttataaaagaataaatttatttttaagagtattggttaaagtagaattaattaaggtatgagagaatttattaataaatatattttagtgtagggttacgtaaattatagtagggattttttttttttgtaaataaagttttattggaagattgttatatttatttatttattgtttgtagttattttgttattattattgaattgagaagttgtagtagtgattagagaattttaaaagttgaaaatatttattatttggttttttagggaaagtgtgttagtatttgttttatagtattattgtattatagtgtagtataataatgtatttttaaaatatatataagttgaataagaaatgttaaattttattgattataatgttttaatatggtagagaaatatgtaatatttattagggagatatattaagtatagttttaaatttttaaagtttgatgtttaagggtattagtgaatatgattagataatgttgataaataggagttgtgtaaatttatatataatttatttttatattttttttttaatgtaatggtgtttattgtttttatataattagaattaggatattagaagagtagatagtagagatttataagtttaaaatttaatagatgtggtttttttgatttttaaaattatggaatgttttttattgttttagacgttttttatttataatgggggggaaattttaaaagtaataaaaggaggtaggaaaaataatgttcgtttttataaattataattgttaatgttattttggtttatttttttttattattttttttgagttttttaaatagtttgagattatattgtatagaaaattttgtattttaatttttggtcgttataatattattttatattttaaaaagtatttgtaaatattttaaatgattaaataagagatttttatatgaatgtattataatttatttaattattttattaatgttgaatatgcgtttttttttatttttttttagtatgtataatattgtattaaaaataataggaaataaatttttttaatattttagtttattttgtgaatttagatttttaaaaaggtatgaatattttgtaagttttttatagagtttaaaaattgttttttagaaagtttattattaagaattgaaggacgggtttatgttatttaaaatatttttattaagaagataattttaaaaattttttttagaagtttgtattagaaataaataggtaaaaatatattttttaattttgaaagttattagttttatttattatgtaatatttatagttttatgtttcgaaagtaatgtttttattataaatatttttttataatgaatttaatatattaagtagaggatatttttaaatggaagttaaggtatattaatattttgtttttattacgttgtagggggttagaaaattattaagtgtagtgatgatttataagtaatgtgttttataattaaagtaattttgtatttgagtagattttagggtaaaattgtattaatagtatttttatgtgaaagttatgtattttattgagagatattagtaattaataattatttttataaatatatttgtttatttattttttttaagtattttttttattagtaaatgatttaaaggtgaaaaggtatagataggtaattataaaatataattttaatttatataggatttaatatgattgagtttttttatataaattttataattaggtttttagtttatatggttataatttttttttattttaaatattataagaaggaagtagtatagttttttattattattttttttttttttttttttttgagataagagtttcgttttgttatttaggttggagtgtagcggtatgatttcggtttattgtaatttttattttttgggtttaagcgatttttttgttttagtttttcgagtagttgggattataggtgttcgttattatttttggttaatttttgtatttttagtagagatagtgttttattatgttggttaggttggttttaagtttttgattttaattgatttatttgttttggttttttaaagtgttgggattacgggtatgagttattacgtttagtttgattttttttaaataattttttaaaatttaaagaaatttataaatatttttagtaaattttttttaaagtgatatttatttttggattaaaatagtgtttttttttttttttagttggtttatatattgttttataaaaaaggttgaattttatttggtagttattttatggattagttgattttgaggtaggtagatttttttataaaagagtaaggtttggaaatatgtagttaaaagtttaggagattaaattttttagaatttaatttttgtttttttagtgaattttatttaaatattaataaaattataaattaatagtatgagtttgttaattatagattatggataaagttattaatgattgatgtatattttaatataaatattaggttataaaaatgttatgatatatagttattggtattttttttatttgtttttaaaaaaataaaattgggttgggtgtagtggtttacgtttgtaattttagtaatttgggaggtcgaagtaggcgtattataaggttaggaggtcgagattattttggttgatatggtaaatttttattttattaaaaatataaaaattagttaggtgtggtggtacgtgtttgtaagttttagttatatggggggttgaggtaggagaacgatttgaatttaggaggtagaggttgtattgagttgagattatattattgtattttaatttgggtgatagagtgagattttattttaaaaataaataaataaataaaaataaaatttaaaaaaaaaaattaaaatttattgataattattatttagaaaaaaatttttaataatgaagaaattaaaaataattaaggggttgtttgagaagtttaaaggaaaaaattaaatatattttttattttgattttagtttaagtgaattgtaaatatgttagtttttaaaattaaaattaaatgtaatattgaaggattataaaaatatgtgtttttattttaatagaggttttgttatttagttttaaaatttaatatttatatttgttaaatattaatttaatttttttattagtattgtttaatttatttaatttaatgttcgttgaaatttataagtattttattttattttgaaatttaatgtttagattaggtgcggtggtttacgtttgtaattttagtattttgggtggttatagcgggtagattatttgaggttaggagtttaagattagtttagttaatatggtgaaattttatttttattaaaaataaaaattagttacgtatggtggcgggtgtttgtaattttagttattcgggaggttgaggtaggagaatggtttgaattcgggaggtagaggttgtagtgaatcgagattatattattgtattttagtttgtgtgatagagcgagattttattttaaaaaaaaaaaatttaatttttagagtatatatttcgatgattttttttgttttttattgtttataattattaaaatataaagttgaattattaaaatataaatttatattaattaaagttagttgaaattatttttgtttgtatttttatttttaaatataaatatattttaaagtatgtttatttgtgtaattataaatatttttgaatgttacgattttatgtagatatgtaaatatttaattattatattatagttatgtagtttttaatagaaattattaaattgtttaaagtaattgaattaataatttatatttttattagtaatgttagagtttttatttttttaattatttgatttaatatttgttaatttgagaaggggaaagtgattttattgttgttttaatagaatatttttaatattgtattttgtatgaattatttattttttaataatatatatatgttggtatttttttagtttaatttttgttatgtattttttttttttttttattaaaaaataaatgtttaaataaaaaaatttaataatgttttttatttttatttttttgattttttttagggattatttattaagataggatatatatttttggattttatggaaataagtataattagtttaatagagaaaagtatgataaaaatgtttatatgggtaagtgttggtataaattataatatagtttgtgattttaatataatgtttattttagattttgttggttttttggaagagagtgttatttttaaattaaaattttaaaattatttttataatagtacgtaaaataggttgaattggagaaaagaatgaatattagggtatagatttaaaatttgaagttattgaatatgtggcgataaatttaagaatagagttttggattaagaggtgaagtattatttatataaagatgagagttaaagttgaaagaagggatacgttgttgagaaggtagataagtgggaaagggataaaggttttagttttagggtttttatttagtgaggaaatttaaaaagaattaggaaagaagagagaataattttgaaaacgaagagaggtaagtaaagttggtttttaagataatagaatgaattataataaaattaaataagattattaaagataaaattgagtaaagattattaaatttttttatgtgatattaagacgttcgtattttaaattatattaaagttgcgtgatggaaatagtatagtttaaagtgatattagtttaaagagtttgtgaaaaaaaggtaaagtaatttgtttatattacgtttttttttagaatataaagtaaataaaatataaatttaggattaaggaaaggaggaaacgtagatattttagttatgtgaattgatgaaattggtgtggttaagtattaaatttattttgaatttatttattagtagagtaaaaggtaaatagtgtaatttatatagttttatataagatagatgtatagtaattttttaagataaatatttttgtggaaattaaaaaaattaaaaatttttatgtgtaagtttgaaattttaaggttaatttttttaataggttttataataatgaagaagtaatgtttttttatttatttaataaatagttatgtgttatttaatatacgttaaatattgttttaagttttttataaaatgttaatttaatttttttatggttattttttttaataatattatataaaatttggtatagttttgagtgagtgttagtatattaggtggattgttgattgagggatgatttatgttttgtaggttaagtattagaaaggataataggattaattgggagtttattttttaggataagagaaatgtttgttatataaaggtaaaatgaaaggagttaaagagggaaagttatatttggaaattagattattaaggaaatagaaattttaattaaattaaaaaattttttttataattttgaggtttttgttaaaaggtgattttttattaaaaaggtaatgaaattagaaatttttggataagtgaattatagaagaagtttaattttttgtttgataaaagaggaaaaaaaagagaggtattagagttattgtagagatatagatttgaagatataattttattagaatgtagtttttattttgtagtttttaagatgaatttttaaacggttgtgattgtattttgtaattttgtattttgggtatttgtatgtaaattcgttatttttttggtaaatcggatgatgttaaagtaaaagtgagttttagatgagattaaattattattttagtttttaaaatatgagagaagtataaatttaatagaagtatagttttttagaatttgaaaggatttaagttatttaatttaagatattaaataatttgtttatggttaggacgttattttgtggtataaaattaatattataaaatattataaatttcgtttattattaagtgattttttttaaataattttttttagtttgggagaagaattttagaaaagtttttggaaggttttaattttaattataggaaaatattaagtaggcgtgagattgaaattataataatgtttttatttttagtttgatttaaggaattttagagttggaaatagtagtagaaataaaagggaagtaaaataggttagagtgttagcgtataaagttagaaaaagagtaaggtataatgaaagtagattcgtaaatttttatttattttgggaaaataaagtggtttatttgtattatataagataaaaatatataggagattgttttgtatattgtttaagaaaaattagttttgttttaagattaaattattgtgtcgtatatatataggatgagttaatattttattataatgaagttataaaatttatttaatttagattttttattgagttagtgtattacgttatattttattttggttatttaatttttatttttaaaaatttttttattttacggaagatttgataagttaaagttggttttttatgtaaataggtggtttatattgcgtgttttattttttcggttatatgatcggattttttttaattttatttttgaaatattgttttcggtgttttagatggttttatacgtgtttgaggtagttattttcgaaatataaagagttttttgttatatttggtttttaatcggatgatggtagaaattaagggagggtaggtagagcggaaacgagttaggaaaagcgataagttaggaaggtaaaggttttgttgaacgtttaatttttaaatgttattcggtggagatgttcgtgtagtatcgtttacgaatggttggggcgggcggttaggcgttgtagtcgtaagttagggagttgagtacgtagcgcgggtaggggagcggtttttttggcgttggggacgttaggcgagtttattaggttttatcgcggttttattagggcgattttcgtcgggggcggagaagggaagtgggtgtttggcggagggttgcgggcggggaaggcgcgggcggggtcgggtttaattatatggcgtagacggcgtaggtcgttcggtattttttttttttttttttttagattttcggtttttatttcgttttatcgtagggttttatatagtttgagttcgggtttcgaaaggaacgaggttttttgcgtttcgcggagatatttattttttatttgaggttattagttttttgttttcgttgttgttaaacgcgttcgttttttcggggtcgtttttggggtcgggcgtcgtcggggtagcgggtggcgatatttcgggttgcggatgcgtgttttttttgtttagtttttgtaagattttcgaaggagagttggataggtttcgcgcgaggggtttcgtcggttagtcgttttcgttttattacgggtggagtcgcgcggcggtagtcgggttcgcggtcggtcgtttttcgtttcggggacgtcggtatagggtgattaagggttgtgttcgtcgtagagtcgcgtttacgtcggcgggcgatcgtaggagtaggtttcgtagtattttcgagtttcgtagtcgtattatgtcgtcgggttcgttagcgttcgtttaataggggaggatgtttcgggcgtgggcggtcggttttttcggggaacgcggtttgtggtggggcggtgagatgatagaagaggaaagggtagttatttgggtgtggttatcggttcggattttcgtagcggatgcgggtgttgttgttgttgttgttgttgttgttgttgttgttgttgttgttgcgcgttaggattgtcgcgatcggtttttttcgtttcgtttaaggtttcgtattgaggttaaagcgtaggggagggttagagatttttagcgttcgtcgacggttcgtttttttcgttcgttgcgattggtttaaattttcgattttttttttgattggcgattagggtagttaaatttttttcggttttgggtgcgcggagagtagggcgggggattggtggggggcggggagaggagttaaattgacgtgtgaagcgggtgagttaggttcggttgtttagtagttattttttgtacgtcgtgttaatttcgaggttagtttagttgggtattaggggttttgggttttcgtatttatgaagtagtgggtttttttattttgggaattcgagttgttggggagatttatgggcgagatttttcgtagtcgagggtagtgaggttagtaggtttggtagggttgagtttggtcgagttgtcggaatttagtcgattttagttcgtatttggtttttaggttagggcgtttggcgattttttcgagagtagtttcggataagttttattttttttttaaatgtaatatttgtttgaaattttttatgattggttattatttagacgtgaagtgttttggaaaaaatgagtaaaatttttttagttatgcgatttaagttatgggagggtggaggtggagggagggcgacgagtggcgaggcggggtgggggggttgcggaatttagaatacgatagtttttttttttaaaaattattttttttaaatgtatatcgatattttaaaaatagttttgaatagtaatgatttcgttaacgttatttgtttgaaagtaaaattgtagatatttttttattttaaaaattgttttattgttttaaaatagaagcgttggaatacgggttttttaagttattttagtattattttatttatttatttttttggatttgtggaaaaatagttaagaatttgataaattgagttattttttgaggttatatatatattatattttaggataaaaaaatgtttttagattattttttgaaataattaggtttaaatggagtagatttatagagtttaataagatgttttgggggttggtgtgttgttattgtgttgttgtgtgtgttcgttttgagaaagggttttattttgtcgtttaggttgaagtgtagtggcgcgattacggtttattgtagttttgaatttaggggtttcggtgatttttttattttagttagtatttgtttttttttttttttttttttgtatttttggtagagacggggtttcgttaggttgtttaggttggtttcgagggatttgtattttttgggttttttaaattgttgggattataggcgtgagttattacgttcggtttaatgaggtgatttttatgaaattagaagggtgtatgttaggtgtattattaattgataatcggatttagtaatttagtgaattgtaaaatattttaatagattaataattaggaaatttggttgtatttataggttatgtgatttttggtatgttatagttttgtcgtgttttaagttttttttttttatttgttttttaattagaagaatatggaaaaaattattatgtgtaaaatatagttattttttttatttaaaaaaaaaaaagtaggataatgggaaagtatttagatagtttttattattaatgttatttgtttaaaaatgttgatgaattaaagtaatgatatatttaggaatagagatattaagttttagaggaaaggtaataaatattatttttgtttaattttgatttgttaatgatttgtagattttaatattgtttaatatattagttgtaattagttattaattttaattgtttttttttttttaataatataaagtaattgataatttagttattgttttttttttagttttttttttaatttttttgagttttttatgaaaattgttttagatatttaaaggtttaaaggttttatagtttatttaataaataagaaagttaatttagtaatagattattttttagagtttttagtttttagagttttattttttggtagtttttagattttttgtttttggtgagaatggatagatattatttttaaaatttggaagaattgagtttattgaaatttaattttttgtttgagaaggttaatgaaaaggttatagatagtaaagaaattattataaatagaataaaaatgtgatttaatatttttatttgatttttttttttattttatataattttttaatttttaaagatatttttatttataattttgtaattattatataattttgaagttttagttatgttaaattgaattatattattatataaatttatgtaattattatgtaaaaagtataaaaatatttgtatatatataataagtagtttattaaaatatttataaatagaaaaatgttttttatattaattatggttgggttgttagatttatttttcgattttttttttgtttttaagtgtagttatattataaagagttgttgttttatagttattattaggtaattagttattaaaaggaataattggaatttgtgtattttgtgtttgttttaatttgaagaaaggtttttgtgtttttatgtttttgagtttttttgttttgtcgaagattataaaaggttaatgttttaagattataataaaatttatatataggtcgggcgcggtggatttatatttgtaattttagtattttgggaggttgaggcgagtagattataaggttaggagattgagattattttggttaatacggttaaattttatttttattaaaaatataacgattagttgggcgtggtggtatatatttgtaattttagttatttgggaggttgaggtaggagaattatttaaatttgggaggtcgaggttatagtgagttaagatcgtattattgtattttagtttggtaatagagcgatattatattttaaaaaataaaataaaataagataaaataatatatatatatagaaattttagattgcgtttttataaaaattagtagattatttgttgatttagaattaaaaagaaagtaatttttttttgattaatagtttaaaagaattgtttaagtttttttttgaaatttttttgtttggagaatagagtaaggtttaggaagtttttaaataagtttttgttattattttttttttttttgttggttttttgttttaattggttaaatttttagttttattgataagttttgttaaatatggtttatttttttaatattgaatatagatgtgtattaaagtaagtatggtaaattttttatttataaaaaggggataatatggttaggtaaggtggtttacgtttgtaattttagtattttgggaggtcgaagtaggtggattatttgaggttaggagtttaagattagtttggttaatatggtgaaattttatttttattagaaatttaaaaaattagttaggtatggtggtgtatgtttgtaattttagttattcgggaggttgaggtaggagaattgtttgaatttgggaggtagaggttgtagtgagtcgagatttagttattgtattttagtttgggttatgagagagtaagattttattttaaaaaaataaaggggggcggataatattggtatttatagggttgttgtgtggaataaataaataatatatataaagtatttagaataatgatagtagtattttgtaagtgttatagttgttattattaaattataggtgaataaattttgatatgtaatgtgattagtttttatatttattgttgaaaagttaaataattgttttaaattatttaataataaaatattatttaaggggaatttagagataatttatttattttatttttagaaaataaattaataatttttaaagtattttaaaatagaaaaagataaagatagttagattaagaaaagttgggtttagtgtttaaagtaatagttatttataaatagttaaaaaaaaaaaaaaattttagagaaggaagaatcgttaagaaagtagtttttgaatatatatgttatatataaatattttaatatatagtaattaaatttaaaaatatattatttgttatttatgtaaatgaaagtatatttttgtttattgtgatattatataaaatgataagagatatttattaaatttgagtagtatatttgaatgatttgttttaaaatattaattatatgaagttttttttgagagttttttgatggtcggagtgggggttgggtgggaattagttatttttttttatttagagtaatatgataaagattttaattagtggagtttgtaaggtaatattgtttatatttatattattattatatttatggggtttttaaatattaattttttaaagtgattttaatgtttatttttttgtggatttatattaaaaataaattaggttaaattttagtttagagttaagaaagttttttttgtatattagtaaaatttaaaaaaaattgattttgtatatagtttaaaagttagttaaaaggatatttgtttgagaatgaaaataatttttgtggtagattatattattatttttaaatatttttgttttttttattgggtagattttatttttttattttggatggtagttttggttttgatttgtttaatgatatgtgataggaagtggtatgttattgtcgagtataaatttatttggtttt

SEQ ID NO: 767 - DNA, 8951 bp, Artificial Sequence
  chemically treated genomic DNA (Homo sapiens)
aaaaaaaaattataatttttagggttttaagaggttaaatttgaggttaaaagtttagtaaaatttttttttttattttgtgtggagtgaaaatagatagtttagttgattataaattagtttgtgttttagtattttgggtgttatttgtttatttgtaaatttatgattttatttgttgttatttatttataaagtgaatgttttatttatttattagtagttagttataataaaatataggtgaaatttatatttaaaaaatttttgttttgaagagtggttttatagattgagagttgaaaggagtaaagtttgattttgcgttatttatttttaggataatagttttaattgtgttttgtttaggacgtatgttagtatatgatatggggtagttttattttttttaaagtttaggtgtgatgtttatttaaaaggggaaggtggtaatggagtttagagatttttaaataaggaggttttttattatatttattgtataattttgtagtttttggtataagtatttaggttgtatttgttattatttattttgtattttttaaagataatgtatttgtgttttgttatagtagaagtaggaaggaagatgtttttgaataaatggagtataataaaaatgtttggtttattttttttttttataagtttttaataatttttaaaaatgataattaattaaatttagttaggaatttttaatttattatttaaagatatagaatttgtgttgtgttattaagcggttttaatttaggtggtggatggtagtgagttttattattattagtataggtagtttaggaattatcgattttgaggttttattgttgagtttttttatgagtatatttaggtgtatttgtataatatttttatgtatttttggttaggtgaaaagtattaatttaggatagtttttttgagtatttttaaaataaggtgtatttttgtgtggaagagaggttatttatgattaggagtgtgataaaaatttggttttaattttttagttaagtttaagaaagttaggggtttgtagtagtttagggtaggacggtgtttaggttgcgttttttgtttttaattttaagtgttgtttggtgattttgaatcgttttttgttgtttttttagatttataaaaaagaggttttgtataatgggggtagtagtgtatttgaaggggttaagaaaaataatatgtggtatttttatttgttatatttttttttattcgaagtggagtaaattggggaaaaggggggaattttagttattcggttgaatggttaatagtgtttttttatttttaaagttaatttaaaatgatataagtttgtttaaggtttttggtggtattagtcgttttatatttttggggattgttaaatgtgtttttatttataggtagattttttttttttttttttttttattaaatattttaagttttatgggttttgttaagaagttaaagaaaaagttggaagatagtttgtggattttgtatatttgggtttttcgggacgtaggtttgtgttttatttaagatattgtttacgttttagtttgattatttggtcgtttcggtttatttgggtatatggtgagtcgcggaattggtaggtattaaatatttattgaatgaataaatcgtattttagtagatattatggtggtagtagatgatttaattaaggttttaggaaaggcgggttggggttaattgtttgaaaatttagtaattttgtttttaatttcgtgtattgttatattttagtgtgcggcgggatatttgagagttttgaaagaatttttaaataagtttacgtttcgtaaattatttttttttttgttttagagtttttagggcgtttaggtaaggtcgttattttttttatttgggaggacgtttcgagtatcgattttatagttacggttatcgtttttcggttttcgtgatatcggcgcgtttgttgtttcgagtaggggaggttttgtatttttatcgtatttttttcgttcgaagatacgaaatttcgttcgggcgtcgtaaataattcgaattcggttttttgatatttatttcggcgggcgcgcgtcgttgggagggcggggtgggtggttggaggtaaggaggcgtatagtaggggtaagcgtcgtcgtcgtatattttgtacgtcgtttagggttatattatttatcgaaaattgggaggtaggtttgggaggcggggttgagcgtttatcgttttgggcgcgttcgcgtttttcgttatcgcggttttcgcgttttcggtttacgttcgcgcggtttcggtatcggtttgtatttttagggtgcgcggcggtttatttgggtgcgttttcggtgggtcgatttttcgcgtttttttttcggtttataggggtcgttgttatgggtcggttttttgaagaggttggggcgttatcggggtcggttagaagttttgtttttcggcggggatatttagtcgcgtcggtatcgcggagcgggttgcgttaggtggttggtcggcgcggcgtttttttgttttttggtttcgggttgcggcgcggcggttggagcgagtttttgtttcggcgcggggcggcggcgggcggtcggtaggcgttgttttgcgtgtgagtgtattttatttatatgtaagtcggggagcgtcggggtttttcgcggaagtgcgagtcgttcggcgtaggtaagagtcgtcgggttcgggataaggtaggggcgttcgggcgtcgttgttttgtttcggggcgttttcgggtattttttaattttttttttttttttttttttattggcgtgtttaagagttaaattaaggagcgtttgagggtaaatagatttttgttattcgcgtttttgtatttttttttttgagttgatattttttggtgttttttggtttttcgttgttgttgggtgttttttggtttgtttttgtttttttttcgtttgtttattttttttggcgttaatttttaggtagttagtttagtagttcgaagttcgggtagtcgcgtttcgcggtttcggggtagcgcggcgggaatcgtagttaagtttttcgatacggggcgtacgggggtcgggtagttcgaggtcgggggtaagtagggagttcgggttaggcgcgagtcgagtttttcgaggtggtcgggttattatgttgaagatggttatgaagtttaaagttcgggcggcggagagcgagaagaagacggtcgcggcggttgtcgaggtggttgtcgaagttgcggcggcggttgcggcgttggtcgagtcgagagagtcgttcgcgtcgcggaagagcggggatttcgagaagttcgcgaagaattttaagaattcggcgcgggaggcgtttttcgaaaagtttttaatagataaggagcgtaagaagttcgagaagaagttgttggagtagaggcgaaaggaggagaagaagaaggagaaggagaggaagaagatggagaagatgttgaagaagaagaagaagaaggtgttagaagtttaggaggaggttcgatgtttcgaggtcgtcgtcgtcgcggtcgtcgtcgacgacgacgagggcgtcgaggagggcgtcgtcgggggcgtcgaggagggcgtcgtcgtcgggggtacgagtagggtttgggttgattgggatacggattcgagcgacgaggacgacgtttattacgcggcgtcgcgcgttgggggtatcgtgtggcggttcgggtcgtttaaggttggcgcgttgagcgtttatttgtttttcgtggtgtttttggttttttcggtgcgtagtttttcgtgggtgtttaattttttgttgtagaagcgtacggagtagggtcgcggttgcggtttcgtgttcggggcgatttgttgttttcgagtgtttttgggttgcgttttttttttttatttgggcggtcgcgttaagcgtagaggtcgcgggcgtttcggggttagaggcgttttcggttcgggttatggcgttcggcgtcgggggcgcgaggagcggtttatttagttagattttttatttcgttatcgttattagatattattatcgttgtgtagtgtgggtttttattcgtgttcgtgtgtgtgtgtggatatattttttttttcggttgttttgttttttggttcgtgttcgtttcgttttttttatatttttgttttttggttttttgtgtttttcgttttttcgaaaatttttttaagttcgggcgcgcgtttttttttttttcgtttattttagtttttcggcggcgttcgcgggagggggaggaggtttcgggggcgtcgggcgacgcggttcggggggtggagcgttggcgtcgtgcgaggggtcgttattggcgcggagacgtttttttttttttttcggtttagtcgggttgttgttcgagttcggggggtggggggcgttttttcggttcgtttcgttttcggtcgggcgcgggcggagggatttttttttcgggttttcggggggtcgttttttttcgtcggttttcgtttttttagtcgtcgtcgtcgtcgcggtcgtttttcggtttttttttttttttttttttttttatttttttcgtcgtcgtcgttttttttttttttcgttttttttcgttcgtcgcggcgtttttggttcggggcggcggcgggggttcggtcgaggtaataagagcggcggcggcggtagcggcggtagtagttttcgtagtttttgttttggttcgtttcggttcggcggcggttattagttttttcggtttcggttcgaggggcggggagttgcgcgcgtttttcggttcgatcgatattttttttttttcgttcgttcgcgcgtttcgcggttcgcggttcgtagttcgtttcgcgcgttttttgtcgaggagtcgagttcgcgttcggttcgttcgttcggcgttgtttcggttttttcggttcgcgtgaggtcgttcgcgttcgtcgtcgtcgtagttcggtcgcgtttcgtcgtcgtcgtcgtcgttatgggttgtttcgggaatagtaagatcgaggattagcgtaacgaggagaaggcgtagcgtgaggttaataaaaagatcgagaagtagttgtagaaggataagtaggtttatcgggttacgtatcgtttgttgttgttgggtaagggcgggcggggggcgtcggtttcggttcgggggttttcgaagggcgtttcgtaggtcgcgcgcgtcgagttcgtttttcgtttcgggcgcgcgttttcgagtttttcgttcgttcgcgggttttgtttgtggggggcgaggtcggaagggggatttaggggcgcggattcggtcgggcgggggtttaaaaacggggcggggggtcgtggcgacgcgggcgcgggtttttttttttcggtttgttcgtttagtgttttttttttgttttcgttttcgtttttttttttttttttttttttttttttttttcgcgaggtttatacgacgttaggggtttgggtgcgtgttggggagggggagggggagtttatggggtttcggagattgcgataaaaagagggtttcggggataggaaatcgggtggcgggtagagggagggggattcgttttcgtggggtgtgagatttgttgggagagggaaagaggggaagaaaggggcgaggagaggagggggtgacgttggggggcgtcgtggtggcggagggggtttcgttaaagggaggttttggcggggagaagtggtcgaggagagtgggggggttggtgatattagtttttcggaaaggatcggagcggtaaaggtggtgtagtgggggggagggggcgtaagggagtcgtggcgtcggagtcgggaggggggcggcgaggggaggagggagggcggttgtcgttgggcgcgatttggtgcgtttcgggtaggatcgattgattgtgtgtgcgcggagtagacgtgtttcgggttaggtcgggtcgtggaaggaggagaaggagagttaaataaaataagattattttttaatattaaaaaatggatagagttagtacgagaagtgtttagtgaagttaaatgatacgttattttatagtgtgatttttttttttttttttagatttgtaggtttttttaaaagtagagcggagaattaattgtagtagttgttttttttatttattacgagtagcgtttttttaatattattttaataaattattaaaaaaaatatatttttttgttggttggttatattgagagtgttttgtgaaaagaaaaaataaagatatttataaattagataaaattggagaatgatatttgtttgtaaatggttttttggtttggaaatggcgtggtttttttttttttttttttttttttttgttttttttaaggtgggaggggggattgagagtgttttaaggagattttttttttaggtgggaagagataaaaagatattaattagttgtttattaagtgatatttagttgtttggttttgggttttttttttttgattgcgattttttttttgattaaaaaaataataataaaataaaaaaaggttaattataaggagatggtttttttttttttttttttttaaggtgttgttttgggggaaaaaaatgtaatgaaatgattaaaagaattatatagtattaattaaaaatggaagttttttatttttttgataatttggttatttgaataaatttgtgaatttgttaggttaagatttagttcgtggttatattttaataaaatagtttgagtataaagaaaataataaaaggttgtttttatttatttttttttggtggtttttggtttgttttttttgtataggttatgattttgtttttttgggtttagatttataaaagtagaaaattattaattaagttaaaataagtgtttttggtgtttatgtatttgtaattttagtaattaaatggtatatgtgttgttgttttgtttaaaatttttaaaggtagaattatgttgttgggatattagtatgcgtataatttgattttaaagtataaatttggaaaagtttagaattttttttgtgaatgttattttagtattattttaagttaagtgtgatgttaatgatattttaaaatttttaatattttttgtgtagtgattataaagtttttatttaatttgagattgttatttagaatacgttttgcgttacgggggttaatttaagtgttttagtttatatgattatattatattatgatgtattgattgtttttggtttaggaatttgtagtttaagttagtgatataatattttgtatttttaaatggtgatttttattaaataatgtttttttataaaagaggaaatttaataatgttttaaattttttttttattttattttaatgatataaaaattaagtgaattagagaattataatgattttaaaataattttttagttatattttataaatgtggaaattgaggtacggatttgtttttgtttatgaaagataggttttgtaattgttatatagtttaatatttttgaaattagaatattagagattttgttaaatattacgtattgtttttttggttttttttaatagtgttatttatatttttaatttattagagttaggtttattaagatagtgtttgttttgaaattaatgtttttgtggaaattaattttaatttttatagatattgattacgggtttgtgaaaaggtaagtaaaggaggaatgttgtgttatttgggtattaaaataaaataatataattaaaagttaaaaagaaagaaaaaggtaataatagatttgtgtggaaggagggtaaaaaaattttatacgtggattatttgttggagaatgtgtattgtaaaaaagatgtaaaatagtaattttttttttagtttgatggaaatgtgttttttttatgaaatatatatgtatttttataaatgaaagatgatttaaaatggaggtatgtgtttttattttttgagttgggaagggtttggaattttttaaatttagtattttttagggatagttttttttttgattaaagttttgtttttatgttattttttattgttgtttttgtagtttatttaatgttaatagggttttaggaattgtatttgatgttaaagtgtggtttttttagaagatgatagataattgatggtttttttttttttttagtaatatagttgtatttagagggaatttatttttagaaagatatagtttgtgaggaaagaggaggatggataagtggataaaatgtaatgtagttttaggggtggatttttaagtagtttaaggggtaggaaatttgtatagaaagaagttgcgttgtgaaaatgttgaggaggaaagtgttgtatcgttacgtgatgtggaagagattgtagtgtttgggtattgttgggaatttcgggtattttaattatgaaatatttgataataaattatgtgtttagatatgtttatgtgtgaatgtttatgtattagggatttagttttatagttttaattttaatttttttgtttattttataaatgataaaattgcgttattttttttttttgtttttttttaatattattttataattttttaaataattaaaagaaaaattaaaattagtaaattttaaatttttgtttgttatttggatggtgaaatattgtaggtagatattgaattggatattgatttttttttttttgcgtcgaaatgttaaggaaagttgtaagtttgtgattttgtgtttggttttttgtatgttgtttttatggaaaaataaaataataatagtagatttttttgtttaaagtgttaaaatgttttttttataatttgagatttatttttattttttagg

SEQ ID NO: 768 - DNA, 8951 bp, Artificial Sequence
  chemically treated genomic DNA (Homo sapiens)
tttagaaaatgaaagtaagttttaggttatgaaggaggtattttaatattttgggtagggaggtttgttgttgttgttttgtttttttatagaagtaatatgtaaaaaattaaatataaaattatagatttgtaattttttttgatatttcgacgtagagaaaaggaaattaatgtttaatttagtgtttatttgtagtattttattatttaaataataaataagaatttaaggtttgttggttttaattttttttttgattgtttaaaaaattgtggggtggtgttggaaaggggtaaagagaaggaatgacgtaattttgttatttgtggggtaaataagaaaattgaagttaaaattgtgaaattgaatttttgatatatgaatatttatatataaatatatttagatatataatttgttgttagatgttttatggttaaaatattcgggatttttaataatgtttagatattgtagttttttttatattacgtagcgatgtagtatttttttttttaatatttttataacgtagtttttttttgtgtaggttttttattttttgggttatttaaaaatttatttttaaaattgtattatattttatttatttatttatttttttttttttttataaattatatttttttaaagataaattttttttgggtataattatgttgttgaggaaaaggggagattattaattatttgttattttttggaaaaattatattttaatattaaatatagtttttgagattttattagtattaggtaaattgtaaaaataatagtaaaaagtaatataagaataaaattttaattaaaaggaaaattatttttgggaagtattgaatttgaaagattttaagttttttttaatttaaagagtagaaatatatgtttttattttaaattattttttatttgtaaaaatatatatatgttttatggaaaaaatatatttttattaagttagagggaggattgttattttgtattttttttgtaatgtatattttttaatagataatttacgtgtgaagtttttttgttttttttttatataaatttgttattatttttttttttttttttaatttttaattgtattgttttgttttaatgtttagatagtatagtattttttttttatttgtttttttataagttcgtaattaatatttgtaaaagttaaaattagtttttatagaaatattgattttaaagtaaatattattttaatgagtttaattttggtaaattaaaaatataaatggtattattaagagaggttaaggaaataatacgtaatatttagtaggatttttaatattttaattttagaagtgttaaattgtgtaatagttataggatttattttttataggtaaaaatagattcgtgttttagtttttatatttatgaaatgtggttgaaaaattattttaagattattgtagttttttaatttatttaatttttatgttattaagatggagtaaaaagaggatttggggtattattaggtttttttttttgtggggaggtattatttggtgagaattattatttaaaaatgtaaaatattgtgttattggtttaagttgtagatttttaggttagaggtaattaatatattatgatgtaatgtagttatatagattaggatatttagattagttttcgtgacgtaaggcgtgttttgagtaatagttttaaattaagtggagattttgtgattattgtataaaaggtgttggaaattttaagatattattagtattatatttgatttaaagtagtattgagatagtatttatagaaaagattttagatttttttagatttatattttgaaattaagttatacgtatattaatattttaatagtataattttgtttttaaaagttttagataagatagtaatatatgtattatttaattattgaaattgtaaatgtataaatattaaagatatttattttgatttaattagtaattttttgtttttataaatttggatttaggagaataaagttatgatttatgtaaaaagagtaaattaaaagttattaaaggaaaataaataagaatagttttttattattttttttatatttaagttgttttgttgaaatgtgattacgaattaggttttaatttagtaaatttataaatttatttagatagttaaattattaaggaagtggaaaatttttatttttaattaatgttgtgtaatttttttggttattttattatattttttttttttaaaatagtattttaagaaaaaaaaggaggaaaggttatttttttatagttaatttttttttattttattattatttttttaattagaggaaaaatcgtaattaaaaaaagaaaatttaaaattaaataattaaatgttatttgataaataattaattaatgtttttttatttttttttatttggaggaaaagtttttttagagtatttttaatttttttttttattttgaggaggataaaaaaaaaaaaaaaaaaaaaaagaaattacgttatttttagattaagaagttatttatagataaatgttattttttagttttatttgatttgtgaatgtttttgttttttttttttataaagtatttttaatgtggttagttagtaggaaaatgtgttttttttaatggtttattaaaatagtgttgggggggcgttgttcgtggtgggtggggggggtagttgttataattaatttttcgttttgtttttgaaaaagtttgtaagtttggaaggggaaaaaaaggttatattgtaaaatgacgtgttatttggttttattgggtatttttcgtattaattttatttattttttggtgttggggggtggttttattttatttgatttttttttttttttttttacggttcggtttggttcgggatacgtttgtttcgcgtatatatagttagtcggttttgttcgaaacgtattaagtcgcgtttagcggtaatcgttttttttttttttttcgtcgtttttttttcgatttcggcgttacgatttttttgcgtttttttttttttattgtattatttttatcgtttcgatttttttcgaggggttgatgttattagtttttttatttttttcggttattttttttcgttaaagtttttttttggcgaggtttttttcgttattacggcgttttttagcgttattttttttttttttcgttttttttttttttttttttttttttttaataaattttatattttacggaggcgggtttttttttttttattcgttattcggttttttgttttcgaaattttttttttgtcgtagttttcggagttttatgggttttttttttttttttttaatacgtatttaaatttttggcgtcgtgtaggtttcgcggaaaaagagagaaagagagaaagagggggagagcgagagcgagagtaagagagagatattgagcgggtaggtcgggggagggggattcgcgttcgcgtcgttacggtttttcgtttcgtttttgagttttcgttcggtcgaattcgcgtttttgggtttttttttcggtttcgttttttatagatagagttcgcgaacgggcggggggttcgggagcgcgcgttcggggcggggggcgggttcggcgcgcgcggtttgcggggcgtttttcgagggttttcgggtcggggtcggcgtttttcgttcgtttttatttagtagtagtaggcggtgcgtggttcggtagatttgtttgtttttttgtagttgtttttcgatttttttgttggttttacgttgcgtttttttttcgttgcgttggttttcggttttattgttttcgaggtagtttatggcggcggcggcggcggcggggcgcggtcgggttgcggcggcggcgggcgcgggcggttttacgcgggtcgggagggtcggggtagcgtcgggcgggcgggtcgggcgcgggttcggtttttcggtaaggagcgcgcggggcggattgcgggtcgcgggtcgcggggcgcgcggacgggcgggaaggggagggtgtcggtcggatcgaggggcgcgcgtagtttttcgtttttcgagtcgaggtcgagggggttgatggtcgtcgtcgggtcgaggcggattagagtaggagttgcgggagttgttgtcgtcgttgtcgtcgtcgtcgtttttattgtttcggtcgggttttcgtcgtcgtttcgagttaaaagcgtcgcggcgggcggggggaggcggggggaggaggaggcggcggcggcgaggggggtggaaggaggaggaggaggaggagggtcgaggagcggtcgcggcggcggcggcggttgggagggcgggagtcggcggagggaggcggtttttcgggagttcggggagggggttttttcgttcgcgttcggtcggggacgggacgggtcggggagacgttttttatttttcgggttcgggtagtagttcggttgagtcgaggggggagagggggcgttttcgcgttagtgacgatttttcgtacgacgttaacgttttatttttcggatcgcgtcgttcggcgttttcgaggttttttttttttttcgcgggcgtcgtcgaggggttggggtgggcggaaggggagggagcgcgcgttcggatttaggaaaattttcgaaagagcgagagatatagagagttagagagtaggagtgtggaaaaagcgaggcgagtacgaattaaaggatagagtaatcgaaaaggaaaatgtgtttatatatatatacgaatacgaataaaaatttatattatatagcgatggtggtgtttggtggcggtggcggggtggggggtttgattagatgagtcgtttttcgcgttttcggcgtcgggcgttatggttcgagtcgaaggcgtttttggtttcggagcgttcgcggtttttgcgtttggcgcggtcgtttaagtaggagaagaaggcgtagtttaggaatattcggaagtagtaggtcgtttcgaatacgaagtcgtagtcgcggttttgtttcgtgcgtttttgtagtaggaagttgagtatttacgaggggttgcgtatcgagaagattaggaatattacgaggggtaggtgggcgtttagcgcgttagttttgagcggttcgggtcgttatacgatgtttttaacgcgcggcgtcgcgtagtaggcgtcgttttcgtcgttcgagttcgtgttttagttagtttaggttttattcgtgttttcggcggcggcgtttttttcggcgttttcgacggcgtttttttcggcgttttcgtcgtcgtcggcggcggtcgcggcggcggcggtttcggggtatcgggtttttttttgggtttttggtattttttttttttttttttttagtattttttttattttttttttttttttttttttttttttttttttttttcgtttttgttttagtagttttttttcgagttttttgcgttttttgtttgttaggaatttttcggggagcgtttttcgcgtcgggtttttggggtttttcgcgagtttttcggggttttcgttttttcgcggcgcgagcggttttttcggttcggttaacgtcgtagtcgtcgtcgtagtttcggtagttatttcggtagtcgtcgcggtcgtttttttttcgtttttcgtcgttcgggttttgagttttatggttatttttagtatggtggttcggttatttcggggagttcggttcgcgtttggttcgggttttttgtttgttttcggtttcgggttgttcggttttcgtgcgtttcgtgtcggggggtttggttgcggttttcgtcgcgttgtttcggggtcgcggagcgcggttgttcgggtttcgggttgttgggttggttgtttaagagttagcgttaaaaaggatgagtaaacgaaaaagggataagaataaattaaaaagtatttaataatagcgagaaattaaaaagtattaagaaatgttaatttaaaaagaaaagtgtaaaggcgcggatggtaggagtttgtttatttttaggcgttttttggtttggtttttgggtacgttaatggagaagagaaaagagagagaattggggggtgttcggaggcgtttcggggtaaggtagcggcgttcgggcgtttttgttttgtttcggattcggcggtttttgtttgcgtcgggcgattcgtattttcgcgggaggtttcggcgtttttcgatttatatgtgagtgaggtgtatttatacgtaaggtagcgtttgtcggtcgttcgtcgtcgtttcgcgtcgggataggggttcgttttagtcgtcgcgtcgtagttcggagttagagagtaggggagcgtcgcgtcggttagttatttgacgtagttcgtttcgcggtgtcgacgcgattgagtgttttcgtcggggagtagagtttttaatcggtttcgatgacgttttagtttttttagaggatcgatttatagtagcggtttttataaatcgaaggggaagcgcgaaaaatcggtttatcggggacgtatttaaatgggtcgtcgcgtattttgggggtgtaggtcggtgtcgggatcgcgcgggcgtgggtcgggggcgcgggggtcgcgatggcggggggcgcgggcgcgtttaaggcggtgggcgtttaatttcgttttttagatttgttttttaattttcggtgagtggtgtagttttgggcggcgtgtaaagtgtgcgacggcggcgtttatttttgttgtgcgtttttttatttttagttatttatttcgtttttttagcggcgcgcgttcgtcgaggtaggtgttagagagtcgaattcgaattatttgcgacgttcggacggagtttcgtattttcggacgagaaaagtgcgatgggagtgtaaagttttttttgttcgaagtagtaggcgcgtcggtgttacgggagtcgaggagcggtggtcgtggttgtggagtcggtgttcgaggcgtttttttaggtgggagaggtggcggttttgtttgggcgttttgggggttttggaatagagggaaaagtagtttacggaacgtgaatttgtttgagggtttttttaaaatttttaagtgtttcgtcgtatattaggatatagtagtgtacgggattaggagtagggttattaaatttttaagtagttgattttagttcgttttttttgggattttggttaggttatttgttgttattatggtgtttgttgggatacggtttatttatttaataaatgtttggtgtttgttagtttcgcggtttattatgtgtttaggtgagtcgaggcggttaggtaattaggttaagacgtgagtagtgttttggatgggatataggtttacgtttcggaaagtttagatatgtaaagtttataaattgttttttaattttttttttgattttttaatagagtttatgaaatttaagatgtttgatggagaaggagaaaaaagaaaagtttatttataaatggaaatatatttaatagtttttaggggtatggggcggttgatattattagaggttttgagtaaatttgtattattttaagttagttttgaaaataaaaagatattgttagttatttaatcggatgattgaaattttttttttttttttagtttgttttatttcgagtaagaaaaggtgtgatagatgaagatgttatatattattttttttggtttttttaggtatattgttgtttttattgtataaggttttttttttatgaatttgaaaagataatagagggcgatttaaagttattaaataatatttggaattaagaataggaagcgtagtttagatatcgttttgttttgggttgttgtagatttttgatttttttgaatttggttgaaaagttggggttaggtttttgttatatttttgattatggatggttttttttttatataaaaatatattttattttgaaaatgtttaaaggaattattttaggttgatgttttttatttaattaaagatgtataaaaatattgtgtagatatatttgaatgtgtttataggagaatttagtagtaaggttttagaatcgatgatttttaggttgtttgtattagtgatagtgaggtttattattatttattatttaaattagaatcgtttgatgatatagtataggttttatatttttagatggtaaattaaaaatttttggttgaatttgattgattgttatttttaaaaattgttaaagatttgtaagagggaagaataggttagatatttttgttatgttttatttgtttaaaagtatttttttttttgtttttattgtggtaaagtatagatatattgtttttaagaggtataaggtaaatagtaataaatataatttagatatttatgttaggagttataaagttatataatgaatataatgaagagtttttttatttggaaatttttgagttttattattattttttttttttagataaatattatatttgaattttaaaaggagtgaaattgttttatgttatatattaatatgcgttttaggtaaggtataattgggattattgttttagaaatgggtaacgtaagattaggttttattttttttagtttttaatttatgaggttattttttaaaataaaaattttttaagtgtaggttttatttatattttattatgattaattattgatggataaataaagtatttattttgtaaataaatgatagtaggtggaattatgggtttataggtaagtaaatgatatttagagtgttgaaatataagttggtttgtggttagttaggttgtttgtttttattttatataaagtgaaagaagagattttattgagtttttggttttaaatttgattttttgaggttttaaaagttgtgattttttttt

SEQ ID NO: 769 - DNA, 5659 bp, Artificial Sequence
  chemically treated genomic DNA (Homo sapiens)
aggataataatagtgtttttgttatagtgtcgttgtgaggattaaatgagttagtatatgataaagtttttagaatatagaattattattggttgggtgtggtggtttatgtttgtaattttagtattttaggaggttaaggtaggtggattatttgaggttaggagtttaagattagtttggttaatatggtgaaattcggtttttattaaaaatataaaaaaattagtgggtattgtggtaggtgttagtaattttaattattggggaggttgaggtaggagaatcgtttggatttaggaggcggaggtcgtagtgagtcgagatcgtattattgtagtttagtttgggtaataagattaaaatttcgtttcgaaaaataaatttttttaaataattaattaattaattaattaattaaaaaagaatatagaattattagggtgtatgttattaagagatagtatagggaaagagggagagagtttatatatgaaggtcgagggatagtgagtgttttttgtggttttttaaggagtttgggttttatttgtgtatggtagatagttgttgtaggattttaggacggttgatttttgtatttttgtagtatttggaattaggtgtagggtttggagttatttgtaggagtggtagagttttttagtggtagtttgtagaatgtagtgggagaaagattcggaaaaggggagtaattgacgaatgttatcgttggttggcgaggtggtttatatttgtaattttagtattttgggaggttgaggtaggcgaatggtttgagtttaggagttttaggttagtttgagtaacgtggtaaaatttcgtttttataaaaatataaaaaattagttgggtttatgcgtttatatgtttttatttatttgggaggttgaggtgggaggatttttggagtttgggaggtggagattgtagtgagttatgatggcgttattgtattttagtttgggcgatagagtaagatttcgttttaaaaataaaaaatgaaaaaaaaaaaaaattttaggttagacggtttgggtgattaggtgttttttagaagtgagatttgtatgtaggcgtaattagatagtggtgtttaaataaatttaaaaagtagataaaaaacgggtgttagaaaagcgaataattttagtgtagatatttagatattaggagatttttaggtagtgagagtggtcgcggaggtggttgggtagttgtgatttagtattaaggagtgggggagttacggagtttatagttttttcgagagtatgttaggtgggaagaggttagagagggatagttcgttgatgttgtttttttatcgttagtttggtttaattgtggaatttttttttagggttttgtttttagagggatttttttatttttggtttatcggggattaatgattaagttttttttgtttagtttttagttttgttttatttttttagttgtttttatttttttagaggtttttttattgttgtaggaagttttttcgagttttttttatagtttttttagtaagcgggattttagttcgtattagagagggataatcggatagtcgtggcggtgggtattttttgggaaagagtagtagtttaggaagacgagttataatagaattgtgggagtatttagttttttttggagagcgggagggtcggagggagggttttgtagttttgtagatagtgaggggttgggggagtgattttacggtaaatttttttttatttaggatgtagttggggttggagttaggtttggttatcgtggtcgtcgttttttttatattttttatgaacgtttcgaggggtttacggtgtttaaggttgcgtaggtgagtataggaggtattcgggttcgtttgatgtttagatttggaggagaggttgtgtaggaagtcgggttttagggtttgggtttttgtgaaggagtttttttgggatcgagattatttgataggatttagcgtggagaaaagggatgttttgagagttggggtcggggttgttgttatggagagagaaggagtagtttgggttgatggatagagttggatgttgatagattttaaatttatgggtggagagcggtagagttgggtaggggttagggtcgagattattttttttttgtttttttttttttttgttttgttttttattgtttgtagttggttcgggttgggatagtgggtagttagggtgttaagttgtttttggaggtgagcgagcgggtgcggattttgatttaggtttattttttttcggaacggtttttgtatttgttttttatttatttggtgtgtcgtagcgttatagaaggtacgatagggattttttattgtttttttttaattttaggttttgtttttaggatattgtttttaagagtttcggggtggacgtgtacggtttgagtttatagggtggtagatgggtataggggtatagaggtatttttagatttttttgtgttttaggagagtaagagtagcgtatggatttgagttatttagtgtacgtagataattgcgttttggattttgatacgggagagtgttggcgggagtttttagtttatatttatcgggattataggtgggtagtttttttagtggttaggtaggtgggtagataaaggttattttattgtcggtttgggtttgggttggggttttattgttttttgtttttttttttttttagcggatttttttattttaacgatgatttttagggtggggatttgttttttacggagtttaacgtttttattgttacggtgcgtggagtggggggtgtgacggtgtgataaagggtttagttgtggggttaggatttaaaatagaaggttttagaggtaaatgtagggaaatggttagggtttttaatttttttattttttcgttttcgtagttttttcgttgtttttttcgtagtaaggtttttaagtggtcgaattaattttattattagtatttgtttcgttttttaaagaagggtgaatgaagtatagtttgtaggtgtttttaggattttatggttttattttagggatttggggaatttgaaatagttttttttttttgtagcgaggtgagtatagtggttggcgtatagatattagggtcgttttgattggggttcggattttgaatttttttgaggtttagttttttagattggggtgataataatagtacgtattttaaagggttattgtaggaagtaatttaggtaatgtatttaaaagaatgaggtagcgtttggtaatgataagtaattaatgaatgttaggtgggaaattttcggatattaggggttaggattgggtaggaggagaggggtagtgattgtttatttgggtgtggggtgtgaaaatggttttaatatttgtatttttttttgtatagagtttggtattgtatgtatagttttagattgttttaagttttggatttaaagggttgagtgggaaaaattagggtattaggggttaggaattaataggagattattcgtggagattttttttttttttggtttttaattttttttgtatttttgttttgtaagttgaagttgattttttatttgttttaagttagtttttgaattaaggagtaggaagtggtagcgagagagttgattttttttgtgtttttgtttttattttgttttagggagtgagggttaagttttttgagagagttaatttttggagttgaatttgtttttatttttttaggttcgggtgcgttttcgttgtgggcgttttgtggtttttagtttcggtgtcgagaatttttatggggtgtgggtcgtgattcggggacggcgttgtgttttggtattgtggtatacgtgggtatttgagtatagggagtaggtaaggagcggggtaggaagggatgtggtttttttggtgcgtgaagggtgggtaaggagttttcgagaaggtttatagtcggtgagggttaggggttgagttgatttagggaaggtgggtgtagggaatgggttatatttttttttttaattttaggagtggatagaagttaaagaattgttgtaggagttataggaggaggaggaagaggaagaggaagaaatgtttagtaaagatttttttttagagttttttagtcgtaggtattagagggtttaagataagattggaagggtatttcgggttcgggaggagttgtgagtggttgagttagttttttgaggatgtggttatttgatttgtggaaggttattttgatgttaggatatataggaagtttttgtgtgatattaggagtagaatagtaagttttttgtttttgtatttttattattttggggatttataagggtttggatttagaggatagtgtataggttagtttggagtttattaggtttggggagttgggacggggtttcgttgtcggatttgtagttttggatagatggggaatattgtgtttttttgaatagaaatggtaggggaggaggttgatgttttaaatgaagaggatggtggggttgggaggtataattttgttttttttttttagtttgtgtaataaaggtcgtgaagattttttagttaggggttagttaagtgtattatagattttgtgatggttggaggtgggggtggttttggttggtttgggaggagataggtgtttttgggttttttagaggcggggcgtttggagtttgtgatttgttagggaaattttagttatttgttttttttatgtaaatgatttaagtttttggtagttgttttttaggtttttaagtgtaagttttgttttttttttttgagttttgttgagatttagggtcgtttgttttttttttgatttttgtttttatagtttcgagagggtaaggagggggttagattttagtttgggagtagcgtgcgggttttttttttatttgaaattcgttgttcgtttataataggggtagatttgtttatttttttttgtgggttttttgtattttttttttttaataggattagatttagaggtagttggttggggtttgtcgagaagaaggattatttagattagttttttttaattttagtttttgtttgtatttttttatatttattaaatttttttttttattattttgagttgaggagtatagtttgaggtattgataatggggttatttattatttttatattttattttttggtttggttgttaagtggttttgattgttaagattattattatggatgggggtcgggattaggggggttattggagttgtagttgtttgtttttttgtattttttttaaattttaatttttaatttttatagttttgttttaattttgtggggtttgatgtttttatttttgtttgtagagattgattagggaagtatttttttattttttttttttttagggtttgtggtgggggttgtttttttttatggttttatatttttgtttttaatttttttttcggttgggtttaagtttttttggaattcgtatatttttttttttttttttattttttttttttatttttgttagttgattttatttgtttgacgttgtggttggttttatttttttttgttagg

SEQ ID NO: 770 - DNA, 5659 bp, Artificial Sequence
  chemically treated genomic DNA (Homo sapiens)
tttgatagggaagggtagagttaattataacgttaggtaaatgaaattagttggtaggggtggggggaaggggtggggggagggagggaggtgtacggattttagagagatttgggtttagtcgggaggagggttgggggtaggagtgtggggttatagagaggggtagtttttattataagttttgagagaggagggggtgaaggggtgtttttttggttagtttttgtaggtagagataagagtattaggttttataggattagagtaaagttgtgaggattaagggttggggtttgggaggggtgtaaaggagtagataattatagttttagtggtttttttggtttcggtttttatttatggtgatgattttggtagttagggttatttagtaattaggttaggaggtgggatataagggtgatagatggttttattgttagtattttaaattgtgttttttagtttagggtggtggggaagagggtttggtgagtatgggagggtataggtaggagttgagattagaaaggattgatttggataattttttttttcgataaattttaattagttgtttttgggtttgattttgttgggggagaaaggtataggggatttatagagaaggatggataggtttgtttttattgtgggcgggtaacggattttaagtggagggaaggttcgtacgttgtttttaggttggggtttggttttttttttgttttttcgaggttgtgaaagtaggggttagagagaaagtaggcggttttaagttttagtaaagtttagagagggaagatagggtttatatttggaggtttaaggagtagttgttaggggtttgggttatttgtatgaggggagtaggtggttgagatttttttgataaattataggttttaggcgtttcgtttttgggaggtttaaagatatttgtttttttttaggttagttagagttatttttatttttagttattatagaatttgtgatatatttgattggtttttggttgagagatttttacgatttttattgtatagattgggagagaggagtagggttatattttttaattttattattttttttatttaaagtattagtttttttttttgttatttttgtttagggaggtatagtgttttttatttgtttagggttgtaggttcggtagcggggtttcgttttagttttttaggtttggtgagttttaggttagtttgtgtattgttttttgagtttaggtttttgtaggtttttaagatggtgggggtgtagggatagagagtttgttgttttgtttttgatgttatataggggttttttgtgtgttttggtattaagatggttttttataagttaagtggttatatttttaaggagttggtttagttatttatagtttttttcgaattcgaggtgtttttttagttttgttttggattttttggtgtttgcggttagggggttttggggaagggtttttgttgggtattttttttttttttttttttttttttttttgtgatttttgtagtagttttttggtttttatttatttttggggttggggaggagagtgtggtttattttttgtatttattttttttgggttagtttagtttttgatttttatcgattgtgagttttttcgggggttttttgtttattttttacgtattaggagaattatatttttttttatttcgttttttatttgttttttgtgtttaggtgtttacgtgtgttatagtgttagggtatagcgtcgttttcgagttacggtttatattttatggggattttcgatatcggagttgaaggttataaggcgtttatagcgaggacgtattcgagtttggagggatgagggtaggtttagttttagggattggtttttttagagaatttggtttttattttttagagtaggatggggataggggtatagagaggattagttttttcgttattattttttattttttaatttagggattagtttggggtaaatgagaaattagttttaatttgtagagtaaaaatgtaagaggagttgggaattaaaggaaaaaggggtttttacggatggttttttgttggtttttgatttttggtattttgattttttttatttagttttttgaatttagggtttgaagtaatttggggttgtgtatgtagtattagattttatgtagaaggggatatagatattggaattatttttatattttatatttagatgaataattattgtttttttttttttatttaattttagtttttggtgttcggaaattttttatttaatatttattaattgtttattattattaggcgttgttttatttttttaggtatattatttaaattattttttataatgattttttaaaatacgtattattattattattttagtttaggaaattaaattttagaaaggtttagaattcgagttttagttaaggcggttttggtatttgtgcgttagttattgtgtttatttcgttgtaaagaggaaggattattttaagttttttaaatttttagaatagggttatggagttttggaggtatttgtaagttgtgttttatttatttttttttaggaggcgagataaatattgatggtagggttgattcggttatttagagattttgttacggaggaagtagcgggagggttgcggaggcggggaagtgaaagggttaaaagttttggttatttttttgtatttgtttttggagttttttgttttgaattttgattttatagttgggttttttgttatatcgttatattttttattttacgtatcgtgatagtgagggcgttgggtttcgtgaagaataggtttttattttggaagttatcgttgaggtagaggagttcgttggggagggaaaaaagtaagaggtagtgagattttaatttaggtttaggtcggtagtgggatgatttttgtttgtttatttgtttgattattagaggggttgtttatttgtagtttcgataggtgtaggttgggggttttcgttagtattttttcgtgttagggtttaggacgtagttgtttgcgtgtattgggtgatttaggtttatgcgttgtttttgtttttttaggatataaaggggtttgggggtatttttgtgtttttgtgtttatttgttattttgtgggtttaggtcgtgtacgtttatttcggggtttttgggggtagtgttttgggggtagggtttgaggttggagaagagtagtggggggtttttgtcgtattttttatggcgttgcggtatattaggtgggtgaaggatagatgtaggggtcgtttcggggagaagtaggtttgggttaaggttcgtattcgttcgtttatttttagaagtagtttagtattttgattgtttattgttttagttcgggttagttgtaggtagtgaaaggtagggtagaaaaggaggaaggtaaggggagggtggtttcggttttagtttttgtttaattttgtcgttttttatttatgggtttggagtttgttagtatttagttttgtttattagtttaaattgttttttttttttttatgataataatttcggttttagtttttagaatattttttttttttacgttgggttttattaggtagtttcggttttaagaaagtttttttataaaagtttaggttttggggttcggttttttgtatagttttttttttaggtttgggtattagacgggttcgggtgttttttgtgtttatttgcgtagttttaagtatcgtgagtttttcgaagcgtttatggggggtgtgaggggagcggcgattacgatagttagatttggttttagttttagttgtattttaaataggaaggagtttatcgtggagttatttttttagttttttattgtttgtagggttgtaagatttttttttcggttttttcgttttttagaagaagttagatgtttttatagttttgttgtggttcgtttttttgagttgttgtttttttttagagagtgtttatcgttacggttgttcgattgtttttttttggtacgggttggaatttcgtttattaaggggattgtggagagaattcgggagagttttttatagtagtaagggggtttttgagagggtagggatagttggaaaagtggggtagagttgggaattaggtaggaagggtttgattattaattttcgatgagttaagaatagaggagtttttttggaaataggattttaagaggaagttttatagttaggttagattggcggtagggagatagtattagcgggttatttttttttgatttttttttatttgatatgttttcggagaaattgtggatttcgtggtttttttattttttgatattgagttataattatttagttattttcgcgattatttttattatttgggggttttttaatatttggatgtttatattggaattattcgtttttttgatattcgttttttgtttattttttgaatttgtttaagtattattatttagttacgtttgtatataaattttatttttgagagatatttagttatttaagtcgtttaatttggggtttttttttttttttattttttgtttttgagacggggttttgttttatcgtttaggttggagtgtagtggcgttattatagtttattgtaatttttattttttaggttttagaggtttttttattttagttttttaagtaggtgggaatatataggcgtataggtttagttaattttttgtatttttgtagagacggggttttattacgttgtttaggttggtttggaatttttgggtttaagttattcgtttgttttagttttttaaagtgttgggattataggtgtgagttatttcgttagttaacggtggtattcgttaattatttttttttttcgggttttttttttattgtattttatagattgttattagagggttttattatttttataggtgattttagattttgtatttgattttaggtattataggaatgtaaaagttaatcgttttaaaattttgtaatagttgtttattatatatagataaagtttaaattttttgggaggttatagaagatatttattgtttttcggtttttatgtgtgggttttttttttttttttttatattgttttttggtaatatatattttgatgattttatgtttttttttaattaattaattaattaattaattatttaaaaaaatttatttttcgaggcggagttttgattttgttgtttaggttggattgtaatggtgcgatttcggtttattgcgattttcgttttttgggtttaagcgatttttttgttttagtttttttagtagttgggattattggtatttgttataatgtttattaatttttttgtatttttagtaaagatcgggttttattatgttggttaggttggttttgaatttttgattttaagtgatttatttgttttgattttttaaagtgttgggattataggtatgagttattatatttagttagtgatgattttgtgttttaagagttttattatgtgttaatttatttaatttttataacgatattatgataaaaatattattattatttt

SEQ ID NO: 771 - DNA, 5193 bp, Artificial Sequence
  chemically treated genomic DNA (Homo sapiens)
taatattgatttattagatataattgtaagtatatagttttatttcggttttattttatttatgtatgtatttatttatttatttagagttagcgttttattttgttatttaggttggagtgtagtagcgtaattttggtttattgtatttttttttttttttttttttttttttgagtcggagtttggttttgttgtttaggttggagtgtagtggcgcgattttggtttattgtaagtttcgtttttcgggtttatgttatttttttgttttagtttttcgagtagttgggattataggtattcgttattacgttcggttatttttttttttgtatttttttagtagagagagggttagttaggatggattcgattttttgatttcgtgattcgtttgtttcggttttttaaagtgttgggattataggcgtgagttatcgcgttcggtttgtatttttgaattaatgggtttaagtaattttttttttttagttttttgagtagttggaataggtacgtaatattatattttgttaatttttttttatttttttaagagatgggggttttattttgttatttaggttggttttagatttttgtttttatgttatttttttgttttagtttattaaagtgttgggtttataggtataagttaatatatcgggtttttatttgggtttaagagacgagtattagagaaatagattatatatgagaaagattcgtttgatttgtggatgtgtttgaaatttatttgtttttttttttaaaatcgatttattttttttaaaatcgatttatttttttttataaatagttattaggatttgatatatacgagtttgttattaatgattataggttattttgtgtttattaaattaggttttgttttagatataatttgttaattttattaatttttataattgtttcgataaaatatatatgcgattttttttataaaagggataaggaagttaggtgcggtggtttatgtttgtaattttagtagttttgggaggttgagacgggtagattatttgagattaggagtttgagattagattggttaatatggtgaaattttcgtttttattaaaaatataaaaattagtcgggcgtggtggtggtatttgtaatttagttattcggggagttgaggtaggagaatcgtttgaatttgggaggtagaggttgtagtgagtcgaaattacgttattgtattttagtttgggtgatagagtgaaattttattttaaaaaaaaaaaaaaaaaaaaagggtgggggataaggaaatatttaggaacgacgtgatatgatttgtgtttagggaaattattagggttgaaagtaaggttattttgggttttaatggttgtaaggtattagataaaatacgttaattatgttagtttatatttttttattttttaaattgttataatagtagttattttttcggtcggttaggtttggtttagttggattaaatgaatgaagcgtagtaagggttgggcgtaggtaaattgtgtagttatttttttttacgattttcgttgagtttacgtcgtttcgttcgtcggtcgttagggatcgttgtgacgtggttcgggtttagtacgcggtcgttttggtttagggaagtttttgtttttatttttagtaggagtcggttttttgtgtgtgtgttcgttcgttttttgtttcgttttgcggttgtttattgtttttttacggtttattatggttttgttgtatttcggtcgcgtttttttcgggatcgtcgtcgttttttattcgggtttcgtcgtcgcggtttttgttagagttaggtaagttaagggaaacggagatggagttagggcgatggttttgtttcgtcgagttgcgagtattttaggatatttatttttttcggtttttaaatatatattgttatttatacgtatatatatatttttttgttattttttcggtttttttttattggggattgaggattgagcgttcgtgttttatagtgatttttaggattttatatttttttggttttcgtattgggttttgtaggaaggcgtgtaacgtaatttttagggaaaggaagtgtggttttcggcggttgtcggatttttatttagtgggaggggtgcggatagtattggggtagcggcgtcgggtaacgatcgtgtttttgatagggtgtttgggggcggcgggcgtatttgttttggttttcggttcgttcgtatttgttcgattatttttataaattagaataaaattatagtcgggtgtagtggtttacgtttgtaattttagtattttgggaagttaaggtgggtggattatttgaggttaggaggtagagatttgattaatagggtgaaattttgtttttattaaaaatataaaaattagttaggcggggtggtatatatttgtaattttagttatttgggaggttaaggtagaagaatcgtttgaatttagagataggtggtagtgagttacgatcgtgttattgtattttagtttgggtgatagagtaagatttcgttttaaaaataaataaataaataaataaataaataaataaagtaggtcgggggcggtttacgtttgtaattttagtattttggggggtcgaggtgggtggattatgaggttaggagtttaagattagtttggttaatacggcgaaatttcgtttttattaaaaatataaaaattagttgcgtatggtggtaggagtttgtaattttagttatttgggaggttgaggtaggagaatcgtttgaattcgggaggcggatgttgtagtgagtcgagatcgtattattgtattttagtttgggcgataagaataagatttcgttttaaaaaaataaaaaataaataaaatttattaagttttgtttttatatgtttttttatatttaaaataaattggttttttaggatggtagttttttttgggaatatgttttgtgttagttatgttagtatgtaatgtgtttttattattgttattgttaaatgaattaataagtataataagttgtttagtttttttaatatagtaagtattaatagttatattttatataaataaaagttttttggggtttttagtaagttttaagagtataataggatttaaagattataaagtttgagaattgttgttttagattaatattattttttttttttaaaaatatatagttgtatttatttgttattgttgattttagtgtggttttaatatttattgtttattttttaattaaagtagtttttattttttagagaaaattaagaagagagggtggtgatgttagttttatataagtattttaaatagattggtaaaattcgtgaatatacgtagtataatttttatagttatatgtattttttttatatttttttaaagtggtaataaagaaagatttttttattttaatgatttaaagttatagtttttcgagtatgtaaaaataaataaaggtatataaattttaaattatgtttggtaattaatgtgtttgtagtttattttagaaattatttaggtatataatgaataataatttgttaattaatttattgtaatattagattaaaagtgtaagttattttaaagattttagaaattgtttttaaggttaggcgtagtggtttacgtttgtaattttagtattttgggaagttgaggcgggtaaattatatgaggttaggagtttaagattagtttggttaacgtggtaaaattttatttttattaaaaatataaaaattagttgggtgtagtggcggatatttgtaattttagttatttgggaggttgaggtaggagaattatttgaatttaggaggcggagtttgtagtgagttaagattacgttattatattttagtttgggtgatagagtgagattttattttttagttttaaaaaaaaaaaaaagaaagaaagaaattgttaagttggtatattataaaatataattattgtttttttaaaagtttatttttagtttaataagaaaaatattagataaattttagtagaggggtattttataagatatttgattagtatttttaaaattgttatagcgaagaggagtttatggagatatgtaattaagtataatgtggtgttttagatggaatcgtggaatagaaataggtaaaagttaaggaaatttaaataatgtgtggatttaataatgtatggattaggtatggtggtttatgtttgtaattttagtattttgggaggttaaggcgagtagattatttgaggttaggagtttgagattagtttggttaatatggcgaaatttcgtttttattaaaaatataaaaattagttgggtatggtggcggttatttgtaattttagttattttagaggttgaggtgggataatcgtttgaatatgggaggtagaggttgtagtgagttgagattacgttattgtattttagtttgagtgataaagagggaaattgttttaaaaataataataataatgtattagtatggatttattaattgtaataagtgtgttatattaatgtaaaatgttaataggggaaatttgggggtaagggtatatgggattgtattatttgtttaattttttgtaaattaatattgttttggtttacggaggttgaggtagaattgtttgaattttggaggtagagattgtagtaagttaagattgtattattgtattttagtttgggtgatagagcgagattttgttttaaaaaaaaaaaaaaagtttgttagaatagtaatttaattttatttaatataaatttgtattttttataattttaaatatataagagtaatatggtcgggtgcggtggattatttgaggtttggagtttaaaattagtttggttaatatggtgaaattttatttttattaaaaatataaaaattagttgacgtggtaatgtatgtttgtaattttagttatttgggaggttggagtgggagaattatttgagtttaggaggtaaacgttgtagtgagttaagatagtattattgtattttagtttgggtaatagagtaagagtttattttataaataaataagtaaaatggattttggatttagttaatgggattgagttaatgtgttttttattttagt

SEQ ID NO: 772 - DNA, 5193 bp, Artificial Sequence
  chemically treated genomic DNA (Homo sapiens)
gttgaaatgagaaatatattagtttaattttattagttagatttaagatttattttatttatttatttatgagatagatttttgttttgttgtttaggttggagtgtagtggtgttattttggtttattgtagcgtttgttttttgggtttaagtgatttttttattttagttttttaagtagttgggattataggtatgtattattacgttagttaatttttgtatttttagtggagatggggttttattatgttggttaggttggttttaaattttagattttaagtgatttatcgtattcggttatattatttttatatatttaaaattatgaaaaatataaatttgtgttaaataaaattgaattgttattttgataaattttttttttttttttgagatagagtttcgttttgttatttaggttgaagtatagtggtgtaattttggtttattgtagtttttgtttttagggtttaaataattttgttttagttttcgtgagttaaaatagtattgatttatagaaaattgagtaaatagtatagttttatatatttttatttttaggttttttttattaatattttatattggtatggtatatttgttataattaatgaatttatattgatatattattattattatttttgagatagtttttttttttgttatttaggttggagtgtaatgacgtgattttagtttattgtaatttttgttttttatgtttaagcgattgttttattttagtttttggagtagttgggattatagatgatcgttattatatttagttaatttttgtatttttggtagagacggggtttcgttatgttggttaggttggttttaaatttttgattttaggtgatttgttcgttttggttttttaaagtgttgggattataggtatgagttattatgtttggtttatatattattaggtttatatattatttagatttttttagtttttatttatttttgttttacgattttatttaggatattatattatgtttagttgtatgtttttataagttttttttcgttgtgataattttgggaatgttggttaggtattttgtaggatgtttttttattggaatttgtttgatgttttttttattagattggggataagtttttgggagaatagtaattgtattttgtaatatgttagtttgataattttttttttttttttttttttttttggagttgggggatggaattttattttgttatttaggttggagtgtagtggcgtgattttggtttattgtaaatttcgttttttgggtttaagtgatttttttgttttagttttttaagtagttgggattataagtgttcgttattatatttagttaatttttgtgtttttagtagagatggggttttattacgttggttaggttggttttgaatttttgattttatgtgatttgttcgttttagttttttaaagtgttgggattataggcgtgagttattgcgtttggttttgaagataatttttaagatttttagggtaatttatatttttggtttaatattataatgaattgattaatagattattatttattgtatatttaaataatttttaagatagattatagatatattgattattaagtataatttaaaatttatatatttttgtttatttttatatgttcgagaggttatagttttgagttattaaaataaaaaggtttttttttgttgttattttaaggaggtataaaagggatatatgtggttgtagaagttgtattgcgtgtgtttacgagttttgttagtttgtttagaatgtttgtgtaggattgatattattattttttttttttaattttttttgggaaatagaagttattttggttaaaagataagtaatgagtgttgagattatattaggattaatagtgataaataaatataattgtgtgtttttaaggaaaaagagtagtattggtttaaagtagtaatttttaaattttgtgatttttagattttgttatatttttaaaatttattgaaaattttaaagagtttttatttatgtggggtataattattaatatttattgtattagaaaaattgagtagtttgttatatttattgatttatttgataatagtaatgatggaaatatattgtatgttaatataattaatatagaatatgtttttagggagaattattattttaaaagattagtttgttttaaatatgaaagagtatatgaggataaaatttagtgaattttgtttattttttatttttttgagacggagttttgtttttgtcgtttaggttggaatgtaatggtgcgatttcggtttattgtaatattcgtttttcgggtttaagcgatttttttgttttagttttttaagtagttgggattataaatttttgttattatgcgtagttaatttttgtatttttagtagagacggggtttcgtcgtgttggttaggttggttttgaatttttgattttatgatttatttatttcggttttttaaagtgttgagattataggcgtgagtcgttttcggtttgttttatttatttatttatttatttatttatttatttttgagacggagttttgttttgttatttaggttggagtgtagtggtacgatcgtggtttattgttatttgtttttgggtttaagcgatttttttgttttagttttttaaatagttgggattatagatgtgtgttatttcgtttggttaatttttgtatttttagtagagataaggttttattttgttggttaggtttttattttttgattttaagtgatttatttattttggttttttaaaatgttaggattataggcgtgagttattgtattcggttgtgattttgttttgatttatagaagtggtcggataggtacgggcgggtcgggggttaggataggtgcgttcgtcgtttttaggtattttattaagggtacggtcgttattcggcgtcgttgttttagtattattcgtattttttttattgaatgggagttcggtaatcgtcgagggttatattttttttttttagggattgcgttgtacgtttttttgtagggtttagtgcggggattagagggatgtgggattttgaggattattgtggggtacggacgtttaatttttagtttttagtaagggaaagtcgagggggtggtagaaaagtgtgtgtgtgcgtgtgagtgatagtgtgtatttgggggtcgggaggggtgaatgttttggggtgttcgtagttcggcggggtagggttatcgttttggttttattttcgttttttttggtttatttggttttggtagaggtcgcggcggcgaggttcgggtggaaggcggcggcgatttcggggaggacgcggtcggagtgtagtagggttatggtggatcgtaggagggtagtgggtagtcgtaggacggagtagagggcgagcggatatatatatagggaatcggtttttgttgaaggtaaggatagggatttttttgggttagagcggtcgcgtgttgggttcgagttacgttatagcgatttttggcggtcggcgggcggagcggcgtgggtttagcggaggtcgtggaagaggatgattgtatagtttatttacgtttagtttttgttgcgttttatttatttaatttagttgggttaggtttggtcggtcgaagaggtggttgttgttatggtagtttgaaagatgagaaaatgtaggttgatatagttgacgtattttgtttgatgttttatagttattaggatttaaggtggttttatttttaattttaatagtttttttaagtataagttatgttacgtcgtttttgaatgtttttttattttttattttttttttttttttttttttttgagatggagttttattttgttatttaggttggagtgtagtggcgtgatttcggtttattataatttttgttttttaggtttaagcgatttttttgttttagtttttcgagtagttgggttataggtgttattattacgttcggttaatttttgtatttttagtagagacgggggttttattatgttgattagtttggttttaaatttttgattttaagtgatttgttcgttttagttttttaagattgttaggattataggtatgagttatcgtatttggtttttttattttttttatggagagggtcgtatgtgtattttgtcggggtagttgtgaggattaataagattagtagattatgtttaaaatagggtttgatttagtaagtataaaataatttatggttattaatgataaattcgtgtatgttaaattttgataattgtttgtggaaggaaatgaatcggttttgaaggaaatgaatcggttttaaaggaaaaagtaaatgaattttagatatatttataagttaaacgagttttttttatgtgtagtttatttttttgatattcgttttttaaatttaggtaggggttcggtgtgttggtttatgtttgtaaatttaatattttggtagattgaggtaggaggatagtatgaaaataagagtttgagattagtttgggtaataagatgaaatttttattttttaaaaaaataaaaaaaaattagtaggatgtggtgttgcgtgtttgttttagttatttagaaggttgaggagggaggattgtttgagtttattaatttaagagtgtaggtcgggcgcggtggtttacgtttgtaattttagtattttgggaggtcgaggtaggcggattacgaggttaggagatcgagtttattttggttaattttttttttattaaaaaaatataaaaaaaaaagtagtcgggcgtagtggcgggtgtttgtagttttagttattcgggaggttgaggtaggagaatggtatgaattcgggaggcggagtttgtagtgagttaagatcgcgttattgtattttagtttgggtaatagagttagatttcgatttaaaaaaaaaaaaaaaaaaaaaaaagagtgtagtgagttaggattgcgttattgtattttagtttgggtaatagagtgagacgttggttttaaataaataaataaatatatatataaataaaataaaatcgagatagaattgtgtatttgtaattatatttggtgggttagtatta

SEQ ID NO: 773 - DNA, 5070 bp, Artificial Sequence
  chemically treated genomic DNA (Homo sapiens)
  unsure 3264: n is a or g or c or t
cgtttattttgttagaaaagattttagttaggcgcggtggtttacgtttgtaattttagtattttgggaggtcgagacgggcgggttatttgaggttaggaatttaagattagtttggttaatatggagaaattttatttttattaaaaatataaaattagtcgggtgtggtggtgcgtgtttgtaattttagttatttaggaggttgaggtaggagaattgtttaaatttgggaggtggaggttgtagcgattttagattgcgttattgtattttattttgggtaatagagtgagtttttgttgtaataaaaaaaataaaataaataaaaaataaaaatagaaaagaaaagatttcgaatttgttttttattttagcgtagaggtagaagacgagaatgaatcgagaaggagaatttttatattagtaaagaatggatgttgcgtttacgggtagtttttattatattgtgggtttgtttttagaaagagagaaggtggtggtagagatgatgtcgttgtagaagttagaagagggtttagttgatgtttaaagtttaggaggaaaggatttaatattagagaaaaattattaagaatttttagtatttaaatagtttgatgaggtgggaattttaaatagaaaggaggtaagaagtaattatagttgggtacggtagtttatatttgtaattttagtattttgggaggttaaggtgggcggattatttggggttaggagttcgagattagtttgggtaatatggtgaaattttatttttattaaaaatataaaaattagttgggtgtgatggtacgtgtttgtaattttagttatttaggagggtgaggtaggagaatattttgaatttaggagatagaggttgtagtgagttaagatcgtgtcggtgtattttagtttggtgatagagtaagatttcgttttaaaaaaaaaaaaaaaaaaaaaaaaatagtaagtatatttgttatttagattggagtatagtggtgtagttttggtttattgtagtttcgatttgttgagtttaatgattttttaaaagagatttataagttatttttattttttaatttagaggtaaaagttttaaataaaatatgagtaggttggacgtagtggtttatgtcggtaattttagtattttgggaggtcgaagtaggttgattatttgaggtcggaagattaagattagtttgattaatatggagaaatttagtttttattaaaaatataaaattagttgggcgtggtggtgtatgtttgtaattttagttatttgggaggttgaggtaggagaattatatgaatttaggaggcggaggtcgttatgagtcgagattattttattgaattttagtttgggtaataagagcgaaaaaagagattaagattattttggttaatatggtgaaatgttttttttattaaaaatacgaaaattagttcggcgtggtggtgtgtatttgtgattttagttgttcgggaggttgaggcgggaggatcgtatgagtaggttgtagtgagcggagatggcgtcgtcgcgttttagtttgggtgagggttaaaaagaaaaaaaaaaattaatagtttttgggttcggggtttttatttaattttatggtttttttttagataaatttttattttattttttatattatttcgttttttttatattttttaatatttttgtagcgggtaaattatataaatggtaaatttatggattaattgtatttggtttaagtgtttattttttgttcggttattagttggaaatagatagggtaggtttaagcggttgtatggagtttttattggggaatagtgtagggttatatttttattatagaaggggtagtggattaataaggtagggtatggtgtttgattttttgtaatagatatttaatttggttttcggaagttagaaaaggttttttagaggaaggaattttgagttggaatttgttaaataagtaaaagttaggtagaagggtataagggttgaagaaaaagtttaggtataggagagaatgattaagagtaagggtagagtgggaatagatggggttggataggtaggtaaaggggagattttgtaggattttgtaggttatgttgggaattttagattattttttgagatttatgaggagttattggtgaatttatttatttatttagagatagaatttcgttttttcgtttaggttggagtgagggggtgtgattttagtttattgtaatttatgttttttggggtttaagttgtttttttgttttagtttttttagtagttgggattataggtgtcggttattacgtttggttaattttttgtatatttagtagagatgggtttttattatgttggttaggttggttttaaatttttgattttaggtgatttattcgtttcggttttttaaattgttaggattataggtgtgagttattgtgtttggtttattggtggattttaagtagtggaaggatatgagtaaatgtgtagttttgaaagattattttagtggagaataaagagaagaaagggaattgggaagttgggagattagtaaggaggttgttgtagggaagtagtagcgagaagatggtgttttgggtagggtatggtggtttacgtttgtatttttagtattttgggaggtcgaggtgggaggatcgtttgagtttaggagtttgagattagtttaggtaataaataaatgtttttttgtttttagaaaaaaatttttaaattagttaggtgtggtggtgtatgtttgtagttttaattttttgggaggttgaagtaggaggattttttgggtttaggagtttgtttttgagtgaggtatgattgcgttattgtattttagtttgggagatagagtaaaggagattagtttggataatatggtaaaatttcgtttttattaaagatatgaaaaattagtcgggtatgatggcgggtgtttgtaattttagttatttaggaggttgaggtaggagaattgtttgaatttaggaggtagaggtggtagtgagtcgagatggagttattgtattttagtttgggagatagggtaagattttattttaaaaaaaaaaaaaaaaaaaaagaagaagaagaagaaaggaggaagaggaggaagaagaagaggaggaggaggatatgaataagaaataataataattttggattaggaatgttggtaggatggtgtggatggagagtanatttgagagagacgggagataaaattattaggatttggtgatggggatgaaagacgggagacgttagagatgattattaggatttgtttgtgttgattatgattattagggattttgtttgtgttgattgaatggttaggtaaatgagtggatgatggtgttatttattaggttgagtaatataggaggagaagttatttggagagagatggtgagtttagttttgaatatattgttttggtgtttgtgggatatttaagtagagatgtttagaaggtagttggatatatgtgtttgtgttttaggagaagggtttggattagagatatagatttgagagttattaggttgtaggtggtggttgaaggtaagggaatggatgaggataattttaggtggttgtatagcgtaagaaaagaagagaatgtcgggcgcggtggtttatgtttttaattttagtatttcgggaagttaatgtgggtggattatttgagatgaggagttcgagattaggttgattaatatggtgaaatttcgtttttattaaaaatataaaaattagttgggaatgaagatagtttaagtataaattttgggggtagtttaattgtttaagaaggggaatttatgaaggagattgagaaggtttaattaaataggtaagaagaaaattaagaaaattatagggttatgtgttatagaggttaaaaggagaattttaaggggcgagtggttatgggtatgtaggttgtcgaaataaagtaagattatagtggagaagttttttatggatgtagaggagggagagtattaaagattttggtaagaatcgagttaatggagtagtaggggaaagaaattagtatagattggggtgagaaggtagagagaaaggtgggagagaattaaaagtaggtaatttttagaatgtagttgtgaagaggaagagaagcgggtatttggagaggtttttttgtttttaagatggagttttgtttttgttatttaggttggagtataatggtacgatttcggtttatcgtaatttttttttatttttcggttttaagcgatttttttgttttagtttttcgagtagttgggattataggtatgcgttattacgtttggttaatgtatttttagtagagatagggttttttcgtgttggttaggttggtttcgaatttttgattttaggtgattcgttcgttttagttttttaaagttttgggattataggtatgagttacgcgttcggttttggagaggtttttaaaagatggtagaaggttgtttggaggagtttatttttattttttttgtgtaaaaggaaagcggaagagagaattataaagagggtttgggggaaagtcgtggagtgaggcgataagggtttgtgtttaggggattttcggttattggaatttttattaggtttgtattttttttttatttttatttttttttttgttattggtttagttttttatggggttagaagagagaaggacggagtcgagtggtattttagaagacgttttgtgttttcggaggtttttttgtttgtttgtaagtcggggttggtgttggggtaggagaggggtttgagggaggggaaagagttaaggatttggagttagtagttttaagttttgtaggtaagggtgggagatgggagtagggaggataggaggtgtggatgttgtttttggaagcgaagttgtagggggaagggggttggggtttggggggatgtttttaggggatgtagggggatttatttaaggtttttttgtttatagg

SEQ ID NO: 774 - DNA, 5070 bp, Artificial Sequence
  chemically treated genomic DNA (Homo sapiens)
  unsure 1807: n is a or g or c or t
tttgtgggtaagggagttttgagtggatttttttgtattttttggaagtatttttttaggttttagtttttttttttttgtagtttcgtttttagaaatagtatttatattttttgttttttttatttttattttttatttttgtttgtagaatttaaaattattagttttaggtttttggttttttttttttttttagattttttttttgttttagtattaatttcggtttataggtaggtagaaagattttcgaaggtatagagcgttttttagggtgttattcgatttcgttttttttttttttagttttatggaggattaagttagtggtaaggaaggggatgggggtgaggaggaaatgtaggtttgatagggattttagtgatcgggaattttttggatataagtttttatcgttttattttacggtttttttttaggttttttttgtggttttttttttcgttttttttttatataggggagatgggggtggatttttttaaatagttttttgttattttttaaaaatttttttagggtcgggcgcgtggtttatgtttgtaattttagaattttgggaggttgaggcgggcggattatttgaagttaggagttcgagattagtttgattaatacggggaaattttgtttttattaaaaatatattagttaggcgtggtggcgtatgtttgtaattttagttattcgggaggttgaggtaggagaatcgtttgaaatcgggaggtggaaagaggttgcggtgagtcgagatcgtgttattgtattttagtttgggtgataagagtaaaattttattttaaaaataaaaaaatttttttagatgttcgtttttttttttttttatagttgtattttgagagttgtttatttttaatttttttttatttttttttttgtttttttattttagtttatgttgattttttttttttgttattttattgattcggtttttattaaggtttttaatgtttttttttttttatatttatgggaaatttttttattgtgattttattttatttcggtagtttgtatatttatggttattcgttttttgggattttttttttggtttttgtgatatatgattttgtaatttttttggttttttttttatttgtttggttgggtttttttagttttttttatagatttttttttttgaataattaaattgtttttagagtttgtgtttaggttgtttttatttttagttaatttttatatttttagtagagacggggttttattatgttggttagtttggtttcgaattttttattttaagtgatttatttatattggtttttcgaagtgttgggattagaggtatgagttatcgcgttcggtatttttttttttttttacgttatgtaattatttgagattatttttatttatttttttgtttttaattattatttataatttaatgatttttaaatttatgtttttagtttagattttttttttgagatataagtatatatgtttagttgttttttggatatttttatttggatgttttatagatattaaaataatatgtttaaagttgaatttattatttttttttaaatggtttttttttttgtgttgtttagtttggtgagtggtattattatttatttatttatttaattatttagttaatataaataaaatttttaatagttatagttaatataaataaattttaatagttatttttaacgtttttcgttttttatttttattattaagttttggtgattttatttttcgttttttttaaatntattttttatttatattattttgttagtatttttagtttaaggttgttgttgttttttgtttatatttttttttttttttttttttttttttttttttttttttttttttttttttttttttttttttttttttttttgagatggagttttgttttgttttttaggttggagtgtaatggttttatttcggtttattgttatttttgttttttgggtttaagtaatttttttgttttagttttttgagtagttgggattataggtattcgttattatgttcggttaattttttatatttttagtagagacggggttttattatgttgtttaggttggttttttttgttttgttttttaggttggagtgtagtggcgtaattatgttttatttaaggataaatttttggatttaagggatttttttgttttagttttttaaggagttgggattataggtatgtattattatatttggttgatttaaaaatttttttttagagatagaaaaatatttgtttgttgtttaggttggttttaaatttttgggtttaagcgatttttttatttcggttttttaaagtgttaggagtataggcgtgagttattatgttttgtttagggtattattttttcgttattgtttttttgtaatagtttttttgttggttttttaattttttaatttttttttttttttttattttttattggagtggttttttagaattgtatatttgtttatatttttttattgtttgaaatttattaatgggttaggtatagtggtttatatttgtaattttagtagtttgggaggtcgaggcgggtggattatttgaggttaggggtttgagattagtttggttaatatggtgaaaatttatttttattaaatatataaaaaattagttagacgtggtggtcggtatttgtaattttagttattagggaggttgaggtaagagaatagtttgagttttagggggtataggttgtagtgagttgagattatatttttttattttagtttgggcgaaagagcgaaattttgtttttaaataaataaataaatttattaatggttttttataaattttaggagatagtttaaagtttttaatatggtttgtagggttttgtaaggttttttttttgtttgtttgtttagttttatttgtttttattttgtttttatttttgattatttttttttgtgtttgaattttttttttaatttttatgtttttttgtttaatttttatttatttggtaagttttagtttagaatttttttttttggaaagttttttttgattttcgaagattaggttaaatgtttattatagaaagttagatattatgttttgttttgttggtttattgttttttttgtgatgagaatgtggttttgtattgttttttagtaggagttttatgtagtcgtttgagtttgttttatttgtttttagttggtgatcggataagggatagatatttaagttagatgtagttaatttatagatttgttatttatataatttgttcgttgtaaaggtattggaaaatgtggggaagacgaggtagtatagaaagtgaggtgggagtttgtttggagagaagttatgaaattgaataaggatttcgagtttagaggttgttgatttttttttttttttttgatttttatttaggttggagcgcggcggcgttattttcgtttattgtaatttgtttatgcgattttttcgttttagtttttcgagtagttgggattataggtgtatattattacgtcgggttaattttcgtatttttagtagagagggtattttattatgttggttaggatggttttgattttttttttcgtttttgttgtttaggttggagtttaatggagtgatttcggtttatggcgattttcgttttttgggtttatgtgatttttttgttttagttttttaagtagttgggattataggtatatattattacgtttaattaattttgtatttttagtggagattggatttttttatgttgattaggttggttttgatttttcgattttaggtgattagtttgtttcgattttttaaagtgttgggattatcggtatgagttattgcgtttagtttgtttatattttatttaggatttttgtttttaagttagaaaataggagtggtttatagattttttttggggaattattgagtttagtaggtcgaggttgtaatgagttaagattgtattattgtgttttaatttgggtgataggtgtatttgttgtttttttttttttttttttttttttgaaacggagttttgttttgttattaggttggagtgtatcggtacgattttggtttattgtaatttttgttttttgggtttaagatatttttttgttttatttttttaagtagttgggattataggtacgtgttattatatttagttaatttttgtatttttagtagagatggggttttattatgttgtttaggttggtttcgaatttttgattttaggtgattcgtttattttggttttttaaagtgttgggattataggtgtgagttatcgtgtttagttgtaattattttttgttttttttttgtttgggatttttattttattaaattgtttaggtattgggagtttttagtagtttttttttgatattgaattttttttttttgaattttgaatattagttggatttttttttggtttttgtagcggtattatttttgttattattttttttttttttgaaggtaagtttataatgtggtggaaattgttcgtgaacgtagtatttattttttgttgatatggggattttttttttcgatttattttcgttttttgtttttgcgttgaagtgagaagtagattcgagatttttttttttttgtttttattttttatttgttttattttttttattgtagtagaggtttattttgttgtttaggatggagtgtagtggcgtaatttgggatcgttgtaatttttattttttaggtttaagtaatttttttgttttagttttttgagtagttgggattataggtacgtattattatattcggttaattttgtatttttagtagagatggggtttttttatgttggttaggttggttttgaatttttgattttaggtgattcgttcgtttcgattttttaaagtgttgggattataggcgtgagttatcgcgtttggttgagattttttttaataagatgaacg

SEQ ID NO: 775 - DNA, 6113 bp, Artificial Sequence
  chemically treated genomic DNA (Homo sapiens)
tatttgtttgatttggttttaatattataagtaaaaaagaagtagtagtaagtgtttgttgagaagggaaggtttttgttttttgttttttttttttaatattgtttgtggagttggtatagtaattattgagagtaatttttaaattaatgattattttttatttttttatgaaagtattttaataatgaaaagaaagtgtttaggtatataggaaattgtgtttttgttatatattttaattagtaattaaatttttttagtggaatttttgttatattaggagtaagatatagggttagagatagggaggtagaaagttatttagatatttataaaaagaattgttaaaaaaggttttaaagtgttatgtattaggttagaaagaaaaatttgttattatattttattttttttagaaaagatttatggaataaatagggtatagtgttttattttatacgtgtttgcgtgtttgtgaaatttttttttttttttttttttgagatagagtttcgttttgttgtttaggttggagtgtaatggcgtaattttagtttattgtaatttttgtttttcgggtttaagtaatttttttattttagtttttcgagtagttgggattataggcgtgtgttattagatttggttaatttttgtattttttattagagataaggttttattatgttggttaggttgtttttgaatttttgattttaggtgatttttttgttttggttttttaaagtgttgggattataggtatgagttaacgtgttcggttagtatttgtaaaattttaaaagaatgattataaatttttatattttgaaattaatatttattaaaaattttttaatttttatttttattttagatttaggggttatatgtgtaggtttgttttaagggtagattgtgtggtgttgaggtttggatttttattgattttattatttatatattgaatatagtattaaattggaagttttttagtttttgtttttttttttttttttggattttttagtgtttatttttatttttatgtttgagtgaaattatgatttagtttatatttataagtgagaatatgtgatatttggtttttcgtttttatattaatttgtttaggataacggtttgtagttgtatttatatgttgtagttgtatttatgttgttataaagtgattttgtttttttttagggttgtgtatttttaagaattaataattttgaaaatatgttttaaataatttatgttttaattgtaagttagtaatgttttattggagaaaattatttattatataatagttttttatttattttatttaagttaatagttgagattagatgtgtgtgtgaagagtgggagagtgggaattatagagtagaggtgtacggttttgaaaaagaagatttagagtaaattgtatgttgattaggtgaagtttttttttttgtttgtgttaattgattttatttttatgtatatttttttttttttgtgttttttttgaattttattagatgttaatatttttttgttgttttttggttgttttgggttttaaatttggtaagaggaattacgtttagtgtttttgattttttttaggaaaaggtggttagtgaaattatttttgtaaaattatgatttagatagtgaaagagatttaatttaatcgattgtaatttgtttttaatttataagttgtttttgtttatttttgggcgtaggttgaattaattttgggaaaaatttagtttatagtttatagttttaataaaggtggtaatagtttatttttaaagtagattttttttttgtttggggattagattgtttttgtaggattaatagttataaaagattagaaattatggttaaggagttattttgacgttttttaaattgtttttaagattagtgtttgagatattttgtagattttgtatttgacggattagttggtattatttagattaataaattgatttttttgattttgtggttttttatttaggaattgatttagtgtaagaagatagttttaattttttatgattttatttttgagtaattagtatttttggtttattggttttttttaatttattaagttgtttttaaaaaattcgttttacgaatgtttcggagtttgatttgagtaataataaaattttggtttttcgtatagttggttttgcgtgaattatttttgtaatttttttgttttgattaatcgattttgtttaggtagcgggtaaggtgaattttttgggcggttatattagttagtagtgtgattaggattagtggggaaaataattagttgatatagtatggattggattagatcgtttatttaagtatttattttaaattaagaaatatttaaatattagttatatttaggtattatgttaggtattagagtataaaagtgagtaattgatggttttattttttaagtattgaattgatttgggataattagtgagaaggaaatttaggattggtatttaatttaattagattattttttttttgggtaatatgttgtatttttagataaatgatgagggtttgaaaaaaatgataaaaatattggtttgatttgttaaattaaagaaaaaagaattgaggtatatttaatataattagttttatgatgttgtttagttataagtttttatttatttattttttgagatggagttttattttgttgtttagggtggagtttagtggtgttattttagtttattgtaatttttgttttttaggtttaagtgatttttttgttttagttttttgagtagttgggattataggtgtttgttattatgttcggttaatttttgtatttttagtagagatagggttttattatgttggttaggttggttttgaatttttgatttcgtgatttgtttattttagttttttaaagtgttgagattataggcgtgatttattgcgtttgttcggttataaggaagtttttaaaggaaaagaagaggtagtttttaaattgtttattaataatttatataaaaaaataaattattaattgtttatagattgtttttcgtattataaattttaggaatatgaagatatggttgggtagttagttatgaataaaatgtttttaaataatcgtttttgagtatgagtgtggggggtgtaatttatgttttatatttaaggtttttttgggtttgataaattttgtatattttatattgtttaaatgttttgaattatttttttttttttaattataattttttttttttggttgtttatgatttaattgggggagtttttaaatcgtggtttttaaattttaatgtgtattagaattatttaaagggtttgttaaatttgggtagtttagttttagttttagagtttatgaattaggttattggagtatagtttttgttaagtttttaggtgatgttgatgttgcgggttttagtgattatatttttagagttagttttaaaatataaggatttgtagattttacgtttagattgatttattggatttggggatggaaatttggtattttatttttttttgttttttttttttaattttaatgtgtttaagggtgagaattattgtttttttgtggattatggatggttttttgaagttattgagtttgggatttaataaatatatgtatttttttgggttaattataggaattttgcggtatttaaggatattaaatgagtgatttaatattttatttaaaaaaatattattgttttttggtttatattaattttttttttttttttggaaaggtattttcgtttattttttggatattttttaatattacgatagaaaggttattagtatagtatttagaggttttcggagtaaagttgttaaagaagtggggtttatttgagttttaattttgttttttttaggtttttttgggtttgtttagttttaggagttttaataagtaagttgggtatgtttagtgggtagggtcgttttttttttttgggtggcggggggttgtaagtgggaagtttgttgtttagttgtcggggtttttcgtttttttttatttgtatgaggttgggtttggggaatttgtgtttagtattttattttttggagtttgggtttggttttttttgcgggtttttgcgttgatatttaggcggggagttaggaggtttggcgcgtttttagagttcgtcgggggagtcgggcgagggttttgggttttgacggcggggtcgtagggtcgttcgttttttggatacgtttgtaggtttagggaagtttgtcggtcgggaggtatagagtaggagaagttagattttagggcggataacgagaagtcgttaggtaagttagtttcgttagcgtgtcggcggacgagtgttttttttttcgtaggtagatggttagggcggttcgtatgggcgagggtataggaaatcggatatcgttatcgttttttttagtttggtttagtttaggttttttagttcgttagttcgttggtaaggcggggcggaggtttggagttcggtatcgtcgaggtataaagtaggaattgtagttaggggcgagggtttttgcgtgtggcgttgcgcgattttattcggcggtaggattcgcgttttcgtttagttacgtttattgggttacggagattatttcgttcgtcgttcgttgttggttttttttttttatattttcgttaatttcggtttcggttttcgtttttattttcgcgttttttcgttgggtcggaggagtttgggttcgaggtattcgggtaggaggtggcggtttcgtcgttttggttaggttttcgggagggagtaggcgcgggagcgggaggaggaagtcgggaagagggaaggcgggggcgcggttcgttcggcgttcgagttatattcgtttagttcgtttcgagtgatagtttcgcgcgtttcgttgggagtattcgggtcgaggttttgattttggggggaggtcgattttattttggttggaggaattgggtgtttttgttcgttggtttttcgcgcgtgaggatttattttaggtgtgtgttttttgggagattttttttttcgtttttagtattttagggggggagtggtttttttttgattcgggcgagtgttttgggattttagttttggcggtaggtggtggcgggaaacgggaaagatttagaatttttttttattagtagaagatggattcgtttttttttagggtttcgttgtttatgttttggaggcggtatttgtaaaatagtaaagtggtaggatttttggggcgagggttggtattttattgaaagtttatgtaaatttttagtttgtagatgcggttagtttgataaggattgttgttttttttcgaagtaagagtgagaacgagtttggaggagggttgaggtttttttgagaaatttagttgttggcgtgtgatcgttttaggaggaaatggaaggtgtatattgataatttaaaatagtttttattttttatgtagtaatttttattagtaaaaatagatttgtaaagagtgttttggtaggaaggtgtagttgggtgaatgaagtgttgtttttagtagatggtttttagtttggtttttattttgtgtagtggaatatttatttttagaagagttttagagtaatttataaatataaatttttgtaaagtgttagtgatatgggtaatttaaattatatataatatattataaatattataggaggtagttatagaaatagtagttagttaatttatatttgtataaataggtgagggaaggaagttagtaagtgatagggagtttttattgttaaaataaaattgttagtattttgtatgtgttttaagtttaaagagatgtgaagtttttttttggcgtgtggacggtgttggtagttgttatattgggtttaggtattttttcgtagttattgattattttagttttagttttatagtttttgttggttattatatgatatttggatgttattgtttaatggagatcgtgtgtagtttggggaattttgtgat

SEQ ID NO: 776 - DNA, 6113 bp, Artificial Sequence
  chemically treated genomic DNA (Homo sapiens)
attataaggttttttagattgtatacggtttttattgggtaatggtatttagatgttatgtggtagttagtaagaattgtaggattgggattagagtggttagtagttacgaagaagtgtttgggtttagtgtgatagttgttagtatcgtttatacgttaaaaagaaattttatatttttttaaatttggaatatatgtaaaatattaatagttttgttttagtaataaagattttttgttatttattaattttttttttttatttatttatataagtataagttgattagttgttatttttatagttgttttttatgatatttataatgtgttgtgtgtgatttgggttgtttatgttattaatattttgtaagaatttgtgtttgtaaattattttggaatttttttgggagtgaatattttattgtataaggtggaagttagattagagattatttgttaagagtagtattttatttatttagttatatttttttgttaaagtattttttgtaaatttatttttgttggtagaagttattatatagggagtggaggttgttttaagttattagtgtgtattttttatttttttttaggacggttatacgttagtagttgagttttttaaagaagttttagtttttttttagattcgtttttatttttgtttcggaagggagtaataatttttattagattagtcgtatttataagttaaaagtttgtatgaatttttaatggggtattaattttcgttttaaaagttttgttattttattattttataaatgtcgtttttaaaatataaataacgaaattttagagaagagcgaatttattttttgttggtgggaagaaattttaaatttttttcgtttttcgttattatttatcgttaagattggagttttagaatattcgttcgggttagaaagggattattttttttttagaatattagaggcgggggaaggggttttttaggaagtatatatttgagatagatttttacgcgcgaggggttagcgggtaggagtatttagtttttttagttagggtggagtcggtttttttttagaattagagtttcggttcgggtgtttttagcgaggcgcgcggggttgttattcgaggcgggttgggcgggtgtaattcgagcgtcgggcgggtcgcgttttcgtttttttttttttcgatttttttttttcgttttcgcgtttgttttttttcggaggtttgattagggcggcgaggtcgttattttttgttcggatatttcgggtttaggttttttcggtttagcggggaaacgcggaagtgggggcgggaatcggggtcggggttggcgggggtgtgggagggaaaagttaatagcgggcggcgagcgaggtggttttcgtggtttaatgaacgtgattagacggggacgcgggttttgtcgtcgggtggggtcgcgtagcgttatacgtaagggttttcgtttttggttgtagtttttgttttgtgtttcggcgatgtcggattttagattttcgtttcgttttgttagcgggttggcggattggaaagtttgagttaggttaggttggggaagacggtggcggtgttcgattttttgtgttttcgtttatgcgggtcgttttggttatttgtttgcgggagaggagatattcgttcgtcggtacgttggcggggttggtttatttgacgatttttcgttgttcgttttgggatttggttttttttattttgtatttttcggtcggtaggtttttttaggtttatagacgtgtttaggaggcgggcgattttgcgatttcgtcgttagagtttagaattttcgttcggttttttcggcgggttttggaggcgcgttaggttttttggtttttcgtttgaatgttagcgtagggattcgtagggaagattaagtttaagttttagggggtggaatgttgagtataggttttttagatttagttttatataggtggggggaggcggagagtttcggtagttgaatagtaggttttttatttgtaatttttcgttatttaaaaaaaaaaaacgattttgtttattgagtatgtttagtttatttgttggaatttttagggttagataagtttaaggggatttaaggaaggtaaagttggggtttaaatggattttatttttttaatagttttgtttcgaagatttttgggtgttgtattaataatttttttatcgtggtattggaaaatatttaggagatggacggaaatgtttttttaaaagaaggaagaaaattagtgtgaattaaaaagtagtggtatttttttaaataaagtattaagttatttatttaatgtttttaaatatcgtagaatttttgtagttgatttagaggaatgtatatatttattaaattttaaatttagtaattttagggaattatttatagtttatagaggagtaatgatttttatttttggatatattaaaattggggggagggggtagggaggggtggaatgttagatttttatttttaagtttaatgagttagtttggacgtgggatttgtaagtttttgtattttaaaattggttttaaaagtgtagttattggagttcgtagtattagtattatttgagaatttgatagaaattgtattttagtgatttgatttatagattttggggttggggttgagttatttagatttaataagttttttgggtagttttgatgtatattaaagtttgagaattacggtttaaaagtttttttagttgaattatgagtaattagaaaaaggaaattgtagttgagaaaagaaaaatagtttagagtatttgagtaatgtgaggtatgtaaaatttattaggtttagagagattttgaatatgggatataagttgtattttttatatttatgtttagaggcgattgtttaaaggtattttgtttatgattgattatttaattatatttttatgtttttggaatttgtgatacgaagaataatttatagataattaatagtttgtttttttatgtaaattattggtaaataatttagaaattgttttttttttttttttaaaaatttttttgtggtcgggtaggcgtagtgggttacgtttgtaattttagtattttgggaggttgaggtgggtagattacgaggttaagagtttaagattagtttaattaatatggtgaaattttatttttattaaaaatataaaaattagtcgggtatggtggtaaatatttgtaattttagttatttaggaagttgaggtaggagaattatttgaatttgggaggtagaggttatagtgagttgagatggtattattgaattttattttgggtaatagagtgagattttattttaaaaaataaataaataaaaatttgtgattgggtaatattatgagattggttatattaagtatgttttagtttttttttttttagtttgataaattaaattaatatttttattattttttttaaatttttattatttatttagaaatgtaatatgttatttagaaaaggaataatttggttgagttgggtgttagttttggattttttttttattgattattttagattagtttagtgtttgggaaatgggattattagttatttatttttgtattttagtgtttagtatagtgtttgaatataattgatgtttaaatgttttttgatttgaaatgaatgtttaggtgagcgatttggtttaatttatattatgttagttgattattttttttattagttttagttatattgttagttagtgtaatcgtttaaggggtttattttgttcgttgtttagatagagtcgattgattaagataagggaattgtaagagtaatttacgtaaagttagttgtgcgggagattagagttttattattatttaaattagatttcggagtattcgtggagcggattttttaaggataatttggtgggttgggggaagttagtgagttaggagtgttgattgtttagggatgaaattatagggagttggagttgtttttttgtattaagttagtttttgggtggagggttataaggttagaggagttagtttattgatttaggtggtattagttgattcgttaagtgtagggtttgtaaaatattttaagtattgattttagaagtagtttagggagcgttagaatgattttttaattatagtttttaattttttgtggttgttagttttataaaggtaatttagtttttaggtaagagggaggtttgttttgggaatgggttgttattatttttgttaaaattataaattgtaaattaagttttttttaaagttagtttagtttacgtttaggaatgaataaggatagtttgtaggttagaaataagttgtagtcggttaagttagattttttttattgtttaggttataattttgtaaaggtggttttattaattatttttttttgagaaaagttaggagtattggacgtgattttttttgttaaatttggggtttagaataattaaaggatagtagaaagatgttggtatttggtgggatttaggaaggatatagaaggaaaaaggtgtgtatgagagtggggttaattggtatagataaggaaagaagttttatttgattagtatataatttattttgaatttttttttttaagatcgtgtatttttgttttatagtttttatttttttattttttatatatatatttaattttaattattgatttgaataaaataaataggaaattgttgtatagtagataattttttttaataaaatattgttgatttgtaattagagtataagttatttagagtatatttttaaagttgttaatttttaaaaatgtatagttttaaaaaagaataaaattattttgtagtaatatggatgtagttgtagtatatggatgtagttgtaggtcgttattttaagtaaattaatgtaggaacggaaaattaagtattatatgtttttatttgtaagtgtgagttaaattatggttttatttagatataaagatgggaataggtattggggaatttaaaaggagggagggggataggggttgaaaaatttttaatttggtattatgtttagtatgtgggtgatggaattaatagaagtttaaattttagtattatataatttatttttgaaataaatttatatatgtagtttttgaatttaaaataaaaatggaaattaaaaaatttttaatgaatattaattttaaaatgtagaggtttatgattatttttttaagattttatagatattggtcgggtacgttggtttatgtttgtaattttagtattttgggaggttaaggtaggaggattatttgaggttaggagtttaagagtagtttgattaatatggtggaattttgtttttagtaaaaaatataaaaattagttaggtttggtggtatacgtttgtagttttagttattcgggaggttgaggtaggagaattgtttgaattcgggaggtagaggttgtagtgagttgagattgcgttattgtattttagtttgggtaatagggcgagattttattttaaaaaaaaaaaaaaaaaaagattttatagatacgtagatacgtataaaataaaatattatgttttatttattttatgaattttttttaaagagaataaaatataataataaatttttttttttagtttaatatataatattttaaagttttttttgataattttttttatgagtatttaagtagttttttgtttttttatttttagttttgtgttttgtttttaatataataagaattttattgaaagggtttggttgttgattagagtatgtaataggaatataattttttatatgtttaagtattttttttttattattaagatatttttatggagaagtgggagataattattaatttaggaattgtttttagtaattattatgttagttttatagataatattgaaaaaaaaaagtaaaaaataaaaattttttttttttaataaatatttgttattgttttttttttgtttatagtattaaaattaaattaaataaata

SEQ ID NO: 777 - DNA, 7113 bp, Artificial Sequence
  chemically treated genomic DNA (Homo sapiens)
ttaagtttagttggggaaggtgaacgtatttatttttaaatatggggtttataatttagtttatattcgatttattaggtagtaaagagggtttattaaaatattaattaggttaaaagtaggaggtaaagaaatagttaaattatttattgtttgagcgtatagggggagggataatgatcgggatataaatttaggtattcgaattggtagtggtaattttttttgggtttttttttattgtatgggagttttgtttttattttattaaattttgtaattgtatatttttttggtttgtgtttgttttagttcgagttgagtttttattcgtcgtttattattgttgattgtcgtcgtcgtagattcgtttttgatttttatttttttggatgtagtagggtgttcgttgcgtttttgatttagtgaggcgtttattgttgtttcggtttttattattgtttttgtgcggttaagtgtttgggtttgttttaatcgagttgaatattagttgttgggttttatggttttttttcgtgatttacggtttttaatagagttataatatttattgtatggtttaaggttttattttttggaattcgtgaggttaaaaattttaggttagagagtaagaagtttgtcgtcgttttgtttgggagtggtttattattattttgggagttttgggagtaaagatttattagtagtattatggtttaaggttttgttttttatatgggatggaagtaagagatatttggggtaaggtatgaagatttgtttagtttaaatatgataaggtgtgagttgtaattaaattttttagagtttttttaataaattatggggggaggggtttttgtatttatttaattttatttgaatttgtttgtatttttagtttttgtaggtatatttgttatttatttataggtagtgaagtatagtagttgagtggtgtggtgttagaattaggtagatttaagatgaaattttaattttattgtatattagatgtgttattatggttagttttttgatttgagagttagtttttttatttgtaaaatgggtataataataattttgaggggatttaaatgagataatttgtgtgatgtatttagtaatggttggtatgtttaaagttttaagtaaatggtaattatttttatttatttaataaaaaaaaagaaaaagaaaaatatatgtattgggtatttgttgggttcgtggtatgttgtaggtataaaatgtattaagatattggttttgtttataaagaatttatagttagggttggtggaggtagggaagttaaatattttcgtaattttaaggtagaaattaataaaagatagaaagattatggaagggataagtttttgagaatagttgtttttgggttgggttttgtaggatgtgaagaatgtggataggtagagttgagtggggattaaataattgatattgtggagaaaagaaataaattttaagagaggaattagataggaatggtgaggatattttagtatttagtaaagtttggtttgtatttaggaagtaaaatggatagaggtgggaagttagattaaaaaaatgaggatatattagaaagggagtgtatattggttggaaatattatgcgaaagtatttggttttggttggatgggttattgaagatttttggagaatgggaggaagtaaaattttatagtttgttgtttattgtatgaagtattattttttttttatttattttatttttttttgtttatttatgtttttttaggtttttggagtatttttagtattggatagtttgaatattagtatgatttaattatgatgtgttggttgggagagggattagttttaattttagtgaggagaagagggaatgaagttttaataggttatattaaatttttattttttttttaaaggatagttgtttattttttttttattttgtaaatattgataatattaaaatgtttgtttaattttatttggaatttggtaaatgatttatttttttttttggagggtgttttaatattgaaattttaaatatttatgtttatatgatttttagttattgataaagttgttttcgtattattatttttattattatatatgataattgattaatataatgatattgattagaatgatggttttagttaggaggtttaataatattttaaatttttttttattgattttatcgtaattttttttgtttaagagattttgaaataaaagagtgtttttgtttttgggtgtataaaattttgtaggtgaaaatgatgagaaaaattattgggtaaggtattaggtaggtattgattgtattttatttagagttttgtaattaaaaaagtatatataatattgagattgggtgtagtagtttatgtttgtaattttagaattttgggagtttgaagcgggaggattgtttgagtttaggagtttagttagtttgggtaatatggtaaaattttatttttataaaaaattaggttaggcgtagtggtttacgtgtgtaattttagtattttgggaggtcgaggtgggcggattacgaggttaagagattaagattattttggttaatatggtgaaatttcgtttttattaaaaatataaaattatttgggtatggtggtacgtgtttgtagttatagttattcgggaggttgaggtaggagaatcgtttgaatttgggaggtagaggttgtagtgagttgagattatattattgtattttagtttggcgatagagtaagatttcgttttaaaagaaataaataaataaaaattagttaggtatggtggtgtgtattcgtagttttagttatttgagaggttgagaggtgggaggatggttttggtttgggaggttgaggttgtagtgagttatgattgtgttattgtattttagtttgggtgatagagtgagattttgttttaatatatatatgtatatatatatatatattggttttagttaaattgattataatttagggatcgtgagtttaggatggatagaggtgtataatattgattatttttgttttaatattgatttttttttatatgagtgatttatttaaatttggagggtggaataaattgatattagtttttagtttaattggaatatttgtagttagaggataaagtataaggatttattagagaggagataatgaagttttatgttttggaaaaaggaaataagaggttgagggaatgagatagtttttaaggagggagtttataaaggtttttttttttttggtttttgtttcgtgggttaggttaatttgtattttaatgaggatttaatattattgaagattttatgaaacgtttaagttttttaaatgtttgttatttttgttattttagttgaaatttgtaattattagtatttttaaaaaattttaaaatgaagagaagaggtttgtgggtgtttagttaaggagggaggggttaagttttagtttaggaattattttgtgttgggagaagtagttagatacggtataggtcgcggtagtcgagaaagaaagcgagagaaagggtgagtcggggagtcgttgggttagattgaagtgtgtttgtgtagaataattggtaggagagttgtattttttgatttcgggaggtaaaagacgacgtcgtttttggtattgagtgcggtgattattaagaggagtaaaagttatgagttttcgatttttaggttttcggtttagttgtttttattttattttattttttttagttttagtttagaaagtaggtagcgaggtaggtttttgaatcggattaggttttttttttaaatattcggatttagagaggggtaggaattttttagttatttttttttgtttttttttatattattcgttcgaggggcggtagatttagcggaagttgttcgtggtgttgatttttgtttttggtttggtcggattcgttgttcgttgagcgcgttgtagttaagtagggggttcgtgtggcggggttacgggagggtgagggtttttaggttcgcgattagttttaggttttgttgttaaattttagttcgagttttttagcgtttttgtttttcgtaatttggtcgttaggtaggatttagtttttaagaacgggttagtcgtgttttttttaagtttttagttgtattgtaattttttatcgttattttttttttcgtttttttttttttaagattgtatcggtttttttcgatagtttgacgtttcgcgtttttttttcgtttttttttattgtgcgttttttcggattttgattttttaggggtcgtgtaagtttttgtagtagagattcgtttttttcgttgttttggttaggtttgtcggttttttttttcgtttcggattttattttttttatattgttttttttattagttttttaagtatcgagtatggtagagcgcgttttatttttattttttatatatgggagttggagtggggggcggagttgaggggaggcgtttttagtttttttaagaagttgttagtttattgggaaatatttggattcgtttagttttcgcggagaagcgagatcggattatcgacgtgggtagaggattatcgagggttagtagaaattttgtttttttttttcgcgagtgttttttcgttttttaaattttatttttaggtaggatcgcgtttttgagtttgtttgcgtggattgcgaggatcgtaaatagaggcggaagcgtttaaataaatcgtatgttttaatcgtgtttaggtttattttatagaggtgagaggataatattttttgttatttttgttgttgttttgtggtcggttatttttaagggaggatttaggcgatgggggaggggcgcggttggtgtaggaggtcggatggagtatggtaagggaagtgacggattttgattatttttgaataggtggttatggttttatcgattattcggggttttagggtttttgatttattttttgggttgtcgtcggcggttataattttcgttaattagagcgtagaggtttcggcgggtaacgggtcggtggttggcgcggacgttttagtcgttacgtttttttagagtttgtagttggtgtattagttgaaggggttgatcgtgttgttttatagcgtcgtggtggtcgtggggttggtgggtaattgtttgttggtgttggtgatcgcgcgggtgcgtcggttgtataacgtgacgaatttttttatcggtaatttggttttgttcgacgtgtttatgtgtatcgtttgcgtgtcgtttacgttggtttatgttttcgagttacgcggttgggtgttcggcggcggtttgtgttatttggttttttttttgtagtcggttatcgtttatgtgtcggtgtttacgtttattattatcgtagtggatcgttacgtcgtgttggtgtattcgttgaggcggcgtatttcgttgcgttttagcgtttacgttgtgttggttatttgggcgttgttcgcggtgttggcgttgttcgtcgtcgtgtatatttattacgtggagtttaagtcgtacgacgtgcgtttttgcgaggagttttggggtttttaggagcgttagcgttagttttacgtttgggggttgttgttggttatttatttgttttttttgttggttatttttttgttttacgttcgggtgttagtgaagtttcgtaatcgcgtggtgtcgggttgcgtgatttagagttaggtcgattgggatcgcgttcggcgtcggcgtattttttgtttgttggtggtgatcgtggtggtgttcgtcgtttgttggttgtcgttgtacgtttttaatttgttgcgggatttcgatttttacgttatcgatttttacgtttttgggttggtgtagttgttttgttattggttcgttatgagttcggtttgttataatttttttatttacgtttggttgtacgatagttttcgcgaggagttgcgtaaattgttggtcgtttggtttcgtaagatagttttttatggttagaatatgatcgttagcgtggttatttgatgttatttagttaggttttggttaaggagttttattttaattggttttttagggtattattcgaggttaatttggtgtttatttttagtattagagttagttaagttaatatagggtaatatttttagtttagtttttttgttcggttgtttgttttgtttttgtgtgtttgtaaaatgttaagcgggttttggtgagagttttgttttttgtttgggggaggttaaagagagggaagaggattttttattttttttttatgtttttgaaggataaataaaattttttttttacgtttagaaaagtattttagaattacgattgtttttttggcgttttttttttttgttcgttggtgaaatgaataatatgaatgggatttaaaaggaatgtattgggtttggtaaagatttttagtttgtttttagaaaaaggatttagttgagagtattatgatattgtttagtttatttgaatttttgtatttttagaattttaggtaaatatgtattaaaattttatatttaggattttagtattttttgagtaagatttttatatgttaaaagggtttcgttttaaaattatttgagtttatagtataaaaatatttataagttttttttagaaaggttttgttattgtttttttttttttttttttaattattatttaaaaatgatgagacgaattagttaatgaagagatagataaataaagaggaaaaggtttaatttatttaagaggttatttaattgtatttaaggatagatattttttgtgtatgtgtgtttgtgtatgtgtgtgtatgtgtgggtatatatttagtgtttgttataaagtgggtatttaaatatttggttttttgaatatttaatgtaaattgtgtagcgtggtatttttttgtagtttttaattgtttatttgtaatagattaatagttgttatttgattgtttagtatttgttttgtagtgatttttggaatatgattaatttag

SEQ ID NO: 778 - DNA, 7113 bp, Artificial Sequence
  chemically treated genomic DNA (Homo sapiens)
ttgggttgattatgttttaagaattattatagagtaggtgttgagtagttagatgatagttgttgatttgttgtaagtgagtaattagagattgtaggagaatgttacgttatatagtttatattgagtatttagaaaattaaatatttgagtgtttattttgtggtaaatattgaatgtgtatttatatatatatatatatatataaatatatatatatagaggatgtttgtttttaggtataattgaatgattttttaagtgaattggatttttttttttttatttatttatttttttattgattaattcgttttattatttttaaatagtagttggggaggaaaggggagaaataatagtaagatttttttaaagggagtttgtaggtgtttttgtattataaatttaagtggttttaaaacgaaatttttttggtatataaaggttttatttaggaaatgttgaaattttagatgtagagttttaatatatatttatttgaaattttaggaatgtaagggtttaaatggattaagtaatattatggtatttttagttgggttttttttttaaaggtaaattgaaaatttttattaagtttaatgtattttttttaaattttatttatattgtttattttattaacgagtaggaggaggggacgttaggaaggtaatcgtggttttgaaatatttttttgaacgtggagaaaaagttttgtttgttttttaagggtataaagaagaaataagaaatttttttttttttttttggttttttttaagtaaagagtaagatttttattaaagttcgtttaatattttataaatatataaggataagatagatagtcggataagagggttgggttggaaatgttgttttatgttggtttagttagttttggtgttgagaataagtattagattgatttcgagtggtgttttaggaggttagttgaagtggagttttttgattaaggtttggttaagtggtattagatgattacgttgacggttatattttggttatggggggttattttgcggggttaagcgattaatagtttgcgtagtttttcgcggaagttgtcgtgtagttaggcgtagatgaaggggttgtagtaggtcgaatttatggcgagttagtggtagagtagttgtattagtttaaaggcgtaagggtcgatggcgtgggggtcgaggtttcgtagtaggttgaagacgtgtagcggtagttagtagacggcgaatattattacgattattattagtaagtagaaggtgcgtcggcgtcgagcgcggttttagtcggtttggttttgggttacgtagttcggtattacgcggttgcggagttttattgatattcggacgtaagataggaggatgattagtagagggagtaggtaggtgattagtagtagtttttaggcgtagagttggcgttggcgtttttgggagttttagaatttttcgtagaggcgtacgtcgtgcggtttgagttttacgtgataggtgtgtacggcggcgggtagcgttagtatcgcggatagcgtttagatggttagtatagcgtaggcgttgaggcgtagcgagatgcgtcgttttagcgggtgtattagtacgacgtagcggtttattgcgatggtggtgagcgtgaatatcgatatatagacggtgatcggttgtaggaagaagattaggtggtataggtcgtcgtcgaatatttagtcgcgtggttcgaaggtataggttagcgtgagcggtacgtaggcggtgtatatgagtacgtcggataaggttaggttgtcgatgaggaagttcgttacgttgtgtagtcggcgtattcgcgcgattattagtattagtaggtagttgtttattagttttacgattattacgacgttgtagagtagtacgattagtttttttagttgatgtattagttgtaggttttggaagggcgtgacggttggagcgttcgcgttagttatcgattcgttgttcgtcgaggtttttgcgttttggttggcgggagttgtgatcgtcggcggtagtttagaaaataagttagaaattttggggtttcgagtggtcgatgaggttatggttatttgtttaaaggtaattaaagttcgttattttttttgttatattttattcgattttttatattagtcgcgttttttttttatcgtttgagtttttttttgggaataatcggttatagaataatagtaaaagtagtaaaaagtgttgtttttttatttttgtaaaataaatttaagtacggttagaatatacggtttatttaaacgttttcgtttttatttacggttttcgtagtttacgtaggtagatttaggagcgcgattttatttgggagtggggtttggagagcgggaaagtattcgcgggaagaaggggtagaatttttgttggttttcggtagttttttgtttacgtcggtgattcggtttcgttttttcgcgggagttgaacggatttaaatgttttttagtgggttagtagttttttagagggattgggagcgtttttttttagtttcgttttttattttagtttttatgtatggaaaataggggtggagcgcgttttgttatgttcggtgtttagagaattagtgaagaggatagtgtggggaggatggaattcgaaacgggaggaggggtcggtaaatttggttagagtagcgaagaggacgaatttttattgtaggagtttgtacggtttttggagggttagggttcggaggagcgtatagtggaggagggcggaggagaggcgcgaagcgttaggttatcgggaggagtcggtgtagttttaggagggaaggagcggggaaggaagtagcggtgggagattgtaatgtagttgggggtttgagagaggtacgattgattcgtttttaaaggttggattttgtttagcggttaggttgcggagggtagagacgttagagggttcgggttgggatttaatagtagagtttggagttggtcgcggatttgaggatttttattttttcgtggtttcgttatacgagttttttgtttggttgtagcgcgtttagcgggtagcgggttcggttaagttaaaggtaggagttagtattacggatagttttcgttggatttgtcgtttttcgggcggatgatgtggggaggagtaggggaaaatgattagggaatttttgtttttttttggattcgggtgtttggggaaggaatttggttcggtttaaagatttgtttcgttgtttgttttttgggttggggttgagaagagtagggtggagtggaggtagttgagtcgggggtttgggggtcggagatttatgatttttgttttttttggtggttatcgtatttagtgttaaggacggcgtcgttttttatttttcggggttagaaaatgtagtttttttgttagttattttatataggtatattttagtttggtttagcgatttttcggtttattttttttttcgttttttttttcggttatcgcgatttgtgtcgtatttggttgttttttttagtatagagtagtttttggattgagatttgatttttttttttttgattgaatatttataggttttttttttttattttaggattttttaaaaatattggtaattgtagattttagttagggtaataaaagtaataaatatttgagaagtttaggcgttttataaaatttttagtagtattaagtttttattgaaatgtaaattagtttggtttacggggtaagagttaggggaggaggggtttttgtaagttttttttttagaagttattttatttttttagttttttgttttttttttttagagtatggagttttattgttttttttttgataagtttttgtattttgttttttggttgtagatattttagttagattggaaattaatattaatttattttattttttaaatttaaatgaattatttatatagaaaaaagttaatattggaataaaagtaattaatgttatgtatttttgtttattttaagtttacggtttttgagttataattaatttagttaaaattagtgtgtgtgtatatatatatgtatatgttaggataagattttattttgttatttaggttggagtgtagtggtataattatggtttattgtagttttaattttttaggttaaagttatttttttattttttagttttttaagtagttggaattacgggtgtatattattatgtttgattaatttttgtttatttgttttttttgaggcggagttttgttttgtcgttaggttggagtgtagtggtgtgattttagtttattgtaatttttgttttttaggtttaagcgatttttttgttttagtttttcgagtagttgtgattataggtacgtgttattatgtttagatgattttgtatttttagtagagacggggttttattatgttggttaggatggttttgattttttgatttcgtgattcgtttatttcggttttttaaagtgttggaattatatacgtaagttattgcgtttggtttaattttttgtagaggtgaggttttgttatgttgtttaggttgattgaatttttaggtttaagtaattttttcgttttagatttttaaagttttgggattataagtatgagttattgtatttagttttagtattatatatatttttttaattgtagagttttaaataggatataattagtgtttgtttaatattttgtttagtaattttttttattatttttatttgtagggttttatgtatttaagagtaggggtatttttttgttttaaaattttttaagtagaggaaattgcgataaagttagtgaaaaaggatttgggatgttgttaggttttttaattagagttattattttggttaatattattatattggttaattattatatataatagtaaaagtaataatacgaagataattttgttaataattgaaggttatgtaaatatggatatttgaagttttaatattggggtattttttagaggaaagagtggattatttgttaaattttagataaagttgggtaagtattttagtattattaatatttgtaaggtggaaaggaagtgaatagttgttttttgaagagggaatgaagatttaatgtggtttattagggttttatttttttttttttttattggagttaaggttagttttttttttagttagtatattatgattaaattatgttaatgtttagattgtttagtattaagaatgttttaaaaatttgagagagtataaataaataaaaaaaaataggataaatgaaggaaaggtaatattttatatagtagatagtaaattatgggattttatttttttttattttttaaaagtttttaatagtttatttaattaaggttagatgttttcgtatggtatttttaattagtgtgtattttttttttgatatgtttttatttttttggtttagttttttatttttgtttattttattttttaggtataagttaaattttgttgggtgttgagatatttttattatttttgtttaattttttttttaaggtttattttttttttttataatgttagttgtttaatttttatttaattttatttgtttatattttttatattttataagatttaatttaaggataattgtttttaaagatttgttttttttataatttttttgttttttattaatttttattttgaaattacggaagtgtttagtttttttgtttttattaattttgattgtaaattttttatggatagggttaatgttttgatatattttgtatttataatatgttacgagtttagtagatatttaatatatgtgtttttttttttttttttttttattgaatgaataaaaatagttattatttatttagggttttaggtatgttagttattgttaagtatattatataaattgttttatttgagtttttttaaaattattattatatttattttatagatgagaaaattggtttttaagttaagaaattaattataatggtatatttagtatgtagtggggttggaattttattttagatttgtttgattttggtattatattatttaattattatattttattgtttatgaatgaatggtagatgtatttgtaaagattgaaaatataagtaggtttaaatgagattgaataaatataggaatttttttttttatggtttattaagaaagttttagaaaatttagttataatttatattttattatgtttaagttaaatagatttttatgttttattttaaatgttttttgtttttattttatataggaaataaaattttgggttatagtgttattggtgggtttttgtttttagagtttttaagatggtggtgggttatttttaagtaagacggcggtaagttttttgttttttgatttggggtttttggttttacggattttaaggaatggaattttgggttatgtagtgagtgttatagttttattagaagtcgtgggttacggaagagaattatggagtttagtaattagtgtttagttcgattaggataaatttaggtatttagtcgtataggaataatggtgagaatcggaatagtaatgggcgttttattggattagaagcgtagcggatattttgttgtatttagaggggtggaagttagaggcgggtttgcgacgacggtaattagtagtggtggacggcgagtgaaagtttagttcgagttggaataaatatagattagaagagtgtgtagttgtaagatttaatagagtgaaaatagagtttttatataatgggaggggatttaaagggggttgttattgttagttcgaatgtttgggtttatatttcgattattgtttttttttttgtgcgtttaggtaatagatgatttgattatttttttattttttgtttttagtttaattggtattttagtgagttttttttattatttgatgggtcgggtgtgagttgagttataagttttatgtttaaaggtgggtgcgtttattttttttagttaggtttag

SEQ ID NO: 779 - DNA, 6211 bp, Artificial Sequence
  chemically treated genomic DNA (Homo sapiens)
gttaggtggggttttgtaaaagatttaaaatatatatttttttagggtcgggaataaagttcggtaggttttttaagggtttagtttaaggtttgattttaatataaaatgggtgtacgtttttgggtaagttaaataattcgtttgggatttttatttgtaaaaggggttagggtttttaataattttttaaagttgtgggaggatttaagggaataattttttttttttgtttagtttttaaaatttgaattttttaatttttttttattagttttgaaaaagggtttgggagtttgtaaggtaataattattattttttttaaaaaaaaaaaaaaaaaaaaaaaaaaaaaaaataggtttttttttggtgagtggtaagtttgttaagggttgttaggatatttaggaattggaatgcgaggtttttgaaaaaaaaaattttttttaaatagaggtaggatgttattatgttgtttaggtgagttttgaatatttggttttaagtaatttttttattttagttttttaaagtgttgggattataggtatgagttattatttatagtttgaatgttaggttttttttttgagagatagaggaaaagagaaagggagagatcgatttgtatttatttatttagtatttattttattacgaaatagtatttttttagttttttattttagtgtttaggtttagtttttcgaagtttttattgagaataaagcgttgtatatagtcgtttagggtgaaatttatatcgcggttaaatcggtttattcgtatatagtgttagtgttggttattgaggatttcgtttgcgtttacggtggtgtgatttggttttggttggatagggttgttgtttgagggtggggtaggatagagtgaaattttaagttaggagaattttatggagtttaagtttttaggtagagtagtagcgtgtaataaagtttagggtaattagggagagtgggcgaatagattaatagttattggcgagtgtgtgatagggtaagttatttagtttggttttttgtttgtaaaattgggaatatatgagttgtttttattttatgtgcgggtgttatgaaaagttaatgagatataatgtgtgtgcgtttgtgtgtgtgtgtttataaggagggaattgaggttcggaagtgttttattcgaggttatatttttgtgtagtggtagagttgagattggaatttagtttttatttaattttagtgttttgttagtattaaatgttataagaaaggggtagtttggtttaggttttagagaagtggaagattaggttgagcgcggatgcgcggaggaggtgttacgaggagggcggtgagagagttttaggggttggtttcgtatcgtatatggtcgtcgagtttatttaggtttatgtgtagtagtaggtgtgttttttttagttcgagcgttacgtagtcgttttgggcgttttcggcgtgtagtagaagatcgttttttttttcggttttgaagttgaaggcgaatacgttttataggtttcggttgatttttcgcgggaagcggtaggagatggtatcgtcgtcgtcgaaatagagtatgtcggtttttgcgtaaaggatcgtaggtgggtcgggaattggggaggttgttttttaggtttttttcgcgttttttgtatatttattgtatgggtagttatagaggtcgagttttaggtcgattttgtcgcgtgggttttaggttaggggtacgatgcggatgtagcgcgtagtgaagtggaagtgtaggttatggcgtattatcgtcgattcgtttacgttattaaagaaggtttgcgggggtggaggagagtagtaattacgtttcgttttttgttttttttttttattttattttttgagatagagtttcgttttgtcgtttaggttggagtgcggtggtacgatttcggtttatcgtaatttttgtttttcgggtttaaataatttttttttttagttttttaagtagttgggattataggcgttcgttattacgttcggttgatttttttgtattttttatagagacggggttttattatgttggttaggttggttatgaatttttgatttcgtgatttatttgtttcggttttttaaagtgttgggattataggcgtgagttattgcgttcggtttttttttgtttttttttttatagttttttagtttataatttttatatttagttaatttcgatttttggaaagtaaatattttttggttttttttgtttggcggttttgttcgtatagtttttataaagtgttttgttttataattttattatttttttagatttgaaattaaatgttatttttttaggaagtttttttaggttttattttaaagtgtgttaaattttgtgaatcgagtgtttcgcgtacgttttaagttgatagtttttttggatagagtttttggagtggagttattgttttttgttcgagtttttattattattttttttatttttttagaggttggtgttcggtttagagtttggagtagaggaagttttttaagtgttatcgttttggcgtttagagtatcgagttgtgttttcgttggtagaacggtgtttagttgtttattcggtcgtcgtagagtagtatgtaacgtgtgatttagttttaagaattaaaggagttttgtgtggttacggttcggattcggtgtttttttattaagtttatttggagttagggattcggatttttaattcgtggtgattattcgtttatgtttatagaaaggataggagttttaatcggttattttttttttcgaagtttttcggaggtttttattttttcgcggtgcgttgttagttggtagttgatgtttcgcggagtttatcgtgtagtttggcgaatcgcggcgtagtaaggagattgtagtaggaggaggcgtttagggagcgtgtatataggggatttattagtttttcgtcgtagtcgtttagggtagggaaatcgatatgttagttagcgttggttttttttagatttttttaaaggtcggtttatttagcgatcgaagttttttttttcgtgtttttaattttcgtttttagaggtatatttagttttattttaaagttatttatttaattttggttgtagtaatagttgtatgtttagaggaggttgttttttttttttaggtaaatttttaggttatatttataggtttaaggttagattttttttagttagtttaatatttgttttggtttagtatttttttaaatttaattttaaattttagtattttttataatttaagttaatttaagatattaatttagttttaattttagttttaatttaattcggtttttaaaatttgtattatttttaaatataggttttgtatttaattttagttagtgttagtattattattagttttatgtttagttttagtattagttaggggtattagtttttgtttggatttttgttataaaatttagttttagttataaattttagttttagttataaattttattttttggttagttttaaagtttagttttaagttttggtaaaattttaattttagtatcggttattagtatatatttattttttagttttagttttaaatttaggtattagtttttgtttggattttaattttaaatttttgttcgttgattttattttttttttagagtttagttttagtttcgggcgcgcgcggtagttttagagttgtaatgcggagcgcgggggagaggtaggaaaagatgagagttagcgggcgcgcgtcggtcgggaaggattcgcgattatttagtcgtaatgcggttcggggtcgttttgtaggttttggatttttgggtttaattttatttgtttttaagtttaatatttatagtagttttagttttcggtttttgagatcgcggcgagtaggatgtagaagagtcggagatgtattatgtagggttgacggtttcggtagtcgtttttttgtgaacggtttcggttagggttcgagttttggtttgggttttaagttttttttttggggtttgtagtagatcgtttttttttttttatttattttttttttttttttttttttcgtttttaagcgttttgtttttttttttttttttttttttttttttttttggtttttggtttttcgtttttttttttttatttttttttttttattttttttttttttatttttttttttttttagtttttgttttttggtacgcgtcggtttttcggatttcgcgtaagcgcgtgttttagttttgttgcgaaagggcgggggtagagagtttttcgttatcgggaaaattttaagtaattcgaggttgttcgggattagggttataggagtgaggatagggaatttagggttagaagtattttgaaaattttaagaaaagggaggtggtttgggggaggggtgtttggaaatggaatgaagggtaagtaaaagaattttaatattttcggaaggtaaattatgttttaggagtggtgttgggtattgtgaatttagtatttttgttttattttattttgtagatgaaaaattttaggtttagagaggttaagaaatttagttaatattatatagtaaatgattatatttcgaagttcgttttttttttattgataaagatagtaaattatttttttttttttcgtttattttttttttttttttttttttttttttttttttttttattttttttttttttttttttttttttttttttttttttttttttttttcgtaaaatttagattttgtataagagagtgaagttttttggaggaggtggaatgggaaagtgatttcgtagattttaatttttatttttttttcggttttttttttcgtttttttttttttgtttcgttagtagtttaatttttattttttgtggttatattttagaaatttgtgtagttagagatggggacggaggttatagagtaggtgggagtgggggtagggagggggagaagggttatagagagggaggagatagggaaggaatgggattttttatttggtaatgggtttttgttattttatggtttatttaggatttttggcgttgttttagattaggggttttttagataaatgggttggtggtgtgaggttggggttgtgggatagggattagggttgaggggaaaggcgggttgaatttagaggtttagggttttatttgggttttgaaaatttgagttttaattttggagatttttttggtatgagtggtttagtgtgttggtattggaggtatagggaaggtgggtatggaagggaaagaagagaaatagaaatttattttagacggaggttggagtttagggtttaggtttgaggtaaagtttgtatatgggtatttttttaggagagggcgttgtaaagggaattgaagttgtaggatttattaataatataaattttgggttgggcgtggtagtttaggtttgtaattttagtattttgggaggttaaggtgggcggattatttgaggttaggagttcgagattattttggttaatatggtgaaattttatttttattaaaaatataaaaattagttgggcgtggtggtgggcgtttgtagttttagttatttgggaggttgaggtaggagaattttttgaattcggaggcggaggttgtagtgagtcgagatcgtgttattgtattttagtttgggcgatagagtaagattttgtttttaataataataataataaataataataataatataaattttgtattatggtttttggagaatataggttttttttatttattattttttatattgttatttttatagtaaattttgagaggtgggttggttaggatttataattttaatattataggttaggtaattgaggtttagaaagagtaagtggtttgtttaaggttatttaggaagttggaagtagaggtaggaggggtgtaagggaagttaaggtttgttgaaggtgtgttaggaagagtttggagaagagtttatgttttttcgtgtattgttatatttggttatataggagtttttagtttggaaggtaagtgtgggcgggggagttgtgtggttagatgtgttttataagatttcgttttttatttgatttttttagg

SEQ ID NO: 780 - DNA, 6211 bp, Artificial Sequence
  chemically treated genomic DNA (Homo sapiens)
tttgggagggttaaatgagaggcgggattttatgagatatatttgattatataattttttcgtttatatttgttttttaagttgagagtttttgtgtggttagatgtaatagtatacggggagatataagtttttttttagattttttttagtatatttttagtaggttttggttttttttgtattttttttatttttgtttttagttttttgggtgattttgagtaagttatttgttttttttagattttagttatttaatttgtaatgttgagattataaattttgattagtttattttttaaggtttgttgtgaagatggtaatatggaaaataatggatggggagaatttgtgttttttaaaggttataatataaagtttgtattattattattatttattattattattattggagatagagttttgttttgtcgtttaggttggagtgtagtggtacgatttcggtttattgtaattttcgttttcgggtttaagagatttttttgttttagttttttaagtagttgggattataggcgtttattattacgtttagttaatttttgtatttttagtagagatggggttttattatgttggttaggatggtttcgaatttttgattttaggtgattcgtttattttggttttttaaagtattgggattataggtttgagttattacgtttagtttaaagtttgtattattaataaattttatagttttagttttttttgtagcgtttttttttggaaggatgtttatatgtaggttttgttttagatttgagttttggattttaattttcgtttggagtgggtttttgtttttttttttttttttttatatttattttttttgtatttttaatattagtatattgaattatttatgttaagggggtttttagggttgggatttaggtttttagggtttaggtgggattttggatttttaggtttaattcgtttttttttttagttttagtttttgttttataattttagttttatattattagtttatttatttggaggatttttagtttgagatagcgttaagaattttgaataagttataggatggtagaggtttattgttaggtggggaattttattttttttttgttttttttttttttgtaatttttttttttttttttgtttttatttttatttgttttgtggttttcgtttttatttttggttatataggtttttgaggtatagttatagggggtagaagttaaattattagcgggataggaaggaagaggcggggagaggggtcgagagggaggtggggattagggtttacggggttatttttttattttattttttttaaaagattttatttttttgtgtaggatttggattttacgaaaaaaaaaaaaaagaagaagaaaggaaggaaagaggaaagaaagaaataaagaaagaaaaaaaggaaggaaagaaagaaaaaagaatgaacgaagaaagaaaaaataatttattgtttttgttagtgaagaaagaacgggtttcggaatataattatttgttgtgtgatattgattaagttttttgatttttttgagtttgaggttttttatttgtaaagtggagtagggtaaaaatgttaaatttatagtgtttagtattatttttagagtataatttgtttttcgaaaatgttaagatttttttatttattttttattttatttttaggtattttttttttaaattatttttttttttttgaaatttttaggatgtttttggttttaggttttttgtttttatttttgtggttttagtttcgggtagtttcgggttatttggggttttttcggtggcgagaggttttttattttcgttttttcgtagtagggttgaggtacgcgtttgcgcggggttcgggaaatcggcgcgtgttaggagatagaggttggggaaggggggaggtgagaggaaagagggtggaaaggagaggatagagagagaagagcggaggattaggaattagagagagagagagagaaaagagagaggagagatagagcgtttgggggcgaaaggagagagggagggaagggtgggtaaggaggagagagcggtttgttgtaaattttaggaggagagtttggagtttaagttagaattcgagttttagtcggagtcgtttatagggaggcggttgtcgggatcgttagttttgtatgatgtattttcggtttttttgtattttgttcgtcgcggttttaggagtcgagggttggggttattgtgagtgttgggtttggaggtaggtggggttgggtttaggagtttagagtttgtagggcggtttcgaatcgtattgcggttgggtggtcgcgggtttttttcggtcggcgcgcgttcgttggtttttatttttttttgtttttttttcgcgtttcgtattgtagttttgaggttgtcgcgcgcgttcggggttggggttgggttttgggaagaggatgaagttagcgggtagggatttggggttgggatttaagtaggagttggtgtttgggtttgaggttagggttgggggataagtgtatattggtgatcgatattaggattaaggttttgttagggtttaaggttggattttggagttggttaaggggtggggtttgtggttagggttggggtttgtggttggggttgggttttgtggtagggatttaagtaggagttggtgtttttgattgatgttaaggttggatatggagttggtgatggtgttagtattggttgaggttgggtgtaaggtttgtatttggggatggtgtaggttttgggggtcgagttggattgaggttagggttggagttggattggtgttttgggttgatttaggttgtggaagatgttgaggtttaggattgagtttgggaaagtattaaattagggtaggtattgggttagttagggagggtttggttttgggtttataggtgtagtttaggggtttgtttagaaggagaaggtagttttttttgagtatgtagttgttgttgtagttaggattgaatagatggttttaaggtagggttgggtgtgtttttgggggcgggggttgggggtacggaaggggaagtttcggtcgttaagtgggtcggtttttggaagggtttgggaggggttagcgttgattaatatgtcggtttttttattttagacggttgcgacgaggagttggtgggttttttgtatgtacgttttttgggcgtttttttttattatagtttttttattgcgtcgcgattcgttaggttgtacggtgagtttcgcggaatattagttgttaattggtagcgtatcgcggaagggtgggggttttcggaggatttcggggagagggatagtcggttaaagtttttgttttttttataggtataagcgggtggttattacggattggggattcgaatttttggttttagatagatttaatgaagaagtatcggattcgggtcgtggttatatagggtttttttaatttttgggattgggttatacgttatatgttattttacggcgatcgagtggatagttggatatcgttttattagcgagggtataattcggtattttgggcgttaaggcggtaatatttggggagttttttttgttttaggttttgggtcgggtattagtttttgggaaaatggagggggtggtggtgagggttcggataaggagtagtgattttattttagggattttgtttagagggattgttagtttaggacgtgcgcgaaatattcggtttatagggtttaatatattttagggtaaaatttgggagagttttttaaggaggtgatatttgattttaggtttgaggaaataataggattgtgggatagggtattttatggaaattgtgcgggtaaagtcgttaagtagggaagattaaggagtgtttattttttagaagtcgagattggttgggtgtgaaagttgtgggttgggaggttatggagaaagaagtagaggggggtcgggcgtagtggtttacgtttgtaattttagtattttgggaggtcgaggtaggtggattacgaggttaggagtttatgattagtttggttaatatggtgaaatttcgtttttatgaaaaatataaaaaaattagtcgggcgtagtggcgggcgtttgtaattttagttatttgggaggttgaggaagagaattgtttgaattcgggaggtagaggttgcggtgagtcgagatcgtattatcgtattttagtttgggcgatagagcgagattttgttttaaaaaataaaataaaaaaaagaagtagagggcgggacgtggttattatttttttttattttcgtagattttttttggtaacgtgaacgagtcggcggtggtgcgttatgatttgtatttttattttattgcgcgttatattcgtatcgtgtttttggtttggaatttacgcggtaagatcggtttgaggttcggtttttatggttgtttatatagtaagtgtgtagagagcgcggagggggtttgggagatagtttttttagttttcggtttatttacggttttttgcgtagaggtcgatatattttatttcgacggcgacgatgttattttttatcgtttttcgcgaggggttagtcgaagtttgtgggacgtgttcgtttttagttttaagatcgaggagaaggacggttttttgttgtacgtcgagggcgtttagggcgattacgtgacgttcgagttggagggggtatatttgttgttgtatatgagtttgggtgagttcggcgattatgtgcgatgcggagttaatttttgaagtttttttatcgtttttttcgtggtatttttttcgcgtattcgcgtttagtttggttttttatttttttaaggtttggattaaattgttttttttttgtagtatttggtgttagtaaaatattggagttgagtgagaattggattttagttttagttttattattatatagagatgtgatttcggatggggtattttcgagttttagttttttttttgtaaatatatatatatagacgtatatatattgtattttattagttttttataatattcgtatatgaaatagaagtagtttatgtgtttttagttttatagataggaagttaggttaaatggtttattttgttatatattcgttaatggttgttgatttattcgtttattttttttgattgttttgggttttgttatacgttgttgttttgtttaggagtttggattttatggagtttttttggtttgaggttttattttgttttgttttatttttaggtagtagttttatttagttaagattaggttatattatcgtgagcgtaggcggagtttttaatgattagtattggtattatgtgcgggtggatcgatttggtcgcgatgtaaattttattttggacggttatgtgtagcgttttatttttaatggagatttcgagaggttgaatttggatattgaggtgagagattagggaggtgttatttcgtggtagggtagatgttggatgagtgagtgtaggtcggtttttttttttttttttttttttgttttttagaggaaagatttggtatttaggttgtgggtggtggtttatgtttgtaattttagtattttgggaggttgaggtgggaggattgtttgaggttaggtgtttaagatttatttgggtaatatagtgatattttatttttatttaaaaaaaatttttttttttaaagatttcgtattttaatttttgaatattttagtagtttttggtaaatttgttatttattagaaaaaggtttgttttttttttttttttttttttttttttttttggggggggtggtggttgttattttgtaaatttttaggtttttttttaaaattaatgaaagggggttgggaaatttaaattttggggattaggtaagggaggaaaattgtttttttggatttttttataattttggggagttgttaaaaattttgattttttttgtaaataaaaattttaggcgggttatttgatttgtttaagggcgtgtatttattttgtgttggagttaaattttgaattgaatttttgaaaggtttatcgagttttattttcgattttggggaaatgtgtgttttaagttttttataaaattttatttggt

SEQ ID NO: 781 - DNA, 8693 bp, Artificial Sequence
  chemically treated genomic DNA (Homo sapiens)
agagggttttggggtaggggagagtcggggattgaatggagagggattttcgaggaagtgaaggagggaacggagttatttagattatttgaaggaagagtagtggtttatatttgtaattttagtattttgagaggttaaggtgggtggattattggagaataggagttcgagattaatttggttaatatggtaaaattttatttttattaaaaatataaaaattagttgggtatggtggtgtatatttgtaattttaattatttaggaagttaaggtaggagatttatttgaatttaggtggcggaggttttagtgagtcgagatcgtgttattgtattttagtttgggcgatagagtaagattttgtttttaaaaaaaaaaaagagtattttagattgagagtatggtaagtgtgtaaaggtttgaggttggaaagaaggttatttattggttttgagattgttgaggtaggaaggagaggtgagtgagattggttaggttgttttagtaggttagatagaattttgtgatttcggatgaggagtttggattttatcgtaagtttatttagaagttattggagggttttaagtagggaagtaataagaattaggttgtatgtggtggtttatgtttgtaattttagtattttgggaggttaaggtaggaagattttttgagtttaggagttggagatcggtttgggtaatatggggaaattttatttttataaaaaatagaacgattagttaggtgtggtggtatatatttgtagttttagttatttacgaggttgaggtgggaggatggtttgagtttatgaggttaagattgtagtgagttaagattgtattattgtatgatagagtgagattttgttttaaaaaaaagaaagaaagaaagaaaagaaaagaagaaaagaaagagttgatttttatgatagaaagattttgttcgggcgcggtggtttacgtttgtaattttagtattttgggaggttaaggtgggtggattatttgaggttaggagttcgagattagttttattaatatggagaaattttgtttttattaaaaatataaaattagttgagcgtggtgacgtatgtttgtaattttagttattttagaggaagaggtaggagaattatttgaattcgggaggtagaggttgtggtgagttaagattgggatattgtattttagtttaggtgataagagtgaaattttttattttaaaaaaaaaaaaaaaaagaagaaaagaaaagaaagatttttttggttgttatatgggaagtgatttgaaggaagttagagtagtttagaaaagtaatggtgatgttattgtaatgattttagcgagtgatgacgttgatgttgacgtagagtggatagtggtaggcgtttgagagagacgtatatagatttaggaagtattggggaggtggagtttagaggatttttttatggaaagatgttttggtatttgggaggtttttatggattttttttcgttttttttttggggattggtttttttatttgttaatagattttattttaaattttatttttaatatgttttaaaagtgtattttggggattttttagaggtggtttttttatttttattttgttttattagagtagttagtagtttattttttttattgttttagattggtttttggttaagattttgttgggggaaaaaaaaaaaaagttaggttttacgtttaaaagaattaaattaaaagatttttggatggaatggtttttgaagttgtttgtgattttggatttggttttgtttttttgcggggttgatgatagttaggggtttggtttatgaatattttttgttttgtgtatgtagatttttttagaataaagtgggtgataggtttaaggtttttatttaggaaaattgcgggggaaagggtagagatagtgaagagagtggtttttgagggaggagattgttggcgttaattttagggtttttttatgttttttgattttgattttgattttgattgtttttagtagtttttggttttttttttttttttatttttttgtagttttggtttttagtttttattggtagtttagggtttttttttgtttagttattttttatttatttatttatttatttatttatttatttatttatttagagatggagttcgtttttgttgtttaggttgtagtgtaatggtattattttagtttattgtaatttttgtttttcgggtttaagtaatttttttattttagttttttaagtagttgggattataggtatgtgtcgttatatttagtttattttgtatttttagtagagatagggtttttttatgttggttaggttggtttcgaattttcgattttaggtgattttttcgttttggttttttaaagtgttgggattataggcgtgagttatcgtgtttggattttttttttttgagatggagttttttttttgttttttaggttggagtgtagtgatgttattttagtttattgtaatttttgttttttgggtttaagtaattttttcgttttagtatttcgagtagttgggattataggtatgtgttattacgtttagttaatttttgtatttttagtagagatagggttttattatgttggttaggttgattttgaatttttgattttaggcgattttttcgttttggttttttaaagtgttgggattataggtatgagttattgtgtttggtttgtttagttattttggggtggaaattgaagtataggttggagatgaggattgagagtagagatggttgtattttagatattaggattttggataggttttggaatagttttgtgttttagtttgttaaagagaaagaataattattttttttataggagttttgaaaattttaaagaagtaatatttataaattggtcgggtatggtggtttatttttataattttagtattttgggaggttaaggtgggaggatttttttttttttttttttttttttgagacggagtttggttttgttattttcgttggagtgtaatggcgtgattttagtttattgtaattttcgttttttaggtttaagcgattattttgttttagttttttgagtagttgggattataggtgtgcgttattatgtttagttaatttttgtatttttagtagagatagggttttattattttggttaggatggttttgattttttgattttatgattcgttcgttttagttttttaaagtgttgcgattatagggaaggattttttgagtttaggagtttaagagattagtttgggtaatataggaagatttgtatttattttatatatatatatatatatatatatatatattttttttttttttttttaagttaggtatggtggtgtatgtttgtgtttttagttatttgggaggttgaggtaggaggattattggaagtttaggaggttgaggttgttgtgagttgtgatcgtgttattgtattttagtttggataaaagagtaagattttgttttaaaaaataaataaataaaaagaaataatatgtataaaaatgtttggaatgggatttgttatgtagtagggtttaattaacgtttgttgttattatttttgttgataagaatgggatttttgggtaaggagtgggaggttggttttagttttggttttattgttgttatgttgtgtatttttagggaggtgatttagtttttttgggttttttttttttgtttgtgatatgatagagttagattagtttggtattttttgaagtatgatatgatatttgtgttagttttataggaattttgtaggaaaatgttaaaatttgagttgggttatttttttttttttttttttttttttttttttttttttttttttttttttttttttttttttttttttttgagatagagttttatttttttgtttaggttggagtgtagtggtgcgattttagtttattgtaattttcgttttttggttttaagtaatttttttgttttagttttttgtgtagttgggattataggtacgtgttattatatttagttaatttttgtatttttagtagagatggggttttattatgttggttaggttgtttttgaatttttgatttcgtgatttgtttgtttcggttttttaaagttttgggattataggtgcgagttattatattttatttttttttttttttttttttttgagatagggttttattttgttgtttaagttggagtgtcgtggtgtgattatagtttattatagtttgaattttttgggattaagtgatttttttattttagtttttttagtagttgtgattataggtatgtattattatatttggttaatatttttatttttattttttgtagagattgggttttattgtattgtttaggttggttttgaatttttaggtttaagcgaattttttatttcggttttttaaagtgttgagattataggtatgagttattgtattcggtttgagttgggtttttattttaatatttgttaggggaaaatatgtttgatattttaaatttgtgtttttagagagtggttgtttaggatggggttgaagtaggtattgttggggtgtttagtttttgtagtttatagtaattatggtgaggagtgtggggagaagaaggttggagtgtttatgatttttttattgttgtttttttttttaataggtattgtagttagcggtgaattgattttattttaattttttagtttttattaggattagtttggagttttttttttgtttttattgaaatttttttttcgtttttaaatttatttttgatttagattttatttattttttttttgttttttaagatttttttttgtcgtttatagatcgagttttttatttttgtttattttgtgttagatatttttttttttagaattttttttttattggtgattttatttatttttgttgttttttggggttttaggaaatgttagtatttttatttatattgtttgaattttttaatattttttaattgcgttgtgttttattttaatatttttttatgtattttttgtgttttttagaatattttttcgttattattattttaatatggttatatatattttttaattgttttgtaaattattttttttttattattgtttagcgatgttttcgttttttttataaatattttcggagattaatttttgtgttatttttatattttttcgttgatatattgattttatatataatttttttgaaaaatttttttattaattttattattttttagattttttttttgttataattttattttttttttaattttttttttttaagttttgttttttttagtttagtttagtttatttaattttattttttttttgtagattatattttattatgtttttttgagtttttaaggaaggggtttagggggttttatggtttttcgttttttgtggttttatagttttcgtgggttaggggaagcgttttagaagtcgaagtgtttattatgggtaattatacgtgggagggttgttacgtggattcgcgcgtggattattttttttcgttatttttttatatttttgttatcggcgtggggttgtttattaattgtttggttttgtgggcggtttatcgttaggtgtaatagcgtaacgagttgggcgtttatttgatgaattttagtatcgtcgatttgttgtatatttgtacgttgtcgttgtgggtggattattttttgtattacgataattggatttacggtttcgggttttgtaagttttttgggtttattttttatattaatatttatattagtatcgtttttttgtgttgtatttcggtggatcgttatttggttgtggtttatttatttcgtttcgttcgtttgcgtcgcgttaagatcgtcgtggtcgtgagtttcgtggtttgggttacggagttgggcgttaattcggcgtttttgttttatgacgagttttttcgagatcgttataattatattttttgttttgagaagttttttatggaaggttgggtggtttggatgaatttttatcgggtgttcgtgggtttttttttttcgtgggcgtttatgttgttgtcgtatcggggtattttgcgggtcgtgcggggtagcgtgtttatcgagcgttaggagaaggttaagattaagcggttggtttttagttttatcgttatcgtgttggtttgttttgcgttttattacgtgtttttgttgtttcgtagcgttatttatttgggtcgtttttgggattgcggtttcgaggagcgcgttttttttgtatattatagtttattggtttttattagttttaattgtgtggcggattttattttttattgtttggttaacgagggcgttcgtagcgatgtggttaaggttttgtataatttgtttcgttttttggttagcgataagttttaggagatggttaatgtttcgtttattttggagattttatttatttttaagaggaatagtatagttaaagttatgattggtagttgggcggttatttcgtttttttagggggattaggtgtagttgaagatgttgtcgttagtataatgaatttcgagtggtatagaatttttagttttttttttttattttatagtttttttttttttggtttggtgtatgtaaattgtatggaaaaagggttgtgttaatatttataagaatataagaatttaggaagagtgaggttggtgtgttattggttaatttttgtgtttttagattttattatagtttggcgattgtggagggttttttgaaggaggagatgagtaaatatatttttttggagatagggttttattgtgttgtttaggttggagtgtagtagtgtagtcgtggtttattgtagtttttattttttgggttttttagcgatttttttatattagtttttcgagtagttgggattataaatgtgagttattatgtttggttaatttttgtattttttgtagaaatggagttttattatgttttttaggttgattttgaatttttgggtttaagagatttttttgttttggttttttaaagtgtttagattagagatgtgagtcgttatgtttggttagataaattaagttaaatatttggtttttagaaaataaagataaatagagaaggttagatttttttttttttaataagtggataaaagtttgtgattcgggggaaagtggaaggagaaatgtagtcgatatagagttattatgtttgtaaagtttttggttatataggttagggaatataagatcgtaattttaagtttttagataaatagcgatttttaagttaagattgaggatgaagagggagaatgttagaatttaagtgaagggtaattagggtagattgtttggaggagtgatgttagaaggtttgggaagaaggtgtgggataagaagaaagggtatttatttatttatttaatagaggtttatgtagggtattgtgttgggtggggttggggatataataatgattgaggtagtttggttttgtttttatagggtttattatatataagtaaataaaaaatatgtaatgtttggaattgttaaatgggaaggggatatttttttatgtaaagttagttgagggaatagaggatgatttggagtttgatttggaggagggtagagaagggtttgttgaggtggttttttagtaaagatttgaagtatgggcggtatttagttttgtggttgttgtgggaagagtattttaggtagagggaattgtaggtgtaagggttttggggttagatagtgtttgaattttgggtcgggcgtagtggtttacgtttgtaattttagtattttgggaggttaaggcgggcggattatttgaggttaggagttcgagattagtttggttaatatggtgaaatttcgtttttattaaaatataaaaaaaagtagttgagcgtggtggtgggtgtttgtaattttagttagttgggaggttgaggtaggagaatcgtttgaattcgggaggtagaggttgtagtgagttgagattgtgttattgtattttagtttgggtgataagagcgaaattttattttaaataataataatagagtgtttgaattttgaaagatagtaggtatggtagtgtggttggagaggaggtagagaggacgagaggaaaggggaaatgagataagagaggggatagtaggtcgtgtggggttatgtaaattttagtgaggattttgttttttaatttgagataaatgggagttatgagggggtttttagtagaggatgaaggtgatttgatttaagtattaatagtattttacgggttgttgagtggggagtagaatatgggagattggttgggtatagtggtttaagtttgtaattttagtattttgggaggttgaggtaggaggattgtttgaggttaggagtttgggattagtttaggtaatatagggagatttagtttttatagaaattttaaaaattagtcgggtatggtggtatgtgtttgtagttttagttatttggtaggttgagatcggaggattatttgagttaggaggtggagg

SEQ ID NO: 782 - DNA, 8693 bp, Artificial Sequence
  chemically treated genomic DNA (Homo sapiens)
tttttattttttggtttaagtgatttttcggttttagtttattaagtagttgggattatagatatatattattatgttcggttaatttttaaaatttttgtagaaattgggtttttttatgttgtttaggttggttttaaatttttggttttaagtagtttttttgttttagttttttaaagtgttgggattataggtttgagttattgtgtttagttaattttttatattttattttttatttaatagttcgtgggatattgttaatatttaagttaaattatttttattttttattgagaatttttttatagtttttatttattttagattaaaaggtagagtttttattaggatttatatggttttatacgatttgttgtttttttttttgttttatttttttttttttttcgttttttttattttttttttagttatattgttatatttgttattttttaaaatttagatattttattattattatttgagatggagtttcgtttttgttatttaggttggagtgtagtggtataattttagtttattgtaatttttgtttttcgggtttaagcgatttttttgttttagttttttaattagttgggattataggtatttattattacgtttagttatttttttttgtattttagtagagacggggttttattatgttggttaggttggtttcgaatttttgattttaggtgattcgttcgttttggttttttaaagtgttgggattataggcgtgagttattgcgttcggtttaaaatttagatattgtttaattttagagtttttgtatttgtagttttttttgtttgaaatgttttttttataatagttataaggttgagtgtcgtttatgttttaagtttttgttggaaagttattttagtaagtttttttttgtttttttttagattagattttaagttattttttgtttttttaattggttttatatagaaaaatgttttttttttatttagtaattttaaatattatatattttttatttatttgtgtatggtgagttttgtgaaggtaaggttaggttgttttagttattgttgtgtttttagttttatttagtatagtgttttatataaatttttgttgaatgaatgaataaatattttttttttttgttttatattttttttttaaattttttggtattatttttttaggtagtttgttttgattgttttttatttgagttttgatattttttttttttatttttagttttgatttggagatcgttgtttatttagaaatttagaattgcggttttatgttttttggtttgtatgattaggggttttgtaaatataatgattttatatcggttgtatttttttttttattttttttcgagttatagatttttatttatttgttggaaaaaaaaaaatttaattttttttatttgtttttattttttggaaattaaatgtttgatttaatttatttggttagatatggcggtttatatttttaatttgagtattttgggaggttaaggtaggaggattttttgagtttaggagtttaagattagtttgggaaatatagtgagattttatttttataaaaagtataaaaattagttaggtatggtggtttatatttgtggttttagttattcgggaggttgatgtgggaagatcgttggagagtttaggaggtggaggttgtagtgagttacgattgtattattgtattttagtttgggtaatatagtgagattttgtttttaaaaaaatatatttatttatttttttttttaggaggttttttataatcgttaaattgtgatgggatttgggagtataaaggttgattagtgatatattaattttattttttttaagtttttgtatttttatgaatattaatatagttttttttttatataatttgtatatattagattaggagagaagggattgtgggatgagaggggaaaattggggattttgtgttattcggggtttattgtgttggcggtagtatttttagttgtatttggtttttttgggagggcggagtggtcgtttagttgttagttatggttttggttgtgttgttttttttggaggtgagtggggtttttagggtgagcgaggtattggttattttttggggtttgtcgttggttagaaagcggagtaggttgtgtagggttttggttatatcgttgcgggcgttttcgttgattaggtagtagaggatggggttcgttatatagttgaggttggtgaaagttagtgagttgtggtatgtagaaaagacgcgtttttcgaagtcgtagttttaggggcggtttaggtagatggcgttgcgggatagtaagagtacgtgatagggcgtaaagtagattagtacgatggcgatgaggttgagggttagtcgtttgattttggtttttttttggcgttcggtggatacgttgtttcgtacggttcgtaggatgtttcggtacgatagtagtatgagcgtttacgggaagaggaagtttacgaatattcgatagaggtttatttaggttatttagttttttatggggaattttttaaagtagaaggtgtggttgtagcggtttcggaagagttcgttatggaataggggcgtcgagttggcgtttagtttcgtggtttagattacggagtttacggttacggcggttttgacgcggcgtaggcgggcgaagcggagtgggtgggttatagttaggtagcggtttatcgagatgtagtataggaaggcgatgttgatgtagatattggtgtagaagatgaatttaaagagtttgtaggattcggggtcgtggatttagttgtcgtggtgtaggaagtagtttatttatagcggtagcgtgtagatgtatagtaggtcggcgatgttgaggtttattaggtagacgtttagttcgttgcgttgttgtatttggcggtaggtcgtttatagagttaggtagttggtgggtagttttacgtcgatgataaagatgtagagggatggcggaaagaggtggtttacgcgcgagtttacgtggtagtttttttacgtgtggttgtttatggtgggtatttcggtttttggggcgttttttttggtttacgggggttgtggggttatagggagcgggaggttatggggttttttgagttttttttttggaggtttaggggaatatggtgggatgtggtttatagggaagagatgaggttgggtaggttgggttgggttgggaagggtagagtttgagagggaaaagttggaggagggatggaattatgataggagggaagtttggaggatggtgagattaataaagaggttttttaaggaggttatgtatggagttagtgtgttaacgagggagtatgggggtgatataaaaattggttttcgggagtgtttatggaggagacgaaagtatcgttgggtaatggtgagaaggagatggtttgtagggtaattaggaagtatgtgtagttatattgaagtaataatggcgggggaatgttttagaagatataagaaatatatgagaaagtgttgagataggatatagcgtagttagggagtgttggaaagtttaggtaatgtgggtgggagtgttggtattttttaggattttagaaagtaatagagataagtaaggttattagtaaggagaaggttttggaaaaggaggtgtttggtatagggtggataaagataaaaggttcggtttgtggacggtaggaaggagttttaggaaataggaaggaggtgagtaaggtttagattagaggtaagtttggggacggaagggaaattttaatgggggtaggggagggattttagattggttttggtgggggttgagggattgggatgaagttagtttatcgttgattgtagtgtttgttgggagagaggatagtagtgagggagttatggatattttaatttttttttttttatattttttattataattgttgtgaattgtagagattggatattttaataatgtttattttagttttattttaagtaattattttttgaaaatatagatttgaggtgttaggtatatttttttttgatagatattagaataaagatttaatttaggtcgggtgtagtggtttatgtttgtaattttaatattttgggaggtcgaggtgggaggttcgtttgagtttaggagtttaagattagtttgggtaatgtagtgagatttagtttttataaaaaataaaaataaaaatattagttaggtgtggtggtatatatttgtagttatagttattggggaggttgaggtaggaggattatttgattttaggggatttaggttgtagtgagttataattatattacggtattttagtttgggtaatagagtgagattttgttttaaaaaaaaaaaaaaaaaaaaaggtagggtgtggtggttcgtatttgtaattttagaattttgggaggtcgaggtaggtagattacgaggttaggagtttaagaatagtttggttaatatggtgaaattttatttttattaaaaatataaaaattagttggatgtggtggtacgtgtttgtaattttagttatataggaggttgaggtaggagaattgtttgaaattaaaaggcggaggttgtagtgagttgagatcgtattattgtattttagtttgggtaaaagagtaaaattttgttttaaaaaaaaaagaagaaaagaaaaaaaagaaaaaaaaaaggaaagaaagaaagagaaaaagggaaaaaaatgatttaatttagattttagtatttttttgtagaatttttgtaaaattggtataggtattatattatgttttaggaaatgttagattagtttaattttattatgttatagatagggagaaggggtttagagaggttgagttatttttttaaggatgtatagtatggtagtaatagggttagggttggggttagttttttattttttatttaagaattttatttttgttaataaggataataatagtaaacgttaattgagttttattatatagtagattttattttaggtatttttatgtatattatttttttttatttatttattttttgagatagggttttgtttttttgtttagattagaatgtagtagtacgattatagtttatagtagttttaattttttgggtttttagtgatttttttgttttagttttttaagtagttgggaatataggtatgtattattatgtttggtttaaaaaaaaaaaaaaaaaatatatatatatatatatatatatatatataaaatagatgtaggtttttttgtgttgtttaggttggttttttgaatttttgagtttaagagatttttttttgtaatcgtagtattttgggaggttgaggcgggcggattatgaggttaagagattaaaattattttggttaaaatggtgaaattttgtttttattaaaaatataaaaattagttgggtatggtggcgtatatttgtagttttagttatttaggaggttgaggtaggataatcgtttgaatttgggaggcgaaggttgtagtgagttgagattacgttattgtattttagcgggggtgatagagttagatttcgttttaaaaaaaaaaaaaaaaaaaaagagatttttttattttggttttttaaaatgttaggattataggagtgagttattatgttcggttaatttatggatattatttttttgaaatttttaagatttttatgaggaaagtagttgttttttttttttgataaattgaggtatagagttgttttaagatttgtttaaggttttgatgtttagagtgtagttatttttgtttttagtttttatttttagtttgtgttttagtttttattttagaataattggataggttaggtatagtggtttatgtttgtaattttagtattttgggaggttaaggcgggaggatcgtttgaggttaggagtttaagattagtttggttaatatggtgaaattttgtttttattaaaaatataaaaattagttgggcgtggtggtatatatttgtaattttagttattcgggatgttgaggcgagaggattgtttgagtttaggaggtagaggttgtagtgagttgagatagtattattgtattttagtttgggagataagagaggaattttattttaaaaaaaagaagtttaggtacggtggtttacgtttgtaattttagtattttgggaggttaaggcgggaggattatttgaggtcgggagttcgagattagtttgattaatatggagaagttttgtttttattaaaaatataaaataagttaggtgtggcggtatatgtttgtaattttagttatttgggaggttgaggtgggagaattgtttgaattcgggaggtagaggttgtagtgagttgagatggtgttattgtattatagtttgggtaataagagcgaattttatttttaaataaataaataaataaataaataaataaataaataaataaaaaataattggatagaaaagggttttgggttgttagtggggattgggaattaaagttgtagaggagtaagggaaaggggagagttaggagttgttgggaatagttaaggttaagattaagattagggagtatggggaagttttggggttagcgttagtagtttttttttttagggattattttttttattgtttttgttttttttttcgtaatttttttgagtgagaattttgagtttgttatttattttgttttgggaagatttgtatatatagggtaaaggatatttatggattaagtttttgattattattaatttcgtagagaagtagagttaagtttagagttataggtagttttaggagttattttatttaggggttttttggtttagtttttttggacgtgaaatttggtttttttttttttttttttaataagattttaattagaaattaatttaaaatagtgaaaagggtgagttgttagttgttttggtgaaataaggtgggggtggagaggttatttttgaagaatttttaggatgtatttttaaaatatgttaaaaatggagtttaaggtggagtttattgataaatgaggaaattaatttttagagaggggacggaaggaggtttatgggagttttttagatgttagagtatttttttatgggaaagttttttgggttttatttttttagtgttttttgaatttgtgtgcgttttttttaaacgtttgttattgtttattttgcgttagtattagcgttattattcgttgggattattgtagtagtattattattgtttttttgggttattttggttttttttaaattattttttatatggtagttagaaagattttttttttttttttttttttttttttttttttttgagatggagagttttatttttgttatttaggttggagtgtaatgttttaattttggtttattataatttttatttttcgggtttaagtgatttttttgtttttttttttggagtagttgggattataggtatgcgttattacgtttagttaattttgtatttttagtagagatagggtttttttatgttggtgaggttggtttcgaatttttgattttaggtgatttatttattttggttttttaaagtgttgggattataggcgtgagttatcgcgttcgggtaagatttttttattatgaaaattagtttttttttttttttttttttttttttttttttttttttttttttgagatagggttttattttgttatgtagtagtgtaattttgatttattgtagttttgattttatgggtttaagttatttttttattttagtttcgtaagtggttgggattataggtgtgtgttattatatttggttaatcgttttattttttgtggagatggggtttttttatgttgtttaggtcggtttttaatttttgggtttaaaagatttttttgttttggttttttaaagtgttgggattataggtatgagttattatatgtagtttagtttttgttatttttttgtttgaaattttttaatggtttttgaatggatttgcggtaaaatttagattttttattcggagttataaggttttgtttgatttgttggggtagtttagttaattttatttattttttttttttgttttagtagttttaaggttagtgagtgattttttttttagttttaaatttttgtatatttattatatttttagtttggaatgtttttttttttttttggagatagaattttattttgtcgtttaggttggagtgtagtggtacgatttcggtttattgaaattttcgttatttgggtttaagtgagttttttgttttggttttttgagtagttgggattataggtgtgtattattatgtttagttaatttttgtatttttagtagagatggggttttattatgttggttaggttggtttcgaatttttgttttttagtgatttatttattttggttttttaaagtgttgggattatagatgtgagttattgttttttttttagatagtttgagtagtttcgtttttttttttattttttcgggagtttttttttatttagttttcgatttttttttgttttaggatttttt

SEQ ID NO: 783 - DNA, 7002 bp, Artificial Sequence
  chemically treated genomic DNA (Homo sapiens)
gtattttagtatgggtgatagggcgagattttgttaaaaaaaaaaaaaattaaagaagaaaaattggttgggcgtggtggtttttatttgtaattttagtattttgggaggttaaggtaggtggattatgaggttaggagattgagattattttggttaatatggtgaaatttcgtttttattaaaaatataaaaaaatagttaggtgtggtgacgggtatttgtagttttagttatttgggaggttgatttaggagaatggtatgaatttgggagacggagtttgtagtgagttaagattatattattgtattttagattaggggatagaacgagattttattttaaaaaaaaaaaaaagaagaagaagaaaaatggatttgggaattatattttgagtagatttaatatataaataatattttttttatgttgaaagaagtagagaggtttatttggttatatatttttatgtaaggttttgttattattggtggttgtataatttagagttgttttttttaatttaaattatattatagtttagaaagttaaatttatttttttagagttgaggtgggttatagagatggggagggagagagataattagtaaaagggagttagtttattgaatgtaatttggaggggtttgagatttgatattatttttttttttatttttaaaggtttttaggtttagaatatgattgtttttgaaatttttgagtaaatgaattaataattagtaaaaaaaatgaatgatttttatagatgtttaatattttttttatttttaatttgttgagagtttatattattaaagggtgttgagttttgttaaatgtttttttatatttattagaaaagattatatagtttttttttttattttattgatatggtgatttaaattgatttttatgtattaaaataattttatatttttgggataaatttaatttggttatgttatattatttttttaaaatgtattgttggatttgatttgttaatatttcgttaagaatttttttgtttatgtttacgaggaatattgttttgtagtttttttttattgtaattttgttggtttaattttggtattagggttattttggttttataaaaggagttagaaaatattttattttttatttttattttttatagtttgtgtaaaattggtgttattttttttttaaatgtttaaaaaaattattagaaaaattttttagttttaaagttttttttgtggtaaggatttatatagttaattatatttttataataaatgtagggttatttatatttgttatattattttatgttagttttgatatgttgtatgttaaaagaaatttatttattttatttaagttgttggattttttaatataaaattgattataatatttatttgttatttttgtaaagtttataagatttgtaatatatttttttttgtttttaattaatttagataaggttttattaattttttggtttttttttttttttttttttttttttttattttttttgagatagggttttgttttgatatttagattggaatgtagtggcgttattatagtttattgtagtttgaaatttttggttttaagggatttttttgttttagttttttaaagtattggaattataggtatgagttattgttttttgttgattttattaatgtattaaaatgttgttaaataattaattttgattttgtttattttattttttattttattttttttgtttttatttttattaatgttttttttttattttaattagtttttttatttttagtttatgttattgatttaagttttagattttagacgtttattttttttaatatacgtatttaaagttataaatttttttttaagtattgttttagttgtattttatgaattttgatatgtggtatttttattattattaatgtaaaatattttatattttgttttttgattttttttttgatttagagtttagaagttagttgggtttttttaataaaatataattattttattgattttttataattaaatattgttaattagtattatttttatttatgtattattaaaaataaaggatattttttttttggtatttttaaatgatgtattatataataaataaaattagaatttaaaatgtattttgattaattatgtaaattggtaatttgtttaaaaaagtataattaataattaaggtgtatattttataattaataaataaggtgtgtattttatatattttatttaaataaaatgggtattaataaaatgtatatagttaatatatgatagaaagtatgttttaaatataaggtagtttttcgggttattatattatttaggttttgtattattatttatggtattatagattaattatatataatatattttatatattttaattttgaagataagaaaaataattgttgtttgaaaaaaattattttaagtagttatttggtttgtattagtagaaattgaatttttatgagtttagtgtttattaagttggaattattagtttaagttagtgaatgagatatgtaacgtattttatagtgattgttttttaagttttggtaatgtttatttttttatagtttattagatgatgaaatattttcgggattaggatgttttttttacgtggttttttttttttatttttttttttttttttgttggattaattattattgtattatttttttttttttttttttttgtggttttttattttaattatttataaatttttttagaatatttttagggagatttataaggggaagttttggagatgtaaaatttaagggaggaagattggggattggaatgtttttggttttttcggtatttgttgtaaatttttgttaggttgaggaggttgtagtagtttttgaatgtggcggtaagtttcgtaattttgacgtttttataaaattagtatttatatttagttttttttttattggatttttttagaagtttggtttttttagtttttagttattttttttttttaattttttatttttagttataaggaattttatacgtttttttaaatttgtaattttggttgtttatttttttataattgttttattattttttggggttttgtttttaatatatggttttgttgttttatttttttgttgaagtaaatatagtagtgtgtttggatttttgttaaagattttttgaattttaagtaggcgtttttttgaagaagggttgtatttttgagaaagggggttttggtttttcgtattttcggtagagagtttgtgagatgtttgaagatgggtagttatatttttgtttgtgttttgttaggtttttaatttttttttacgttgggtttttttttattttttttggatgaggaggagttgttttatgtggttatttttttgtaattttagtgaaagacgagtttgtttagattgtgttagttttatggttttagaaagatatgtcgtagtttttttgtgataagaaatcgttttttcgtatttgtttgtagttaataaacggtcggttcgtttgttttgttgatgagttaggttgaggggtttttttattatttttatagatagtagtagttttaggaaggggagcggtggggttagggaatatggaggggatcgtaggggagcgcgacgtagtcgcgttttttttgggcgtagagggagtaataatttttttattttttttttaggtttcgcgttacgggttcgttttttgcgtcgtcgtcgcgatttcgtacggcgttatgacgttatacgcgttggtgtttttaaaattatttttaaattattgaagttttttttgatattttgttattgatttgtaattttttttgggttttttatataatttttttttttttgttgagattttttatttttttatttattatgaatatagttttttttatttttttgggaataggtataatagttagttatattttgatatatatttataaattttaatatgtggttttttttataggtagttgtttgattgtttttttttttgagtatgggttatgtttttttatttttttatatgttgagtaattttggattgtgttttaaatattgttatgttgtgtagattttggattttgttttatttttttgaaaagtgttgattggttatttggtgtttgttttaataagtatttaagttttataaataaaaaatataattttaagttttataattaattgaacggattttttagttaaggaagggtattttaaagaaatattagtttaggttatgatgggaataggtagttagatatgttttattatatttttttttttttgtaatttagtatagttgattagtattaatattaaagtagtttttaagtttgatagaatagattttttgtagtaataagatattaatatgatagataggaatattttgaaatggttttggaaagttattttttgtggggaaaatatattttgtagagaattttttttttattttaggttttttttttgatttaggagagaattaattaagagtttggtattttttttgggttttttgtttgtttttgaaatatggtttttttttgttatttaggttggagtgtagtggtatgattatagttttttgtagtttcgtttttttgggtttaagtaatttttttttatttttcggttttttgagtagttgggattataggtatgcgttattatattcgggtaatttttaaattttttgtagagataggggtgttattatattgtttgggatggttttaaatttttggggttaagtaattttttttttttggtttttttaaagtgttaggattataggtgttagttattgtatttagttattatatggttttaaattttatgtttttattattttagatgttttaaacgtttttgttatttggtttagatggagtttttaggtaatttagagagtattatttttttttattatgatttttagagttagtcgtgtgagaattaggtttgggtttttgttattttcgttattattgttttatattgtttggtgtttttttttagtttagtgggtaatagtttggttttgtgggttttggtgaagtatgagagtttggagttttttattaatatttttatttttaatttgtgttttttagatttggtgttcgtttgtttgttgtttgtgtggatttttttatattattggggttgggtgttgggagattttttttgtaaattttttaatatgattttttttattagtttttatagtagtattttttttttgattattatgattatttatcgttatttgtcggtagtgagttttttttttattttgcgcgtttttatttttcgttgtcgggtgttggtgattatggttgtgtgggtagttagtattttgttttttattttcgatattattttttataaggtgtttttttcgggttgtgattatttcgaatttacgtggtattttattttcgtttattagtataattttttttttttgttgtttttggggattattttgttttgttacgtggagatttttaggattttgtttcgtttacgttttaagcggcgttatcgtacggttaagtttattttcgttatcgtggtggtttatttttttagttggggtttttataattttattttgtttttgtagacgttgtttcggatttagattattcggagttgcgaggttaaatagtagttagaatacgttttgtttatttgtcgtaatttcgtttttttttattgttgttttaattcggtgttttatgttttcgtgggggttaagtttcgtatatatttgaaatatgtttttcggtagttttggttttgtcggttgtaggtatttagtttagtttcgattttttatttttttggtgttttcgtttatgagggcgtttttttttattgaggggtttgtggcggtgtaggcgtaggtgtaggtggatagggattggaatgggggttatggagaagcgggtttggaaggagtattgtagaatatagtagggtggagacgtttttttcgttgtaggcgtgtagtgaaggttatttattatattagtgggtttcgttagttttttatttgcgggaaagtggttttttatttgggaattttatattgttatttaaaaaaatattttttgaattttgagtttattttgtacgtttttttatttagatatgtgtttttaattattgtttagtttagaaggttttaagatatgaaaggattttgggaaaggtgtttttttggagattttatagggtttaaagtttattgtgataattgtacgatgttgataagataatgttttttttttttgattgtaaggttgtttttattggtttatttattttggaggcgtttggtttcgtattttttaggtattgttggatgaggttgtttggaagataaaagtcgttatattttgagataagtagttatgttgatatttggattttaaaaatttataattagattggagaaatgttttgtattttggatttaagttttagtttacgaattggtttttaaaaatttagtttataaatatttgattgaaggaatgaatttaataagtgttattttttgtattaagtatttatttagagaatataaagatgaatgagatatagttgttattttttaggggttaatagtttagttttaaaggtttatttattttggtgaatatttattttggtgaaggtatttagggtggattttttcgatattttattttttttaggtggatagtgagttgattttatatttattattttgtatttaaagtgttttttttttatttggttgatggtggtagttttttttatttatttatattttaaattttaagtttttttggaggtttgtgtttttttttttttaatttttatagttaggttta

SEQ ID NO: 784 - DNA, 7002 bp, Artificial Sequence
  chemically treated genomic DNA (Homo sapiens)
tggatttggttgtgggagttgaggaaaagaaaatataggtttttaagaggatttgaggtttggagtgtgggtgggtggggggagttattattattaattaaataggaggaggatattttaggtataaagtgataaatgtgaagttagtttattatttatttgggaaggatgagatgtcggaggagtttattttagatgtttttattaaggtgggtgtttattaaggtaggtgagtttttggagttgggttgttggtttttggagggtagtaattgtattttatttatttttgtattttttgaataaatatttagtgtagaaggtagtatttattaaatttatttttttaattaaatatttatgagttaaatttttaagggttagttcgtgggttaggatttgaatttaggatatagaatatttttttagtttagttgtggatttttagaatttagatattaatatgattgtttattttagggtatggcgatttttgttttttagatagttttatttagtagtatttgaggaatacggagttaggcgtttttaaagtgaataaattagtagggataattttatagttagggaagggaggtattgttttgttagtatcgtgtagttattataatgagttttaggttttgtaaagtttttaaggaagtattttttttagaatttttttatgttttagaattttttgaattaaatagtgattagaaatatatgtttaaatgaaggagcgtgtaagatgaatttagagtttaagaaatgtttttttggatggtagtataaaatttttaggtaggaagttattttttcgtagatgagaggttggcgggatttattggtgtaatgaatgatttttattgtacgtttgtagcggaggagacgtttttattttgttgtgttttgtaatgttttttttaggttcgtttttttatgatttttattttagtttttgtttatttgtatttgcgtttgtatcgttataggttttttagtagaaggaggcgtttttataggcgaaggtattaggggagtgggggatcgaggttgggttgggtgtttgtagtcggtagaattagaattgtcggagaatatgttttaggtgtgtgcggaatttgatttttacgaagatatagagtatcgggttaaagtagtagtgggagaaggcgaggttgcggtagatgagtagggcgtattttagttgttgtttggtttcgtagtttcggatgatttgggttcgaaatagcgtttgtagaaatagggtgaagttgtagggattttagttgaggaagtaggttattacgatggcgaagatgagtttgatcgtgcggtggcgtcgtttggagcgtgagcggaatagggttttgaggatttttacgtagtagaataggataatttttagggatagtaggaagaagaggttgtgttggtagacggaggtgaggtattacgtgagttcggaataattatagttcgaagaaagtattttgtggaagatggtgtcgaggatggaggataggatgttggttatttatatagttatggttattagtattcggtagcggagggtggggacgcgtagggtggagagggggtttattatcgataggtagcggtggatggttatgatggttaggaagaagatgttgttgtagaggttgatggagaagattatattgaggagtttgtagaggaagttttttagtatttagttttagtggtatggggagatttatataggtaataagtaggcgaatattaggtttgagaggtataggttgaggatgaagatgttggtgagggattttaggtttttatattttattaggatttataggattaggttgttgtttattaggttgaggagaaatattaggtagtataggatagtggtggcgagggtagtaaagatttaggtttggtttttatacggttggttttgaaggttatagtaaaaaaaggtggtgttttttgggttgtttgaggattttatttggattagatggtagggacgtttagagtatttgaaatgatagagatatggagtttaaagttatgtggtggttgggtatagtggttaatatttgtaattttagtattttggaaaggttaaagggagaggattgtttgattttaggagtttgagattattttaggtaatatagtgatatttttgtttttataaaaaatttaaaaattattcgggtgtggtggcgtatgtttatagttttagttatttaggaaatcggggggtggggaaagattgtttgagtttaggagggcgagattgtagagagttgtgattatgttattgtattttaatttaggtgatagagaaaaattatgttttaaaaataaataaaaaatttaaaaaagatgttagatttttagttaatttttttttggattagagaaaagatttggaatgggaaggggattttttatagagtgtattttttttataagagatagttttttaagattattttaaaatatttttatttgttatgttggtattttattgttataaagagtttattttattaggtttaagggttgttttaatgttaatattggttagttgtgttgaattataaaaggaggagagtataatgaggtatgtttgattatttatttttattatggtttgaattaatatttttttagaatgtttttttttggttgaggagttcgtttagttagttgtgaggtttagaattatattttttatttataaaatttaaatgtttgttaagataaatattaaataattaattaatattttttagaaaaatgaaataaaatttagagtttatataatataataatgtttaggatataatttaaaattatttagtatataaagaaataggaaaatatgatttatatttaaaagaaaagataattaagtagttgtttgtgagaggggttatatgttggaatttgtaaatatgtattaaaatgtaattaattattatatttgtttttaaggaaataaaggaaattatatttataatgaatggagagatagaaagttttagtagagaaagaaaagttatataaaagatttaaaaggaattataaattaataataagatattaagaaaagttttaataatttggaaataattttaaaaatattagcgcgtgtgacgttatggcgtcgtgcggggtcgcggcggcggcgtagggggcgggttcgtggcgcggggtttgaggaggaagtggagagattgttgttttttttgcgtttagagaggacgcggttgcgtcgcgtttttttgcgattttttttatgttttttggttttatcgtttttttttttaaggttgttgttgtttatggaagtaatggaaggattttttaatttggtttattagtagagtagacgagtcgatcgtttattagttgtaggtaaatacgaagaggcgattttttgttataaaaaggttgcggtatatttttttgaagttatgaagttgatataatttgagtaggttcgttttttattggaattgtaaagggatagttatatgaaatagtttttttttatttaagagagatggaaaagggtttagcgtgaggaaagattgaaagtttagtagaatatagataaggatgtagttgtttatttttaggtattttataaattttttgtcgaggatgcggagggttagagtttttttttttagaagtatagtttttttttagagaaacgtttgtttgagatttaggggatttttgatagggatttagatatattattatatttattttagtaaaagagtgagatagtagagttatgtattggaagtaaagttttagaagatgataaaataattatagaggaataggtaattaaaattgtagatttgaagagacgtgtggaattttttgtggttgagaatgaaagattaaggaaagaaaataattaaaggttgaaaaggttagatttttaaaaaggtttagtagaaaaggagttggatgtagatgttgattttgtagaaacgttagaattacggagtttgtcgttatatttagaaattgttatagtttttttaatttggtagaagtttgtagtaaatgtcgggaaagttaaggatattttaatttttagttttttttttttggattttatatttttagaatttttttttatggatttttttgagaatattttgaaaggatttatgaataattaaaatggaaggttatagaagaggggagaagaggaaataatatagtaatagttaatttagtaaaaaaaaaaaaaaaaatgaaaagggaaaattacgtagaaggggtattttggtttcggaaatgttttattatttggtggattgtgggagaataggtattgttaggatttgggaaatagttattgtgaaatgcgttgtatattttatttattgatttgagttaatgattttaatttgataaatattaaatttatggaggtttagtttttgttgatataaattaaatggttatttggaataattttttttaagtaatagttattttttttatttttagggttaaaatgtataaaatatgttatgtgtaattaatttataatgttataaatgataatgtaaaatttaaataatatggtggttcgaggggttgttttgtatttgaaatatgttttttattatgtattgattgtatgtattttgttaatgtttattttgtttaaataaggtgtgtaagatatatattttatttgttagttgtaagatatatattttaattgttagttatgtttttttaaataaattattagtttatatgattaattagggtgtattttaagttttaattttgtttattgtataatgtattatttgaaaatattaaggaggaaatattttttgtttttaatgatgtatgagtggaagtaatgttagttggtagtatttgattgtaagaaattaataaagtaattgtgttttattaaaaaaatttaattgatttttagattttgagttaaagaagaaattaaaaggtaaagtataaaatattttgtattgataataatgaaaatattatatattagaatttatgaaatgtaattaaagtagtatttggagagaaatttatagttttaaatgcgtgtattagaaagaataaacgtttaaaatttaagatttaaattagtgatataagttagaaatagaagagttaattaaagtagaaggaaggtattaataaaaataaaagtagaaaaaataaaatagaaaataaaatgaataagattaaaattggttgtttgataatattttaatatattgataaaattagtaaggagtagtggtttatgtttataattttaatgttttgaaaggttgaggtaggagaattttttgaggttaggagttttaggttgtagtgagttataatggcgttattgtattttagtttgggtgttagagtaagattttgttttaaaagaaataaagaaagagagagagagagagagaaagattaaaaaattgatgaagttttatttagattgattgagaataaagagaaatatgttatagattttatagattttataagaataataaataaatattatgattaattttatgttaaaaaatttaataatttaaatgaaatggatgaattttttttaatatgtagtatattaaaattgatatgggatgatatggtaaatgtgaatagttttatatttgttatagaaatataattaattatataaatttttattataaagaaaattttagaattagaggatttttttagtgatttttttaaatatttggggaagaaataatattagttttatataaattataagaaatagaaataaaggatggaatattttttaattttttttatgaggttagaataattttgatattaaaattagattaataagattataataagagaaaattatagaataatatttttcgtgaatatagatagaaaaatttttaacgaaatattggtagattaaatttagtaatatattttaaaagaataatataatatgattaagttgagtttattttagaaatatgagattgttttaatatatgaaaattaatttaagttattatattaatagaataaagaaaaaaattatatgattttttttgataaatgtagaaaagtatttgataaagtttaatattttttgatgatataaatttttagtaaattagaaataaaagggatattggatatttataaaaattatttattttttttgttggttattaatttatttatttaaaaattttagaggtagttatgttttgggtttggaagtttttggagataaaaaggaaaatgatgttaaattttaaatttttttaagttatatttagtgaattggtttttttttgttggttgtttttttttttttttatttttgtggtttattttaattttaagggagtgaatttagttttttggattgtaatataatttagattgagaaagatagttttaaattatataattattagtaataataaggttttatataaagatatgtagttaaataaatttttttattttttttagtataagaaaaatattatttatatgttaggtttatttaaagtatggtttttagatttatttttttttttttttttttttttttttttgagatggagtttcgttttgttttttagtttggagtgtagtggtgtgattttggtttattgtaagtttcgttttttagatttatgttatttttttgaattagttttttaagtagttaggattataggtgttcgttattatatttggttatttttttgtatttttagtagagacggggttttattatgttagttaggatggttttaattttttgattttatgatttatttgttttggttttttaaagtgttgggattataggtgggagttattacgtttagttaattttttttttttgattttttttttttttgatagggtttcgttttattatttatgttggaatgt

SEQ ID NO: 785 - DNA, 6059 bp, Artificial Sequence
  chemically treated genomic DNA (Homo sapiens)
ggtatttggtgtttttttagtttgagaatagtttcgtttttttttgttatgtgataaatagtagtaacgttttttaagatttagtttaaattttattttttttgtgaggttttttttattttttaaaaaagtagtgtttttataggtttgggaatttatttttatgggttggggttgtttgttttattttttgggtttttaaggttttagtttacggtttttagtatttaaaatggatttgttttttaggagggtttagagttgtaggatatgggtagaggaagaggtagtttttaggttttaggtttttttgtgattttagtttttttttaagggaaatttagggttaggagaaggaagtttagggtttcggtattgtttggagtagatatagatttttgtttagggtttggattttttttgattttacgtaagatagttttagttttagtttgggttatacgggaattttaggtttggttgagtttgtttttttaatagtttggggttggcggttaagtttagtagtttttggagtagtgttttaagaggtatttggaggagttgtaagagaggttgtgaagtagtcgattttgatagagaggaggaggaaatggtttttttttcgggttggtcggtttggtagatagtagtaggggtttttttttttgtgaggtattgggtttaggttttaatttttgagttttttatttttttaaattatagtttagaggtgtgaaaaaaagaaaaaaatagggggaggggtggtagagaagagttaggtgtatatttcgtattttgattataggtggggttcggagtagttttattttgattaattttttttttaggttttttcgttagttgttttggagggcggaggtaggaggtttattggttagaattttgattgtaggtttttggttaggtagttgttttttaagttgggtttgattttgttttggtttgggagttgtttgggattagaaagaattaaattagatagttggttaagggtttggtttagtttcgtaatatagtaattttttaagatattttagttgtgtacgacggtagaagtttattatagatttgtaattgcgaggttaggaggggttagtttggaaagtttttagagcgggaggagattgttgtttattaggtatttattttgttttagatattttttatatatattatttgtagtttttagagtaattttattaaatgtatattatttttagatttattttttagatgaggaaattaaggtatagagattaaataatttgtttgagattatatagttgggtagttagaggattcgtttaggattggtaaatttatcgtttttttttatttttagttaaggtagagggtggtttttttggaaaattagtttttcggttaagtttatatttgtacgttttataagtgttattttttattattggtttttttgatatgaaaggtttttggttgtttcgggtttgtagttaatattttttttatttaatattttcgattgtatttttattaagttatgggttttgtgttagaagtttatagttttggttattttagtttatttttttaataattttgttgaggaaattggttcgatttagttatgtaatttgtttaaagttatatagttcgaatagggtggagttagggttggaatttagataagtttagtattttttttataatattatggttttattgggaatagtttagatttatagtttagtttgggttattaggatacggttttgatattagggtacggttttgattattagggtgttcgagtttagaaaggaaagttttttgtttttttttaaagtttttgttttgttttttttttatgtgttttttttagtaatttgggaaggatatgatataaataagtgaggagattggaaggatattagggaggatattagggttattttttttttttttttttttttttttgtttttttttttttttttttttgagatggagttttattttgttatttaggttggagtatagtagtacgattttagtttattgtaatttttattttttgagtttaagtaatttttttgttttagttttttgagtagttgggattataggtatgtgttagtttggttaattttttgttttgttttgttttgttttttgagacggagttttatttttgttgtttaggttggagtgtagtggtatgatttcggtttattataattttcgttttttgggtttaagtaatttttttgttttagtttttcgagtagttaggattatgggtatgtattattatattcggttaatttttgtatttttagtagagatagggtttttttatgttggttaggttggttttaaattttcgatttcgggtgattcgttcgttttggttttttaaagtgttgggattataggtatgagttatcgtgttcggtttggatttttattttttatatggattagtaatattttaatatttatttagagtagggttttttagtttatgggtggtggattagtatatcggtttgtggtttgttaggaattaggttggatagtaggaggtaagttgtagggggagggagtattattgtttgagttttgttttttgttagattagtagagtataaattttgttgtgaattgtacgtgggagggatttaggttgtgtattgtttatgagaatttaatgtttgatgatttgaggtggaatagttttatttcgaaattatttttattttagttcgtggaaaaattgttttttacgaaatcggtttttggtgttaaaaaggttggggattgttgatttagaggatttatattgggttgttaatttttgttattataagatgtttttaaaattattatttattttttttattattttataaagaaaaggtttttttgatattaaaaaaaggggataaataatatgattgttgaatataagatagatttttaaatggaataaatgtggttttttatggttaatttttttatttgtagaagtttatggaatttaaatttttttataggttagtattgggagattgtggttttagtttttaatttttttttatttttataggtagttattggttaagttttgtttattttaattggtttggtttttggaattttttttgttttttttattggtattgtttttgatttttgttaggtttttagttttttttggtttgaattttgtaggtgataagttgtttagagtaaggagagttatatttgtttataggaggggaagggttttgatgttttgtaagtatgttttatgtgggtgtaaatttaattttaggttttagtttggaggttttggtggggtagtttggttgaaaattggttttaagattatgggttagtatttgttttttttttttttttttttttttttttttttttttttttttttttttttttatttttgttttttaattaggggagagagagaaagaggaaattgtttgggagaagtaaattacgggtagttttgtttattggtaatgagaagagggcgatagggaggggagaagagggtaaaggggagagttgagggtaggtggggagaggaattgtttattattttttgttataaagtgattgatgtgttgtattaaggttgttttatagtttttttttaagattaagaagtttttatggttttttttttaattttatttttttttttgttcgagaagtaattgtttttatgaatttgtggtattttttgtttttgttttaaatttcgagaattaatagtgttatttaaaataatatggtattgattttgtggtggtttttagagtttatgtaagtggtattaaattatatatggtattttgtaatttgttttttttattatgtgatcgttggtttttttagatgtatttatgtttaaatgtgtagttttagtttatttgtttttaattgtatgaatatattatagtttatttatttaaaagaaattgaagatagtgtttatgagtaggaaaaggagaattagatagtcgtgggattaatttttacgtttatttttaattgtcgtgtttggcgaaggtttgttttttttttgaattatttatgtagataatttcgtacgttataagtgagttgtgtggttgaaataaggtagtgtcggagaaagtatttaaagtaatgtttattatatagtaagtttattattggtagttttttttttttttttttattgattagtagggagaggtggtggtaaaaagttagatttagtgtaacggttttttaaaaaaatattttaattttttttttaagagatagggttttattttgttattaggttggagtgtagtggtataattatattttaaggtagatttgaattttcgggtttaagtaatttttttgttttaggtttttaagtagttaggattataggtatatgttattatgttcggttggttttttttatttttggtagagatggagtttcgttatgttgtttaggttggttttaaatttttggttttaagtgatttttttgttttagtttttttagtagttgggattataggaatgagttattgtatttagttgaaatttttaagaaggtggattttttttgtagatttatttttttatttagtttttataattatgtaaagattaatttaaggttaggatagatgagttttaatttatggagtattgattttattagtgtaggtagtagggttgttttttattttttagttgtattgttttttttttagatttttttttttaaaggatttgtttttagttagttattttttgtttagtttttttggttttaagtttgtagttagtttttttagagaggttttatttagttacggaaattttgtggtttgaggtttagggaggtttggtagaggtaattttttggaagaggttgttgttgagaattgtttgaaatttttattttttttgtgattgtaggtttttaattataagtattaaagtagaggggtaggtagtatattatttagtagttagagtattagtttagttatggtttttgaggtaagtgttgttgtttagttaggttaggttagaattcgaagtggaaaattcggggtattaggggaatgttagggttggtttatagtttagggttattatagggttgggtgagtagttggaggtcgtatgggttgtggtagaaatagtattggggaattgggaatttagtttggttattgattttgggtgtttttttttttttttttggtttcggtgtttcgtttgtaaaatggggggggcggggggtaagtagattcgaaggttttttttaggagatttggaattttgatttttggcgtgttggattaaattggtattggggagatttgtaggtttatagtgttgggggtgaggggataaagaagatttttttttaagttaagtgggggatttttttgtgggtagttaaatggtcgtgtaagttttagtgtagggagggggaaggattgggtagattgtatgtatttggggggcgtggtgatttgtagagaggttatacggtgggggggggcgtaggaagttggggttttcggataagggttaaggagggaagaggagggttagtgattggaaaaggggattgtggagaggcgttggggaggaaggtggttgaattatgtgttgggggtggggtattgaggacgtaaggtaagtttgaagggagagtagggagagagaggatagtgggtagagagggttttgggtattggagggacgtttttttttttgtttaggggtttttgggtcgatgggattacgtagaagaatgcgagagaagtagtttttgagaagggaagttattattttagagtttaggttgagcggatggagttgaggaagtacggttttggaagattggcggggatagttataggaggagttgtttagagtaaattatagattaaattagatttaattataaaagagtttttgttaggtttttatatagttttttttttttcgttttcgtttttatagg

SEQ ID NO: 786 - DNA, 6059 bp, Artificial Sequence
  chemically treated genomic DNA (Homo sapiens)
tttgtgagggcgggaacggggaggaaggggttgtgtaaaggtttggtaggaatttttttgtgattgagtttgatttagtttgtgatttattttgagtagttttttttataattgttttcgttagttttttagggtcgtatttttttaattttattcgtttagtttgggttttgggatagtgatttttttttttaaaggttgtttttttcgtatttttttgcgtgattttatcggtttagggatttttgggtaggaagaagagcgtttttttagtgtttagagttttttttgtttattgttttttttttttttgttttttttttaggtttgttttgcgtttttagtgttttatttttaatatatagtttaattatttttttttttagcgtttttttataatttttttttttagttattaattttttttttttttttttggtttttgttcggggattttaattttttgcgtttttttttatcgtgtggtttttttataagttattacgttttttaaatgtatgtagtttgtttagtttttttttttttttatattgaggtttgtacggttatttagttgtttataaggggattttttatttagtttgagaaggaattttttttatttttttatttttagtattatggatttgtaggtttttttagtattaatttagtttagtacgttaagagttaaagttttaagttttttgaagggagttttcgagtttatttgtttttcgttttttttattttgtagacgagatatcgaagttagagaggagaggagaggtatttagggttagtggttaagttgggtttttaattttttagtgttgtttttgttataatttatgcggtttttagttatttatttaattttgtggtgattttgggttgtgggttagttttggtatttttttgatgtttcgggttttttatttcgaattttggtttggtttggttgggtagtagtatttattttaaggattatggttgggttggtgttttggttgttgggtggtgtgttgtttgtttttttgttttggtgtttgtggttggaaatttgtagttatagaggaagtgggagttttaggtagtttttagtagtagttttttttagggagttatttttattagatttttttaaattttaggttatagagttttcgtgattgggtgaaatttttttggaggagttggttataagtttgggattagaaaagttgggtagaggatgattggttgggggtaggttttttgagaagagaggtttgaagaggaagtaatgtagttgagaagtgaagggtaattttattgtttgtattggtagggttagtgttttatagattggaatttatttgttttggttttgagttgatttttgtatgattgtaaaggttgggtagagaaataagtttgtagaggagatttatttttttaaaaattttagttaggtgtagtggtttatttttgtaattttagttattggggaggttgaggtaagaggattatttaaggttaagagtttgagattagtttgggtagtatagcgaggttttatttttattaaaaataaaaaaagttagtcgggtatggtggtatgtgtttgtagttttaattatttggaagtttgagataggaggattgtttgagttcgggagtttaagtttgttttgagatataattgtattattgtattttagtttggtgatagagtgaggttttgttttttaaaaagggaattaaaatatttttttaaaaagtcgttatattaaatttagttttttattattatttttttttgttaattagtggggaaaaagaaagggaattattagtaatgaatttgttatgtgatagatattgttttaggtgtttttttcgatattgttttattttaattatataatttatttgtgacgtgcggggttatttgtatggatgatttagaaaggggataggttttcgttagatacggtaattaaaggtgggcgtgaggattgattttacggttgtttgatttttttttttttatttatgaatattgtttttagttttttttaagtgaataagttatgatatatttatgtagttaaaaataaatgaattaaagttatatatttgaatatggatgtatttagaaaagttaacgattatatggtagaagaagtaagttatagaatgttatgtatagtttgatgttatttatataaattttaaaaattattataaaattaatattatgttgttttggataatattgttggttttcgaggtttaaaatagggataggagatattataaatttataaaagtagttgtttttcgggtaagaaggaggatggggttggggaggaggttataggaattttttgattttaaggaaaagttgtaaggtagttttggtatagtatattagttattttatggtagagaatggtgaataatttttttttttatttgtttttagtttttttttttgttttttttttttttttttgtcgttttttttttattattagtgggtaaggttgttcgtaatttgttttttttaagtagtttttttttttttttttttttttagttggaaagtaggggtggagggagagagagaaagaagagagaagagagaagagagagagagagaaaagtaagtgttagtttatggttttggggttagtttttagttagattgttttattaaagtttttaggttagggtttggaattaaatttatatttatatgaggtatatttgtaaggtattaaggtttttttttttttgtggatagatgtgattttttttgttttaaatagtttgttatttgtagggtttaggttagagggaattgagggtttggtagaggttaggagtagtgttagtggagggagtaggaaggattttagaaattaggttagttaggatgagtaggatttggttagtagttatttatgggggtggaaaagggttgggagttgggattatagttttttagtgttgatttgtgaagaggtttgagttttatgggtttttgtaaatgagaaaattgattatggaaagttatatttgttttatttaaaggtttgttttatatttagtaattatgttatttgttttttttttttggtattaaaagggttttttttttatgaaatgatggggaaaatagatggtagttttggaaatattttgtgatggtagaagttgataatttaatgtgggttttttaaattagtagtttttagtttttttggtattagggatcggtttcgtggaagataatttttttacggattggagtggggatggtttcgggatgaaattgttttattttagattattaggtattagatttttataaataatgtataatttagattttttttacgtgtagtttataataggatttgtgttttgttgatttgataggaggtagagtttaggtagtaatgttttttttttttgtagtttattttttgttgtttagtttggtttttaataggttatagatcggtatattggtttattatttatgggttggggagttttgttttaaatagatgttgaaatgttattggtttatgtgaaagataaaagtttaggtcgggtacggtggtttatgtttgtaattttagtattttgggaggttaaggcgggcggattattcgaggtcgggagtttgagattagtttgattaatatggagaaattttgtttttattaaaaatataaaaattagtcgggtgtggtggtgtatgtttataattttagttattcgggaggttgagataggagaattgtttgaatttaggaggcggaggttgtggtaagtcgagattatgttattgtattttagtttgggtaataagagtgaaatttcgttttaaaaaataaaataaaataagataaaaaattagttaggttggtatatgtttgtagttttagttatttaggaggttgaggtaggagaattgtttgaatttaggaggtggaggttgtagtgagttgagatcgtgttattgtattttagtttgggtgatagagtgagattttattttaaaaaaaaaaaaaaaaaaagataagaaagaaaaaaaaagaaaaaaaggtaattttggtgttttttttggtgtttttttagtttttttatttgtttgtattatgttttttttaggttgttgggaaggatatatgagagaaaggtagggtaagagttttggaaaggagtagagagtttttttttttgagttcggatattttgataattagggtcgtattttgatattagggtcgtgttttgatagtttaagttgggttatgggtttgagttgtttttagtgaggttatgatgttgtgggaagaatgttaaatttgtttgagttttagttttgattttattttgttcgagttgtgtgattttggataaattatatagttgagtcgagttagtttttttagtagggttgttaaaaagatgaattggaataattaaggttgtaggtttttagtatagggtttatagtttagtaggagtataatcgagaatgttgagtgagagagatgttggttataaattcggagtaattaggagttttttatattaagggagttagtgatagagggtggtatttgtggggcgtataggtgtgggtttggtcggagggttggttttttagagaggttattttttgttttaattgggggtggagggggacggtgagtttgttagttttaggcgaattttttggttgtttagttgtgtaattttaggtaaattatttaatttttgtattttggtttttttatttgaaaaatgggtttaaggatagtatatatttgatagggttgttttggagattgtaaatgatatgtgtagaaagtgtttggggtagggtaggtgtttagtgagtagtagttttttttcgttttaggaattttttaaattgattttttttaatttcgtaattgtaagtttgtggtgggtttttgtcgtcgtgtatagttgagatgttttagaaggttgttgtgttacggggttgagttaaatttttgattagttgtttaatttggttttttttggttttaaatagtttttagattaggatagaattaggtttagtttaggggatagttgtttggttaagggtttgtaattagagttttggttagtgagttttttgttttcgttttttagagtagttggcggggaagtttgaggaggaagttagttagagtgaagttgtttcgggttttatttgtggttaaggtgcgaaatgtgtatttggtttttttttgttatttttttttttgttttttttttttttttatatttttgggttgtggtttgaggagatgggaggtttaaaggttgaggtttgggtttagtgttttataggaaggagggtttttattgttgtttgttaggtcggttagttcgggaaaagggttattttttttttttttttgttagagtcggttgttttataattttttttgtagtttttttaaatgttttttggagtattattttaaaagttattggatttggtcgttagttttaggttgttaggggagtaggtttagttaggtttgaggttttcgtgtggtttaggttggggttgagattattttacgtgaaattaagaagagtttaagttttgggtaggggtttgtatttgttttagatagtgtcgggattttgggttttttttttttggttttgaattttttttgaaagagagttgaagttatagggagatttggggtttggggattgtttttttttttgtttatgttttgtagttttgagtttttttgggaggtaagtttattttaagtgttgggggtcgtgggttggggttttgggagtttaggaggtgggatagatagttttagtttatgagggtgagtttttagatttgtggggatattgtttttttggggaatggagaaggttttataggggagatgaagtttgagttgggttttggaggacgttgttgttgtttgttatatggtaaagggagacgaggttgtttttaggttgggggaatattaggtgtt

SEQ ID NO: 787 - DNA, 5572 bp, Artificial Sequence
  chemically treated genomic DNA (Homo sapiens)
tgtatttggtggagttgtttatcgttaggtagggtttgttgggcgtttttggtagggagaggtttttttttagatggtcgtttaggaggttttttttgggtagtatttgtggttttcggttttttgtgttttcgtttttatttttgttgattttgtttgtgttttggtatggagagtagggtttggggttttaggggaatgggtatgtgtttagggtagcgcggtttttgtttttttagtattcgtttttttgtcgagagggtaggtttcgggtttttttttagagtgtgtatagagaaatgttttggttagtgaggagggtagaattgttaaggagggaagtagagtgaggaggttaggtggtttgggaggagagggtatttgagtataggtagggtttttatttttaatatagagggacgtagagcggggggaattttgagtagggagggtttatgagttttttttttttttttttgttttaggtatttgtagtgggagagaggttagggttgcggttattttcgagtgtttttgtgaggtcgggtggggtgtggatggcggtcgcgttatatataggcgttgcggggtaggcggggatgtggggtgtttataggtaggtttgtttttttattgtatatagatatttttttttgtgttttgggtttttttttatcgtttttttttttttggggttatgttttttatagtttagtagttttttagcgtggttgtttggttttgtattttcgttattttgtgttttttgttttttagtaggtaggtttatttaatgtatgtttatgggggtatcgttgtttttggaggtgttaggaatttggatttttggatggatagagattgtaggaggtttgtttggtttaatgataggatttaggatagtcgatgggttttaaggttgttttttttagtagtaggtggatagggtgttttttgaggggtagttttgggttgaggggttttggcggggatttttttaagtgaggagtttggtaagcggggaagggttttgtgtttagtatttcgttcgttttttttgtagtggcgttaattttttggcggttaatatcgacgggaatatgttttatgatttgtgtgatgatgagtagacgttggattgtttggagattgttatggtcgatcgtggtaggtgcggcggtgcggttgtgggagggttgtcggtcgcgttttttttgagtttgtcgtttcgtaggtattatttaggatagtatcgaggtcgttcgggtcgtgttagaattgcgtatgttggacgatattcggagtcggttgtaggtcggggtagatttttatgtttttttggattacggggttacgttggtgagggttggggggtgaggggtatacggggttgggggtttcgttatttggaggtgggggatggggtcgaatttaggtcgggcgtttgtttgtagttgtacgtcgtagtcgttaacgggtttagcgaggcggttgttttgttgttggaatatcgagttagtttgagcgttaaggattaagacggttgggagtcgttgtacgtcgcggtttattggggttaggtgagtgcgggcgggagtaggtgggagggggtttttagcgtagtagtttgtagtttcggtttgtcgtttataggtgtttttggtggagttgttcgtggcgtacggtgtcgatttgaacgtaaagtttttgatggacgagacgttttttggtgagtttgcggagtttatttttatttgggggagaggataggcggagagggcgtttttgacgtttgcgtttattttttagatgtgtgcggggacgaggaggtgcgggttaagttgttggagttgaagtataagtacgacgtttttttgcgcgtttagagtcgttagcgttttttgttgcgtcgtcgtatttttagcgtcggtagtcgcgggtgagcgtcgtttttagtaggtttcgtttcgggtttggtttcgcggacgttagtttcgggcggagtgttagtcgaattgggggtagagttcgagggggtgggcggggtttttcgggtattttttttttttttattttttttttttttttttttttaggaaggtggtgaggcgggtgagtttaatttagcgtatcgatttgtatcgtaagtagtacgtttaggaggttatcgtgtggtaatagtcgtcgtttattagttcggagtcgttcgaggataacgatgatcgttagataggcgtagagtttaggtcgtcgttttcggaggtgagcgtttcgtttttgtttcgtttagcgtaggggtgggtttggttttgttttggtttttttttcgtttggatttttttttgtttgtgttaggaatggtgttttgtaggggttagtttttgttttattttttttgtttgtttttttatgattatatagtttgaatttaaggttagggaggggggaggagttttttgatggttttgggatttttattgttcgtaggaggataatttcgaagtggttaggtcgtataatggtcgagtagggggttttttagtgcggtatttatattttaagcgattagatcggagtgttttttattagttgagttttttggatagtattattttttatattttggtttacgataaggtttattatattttggttgatttgaagcgttagcgagttgttgttaagttgtagcgatttttatttgaggggttcgagagttttgagatagttgagtttggtttgtttggtgatacggtgattttttagtttgattgtggttttagggtaggcggggatttatttttgtttaagtttatagtttcggcggtggaggttttcgtggagaggaggtcgtgttgtttgtttatgtgaggttgttgtttagtatgtaggggttttgtttcgggtatagtttaaggttgtttttttacggtgcgtgttttggtgttgcgggtgtagtacggaaatttcggtttttattgtataggatattggttttttttaggttagaagatatgtttggagggatgtttggttgtaaagattatttttattttgtaatttttgataaagggttgttttgttatggagtttcgttgtgtgttgtgtgttttagttgggtcgttgttttatagtggggagtgggttgtgttgtttggttggggtgttattcgtgtttgtgagtatgaaagtttgtaggtgcgcgttggggtatgtggtagttttggttgtgtgggagtgaggtttatagttattgggttggaagtttgggttttatttattttttttcgtgtttagttttttggagtttttttcgtaattttttgtttttttgagaggagttaggtgttttgaaggagtttttatgggggttagggtttagggtgtttgtgttgaggggcggaaggtgggggttttagggattatggtttggaaagggaggtggtgttttttataagatttttgtgttagagttagaggggtaaaataagtataaggttgtgttagaagttttttgggggggttgtgggtttttagtttttggtacgtagttttaattttggggtttggttgttagttttcgtttgggttggtataggggatacgtagttggttattttggttttgagttggtttggtataatgtgttagggtgagggggttttttaggggttttaagtaggagggttgagggtatcgttggttcgtttgtttatggtgggcggttttgtgtggttattagtgttgggtggtgtgggtttgggttgtttttttttttggtttagtacgggttcgttagtttagtgttttttgggtttgttttttttttagtatttttggttggaagggtgtttttatagggttgtgggcgggttagggttggttgttggttaaatttagtgtggggggtggggtagttgtttaaggtttatttgttattagggttgttatttggatttttttgttagggggcgggtaggggttggttttgtttggggttaggtttatgttaatttgtgtttcggtttgggggttagaggggtaggtttgcgtacggggaggttgttgtggtagcggaatagagacgtgtacggtgagaggtttgggggtcggttgtttagggttttcgatggttttttttttagttagtaggattagaggagttaaggttcgatttgggtttggttggttgtttatagttttgtttagagggtcggttttttgatttttatggtttaggtttcggtgttcgacgttggggtgggttagcgtggagtttggttttttagtttagtaggtttgtggaggtggggttttgacggtttattttagttcgttttttatttttttttttaatcgggaataagagggttggagagtttaggttatttttagtttcgggtgtgttttaagggtaatttttagttggtgtttggtgaaagggtatgataatagttacggtgtgagttgttttagggtttaggtttggataaaaaggttttagtttttttttttagtttttcgtagtgtttattagggattaaggtttagttatagagtttttgtagtttttgggttatagttgttagttttggagggtttagatggaatttagagtttgaatattttttttttttttttagtattttttggatttttgaggtttggtttagttaataggagataggttcgttggtataagtaaagatgcgggtgttacgagggttaggtttcggttaagttcgtatgagataaatgttagtagcgtatagtttagtgtgatttgcgcggttttttcggggtagttggggtagttcgttaggtcggttaggtaggttttaattttttgagtattttaggtggttagttttttttttttttttttatgtttagttttttagagttgttcggattgacgtttgtatttattttttatgtgggttttttgtttttttttcgtggggatattaggtaggtattgggttttgttttaagtttcgtttgttattttatttattgtttttgtttttttggggtagagttgtttttagacgggtggggcggggtttaattgtttttagtttttttagttttttttgttttttttagtgaggttagttgcggtgaagagggtgtttttttgtttggagttttttttgttacggttgtttttttttagttttggtttattaagttagatttagttgtcgttatttttatttttggttttgttattttttgagttgttttttcgtttggtttgggtagagttatggtttcgagtataggtgatcggagttaggcggtgaggaatggattgagggcgaaggtgttgacgttggacggtatgaattcgcgtgtgcggagagtggagtacgtagtgcgtggttttatagtgtagcgagttttggagttggagtaggagttgcgttaggtatggtttagggtttttcgttgttttttaggttataatggggtggtcgagttggttttagttttattggtatatgggataagggttgaggggttaggtagggtatagtttttttgtttgtttttttttttttttagg

SEQ ID NO: 788 - DNA, 5572 bp, Artificial Sequence
  chemically treated genomic DNA (Homo sapiens)
tttgggaggggaggggagtaggtagggagattgtgttttatttaattttttagtttttgttttatgtgttagtggggttggggttaattcggttattttattgtgatttggagggtagcgaggggttttgggttatatttggcgtagtttttgttttagttttaaggttcgttgtattatggggttacgtattgcgtattttatttttcgtatacgcgggtttatgtcgtttagcgttagtattttcgtttttagtttattttttatcgtttggtttcggttatttgtgttcgaggttatgattttatttagattaggcgggaaggtagtttaggaggtggtaggattagaagtgggaatggcgatagttgggtttggtttagtgggttagggttgggagggggtagtcgtagtagagggaattttaggtaagagagtattttttttatcgtagttggttttattgggagggatagaaagggttgaaggagttggggatagttgggtttcgttttattcgtttgggaatagttttgttttagggaggtagaggtagtgggtgaggtggtaggcggggtttggggtaaggtttagtgtttgtttagtgtttttacgaagggagagtaggagatttatatggggggtaggtatagacgttagttcggatagttttgagggattagatatggggggagggggagagggttgattatttggggtgtttagaaggttagggtttgtttagtcggtttgacgggttgttttagttgtttcggagggatcgcgtaggttatattggattgtgcgttgttgatatttattttatacgggtttggtcgaggtttggttttcgtggtattcgtatttttgtttgtgttagcggatttgttttttattaattgagttaggttttaggaatttagggggtgttggggggaggggaggggtgtttaggttttgggttttatttggattttttagagttggtagttatggtttagaggttgtaagagttttgtagttggattttggtttttgatgagtattgcgaggggttgggggagggggttggagtttttttgtttaggtttgagttttgggatagtttatatcgtggttgttgttatgtttttttattaggtattagttgggggttgtttttgggatatattcgaggttaggggtgatttgagttttttagtttttttgttttcgattggaggagagagtaggaaacgagttgggataggtcgttagagttttatttttataggtttgttgagttgaaaggttaggttttacgttggtttattttagcgtcgggtatcgaaatttgaattatgggggttagggagtcggttttttgagtagggttgtgggtaattagttaggtttaagtcggattttggtttttttgattttgttggttgggagaaaagttatcgggagttttggatagtcggtttttaggttttttatcgtgtacgtttttgtttcgttgttataatagttttttcgtgcgtaggtttgtttttttggtttttaggtcggggtataggttaatatgggtttggttttaggtagagttagtttttgttcgttttttggtaagggagtttaagtggtagttttggtggtaggtggattttgggtagttgttttattttttatattaaatttaattagtagttagttttggttcgtttatagttttgtgaggatatttttttaattagggatgttaggggaagggtaggtttaaaggatattgggttgacgggttcgtgttgagttaggagggagaatagtttaaatttatattatttagtattggtggttatataaagtcgtttattatgaatagacgaattagcggtgtttttagtttttttgtttgaggtttttaaggggtttttttattttgatatattgtgttaagttagtttagagttagagtggttaattgcgtgttttttatgttagtttaggcggaagttggtagttaggttttaggattaaggttgcgtgttaggaattggggatttataatttttttagggagtttttgatatagttttgtgtttgttttgtttttttggttttgatataagagttttgtggaaaatattatttttttttttaagttatggtttttgggatttttatttttcgttttttagtatagatattttaggttttggtttttatggaggtttttttaaagtatttggttttttttaggagagtaaagggttacggaggaggttttaggaggttgagtacgggagggagtgggtgaggtttaggtttttagtttagtggttgtgagttttatttttatatagttagggttgttatatgttttagcgcgtatttataggtttttatgtttataggtacgggtggtattttagttaaatagtataatttattttttattgtgggatagcgatttagttgagatatataatatataacgaggttttatggtaaaatagttttttattaagagttgtaggataaaaatagtttttgtagttagatatttttttaggtatgttttttgatttgagaggggttagtgttttgtatagtagaagtcggggttttcgtgttgtattcgtagtattagggtacgtatcgtggggaggtagttttgggttgtgttcgagatagggtttttgtatgttgagtaatagttttatatgagtaggtagtacggttttttttttacgggagtttttatcgtcggggttgtgagtttgagtaggggtgggttttcgtttgttttgaagttatagttaggttggggggttatcgtgttattaggtaggttaggtttagttgttttagggttttcgggttttttaggtgggggtcgttgtagtttggtagtagttcgttggcgttttaggttagttagggtgtggtgggttttgtcgtggattagggtgtggggggtggtgttgtttagggggtttagttggtaggagatatttcggtttagtcgtttggagtatagatgtcgtattggggagttttttattcggttattgtgcggtttgattatttcggggttgtttttttgcgggtagtgaaggttttagagttattaggaggttttttttttttttttggttttgggtttaggttgtatggttatgaagggatagataggagagatggggtaaaagttggtttttgtagggtattatttttgatataggtaggagggggtttaagcggagagagaattagggtagagttaggtttatttttgcgttgggcggagtagggacggggcgtttattttcgggggcggcggtttgagttttgcgtttgtttggcggttatcgttgttttcgggcggtttcgggttggtgggcggcggttgttgttatacgatggttttttgggcgtgttgtttgcggtataggtcggtgcgttgggttaggtttattcgttttattatttttttggggaggagagaggagagggagtgaggggaaggggagtgttcggaggatttcgtttattttttcggattttgtttttagttcggttggtatttcgttcggggttgacgttcgcggggttaagttcggggcggggtttgttgggggcggcgtttattcgcggttgtcggcgttggaggtgcggcggcgtagtaaggagcgttggcggttttgggcgcgtaggagggcgtcgtgtttgtgttttagttttagtagtttggttcgtattttttcgttttcgtatatatttgagaagtgggcgtaggcgttaggggcgtttttttcgtttgtttttttttttaggtggaggtgggtttcgtaagtttattaaggggcgtttcgtttattagggattttgcgtttaggtcggtatcgtgcgttacgagtagttttattaggggtatttgtggacggtaggtcggagttgtagattgttgcgttggaagtttttttttatttgttttcgttcgtatttatttggttttagtaggtcgcggcgtgtagcggtttttaatcgttttggtttttagcgtttaggttggttcggtgttttagtagtagggtagtcgtttcgttgaattcgttggcggttgcgacgtgtagttgtaggtaagcgttcggtttgaattcggttttattttttatttttaagtagcgaggtttttagtttcgtgtgttttttattttttagtttttattagcgtggtttcgtggtttaggggggtatggaggtttgtttcggtttgtagtcggtttcggatgtcgtttagtatgcgtagttttggtacggttcgggcggtttcgatgttgttttgggtgatgtttgcgaggcggtaggtttagagggagcgcgatcggtagtttttttatagtcgtatcgtcgtatttattacggtcggttatggtagtttttaggtagtttagcgtttgtttattattatataggttatagggtatgttttcgtcggtgttgatcgttaggagattggcgttattgtagggaagacggacggggtgttgggtataaggttttttttcgtttgttaggttttttatttggagaagttttcgttagggttttttagtttagggttgttttttaggaggtattttgtttatttgttgttgggagaggtagttttggggtttatcggttgttttagattttgttattaagttagataggttttttgtagtttttatttatttagggatttaggtttttggtatttttaggggtagcggtgtttttataaatatgtattggatgggtttgtttgttggggagtagggagtatagggtggcgggggtgtaggattaggtagttacgttgaggggttgttgagttgtggggagtatggttttagggaagaaggggcggtgaaggggagtttagaatatagaagggggtgtttgtgtgtagtggaggagtaggtttatttgtggatattttatattttcgtttgtttcgtagcgtttgtgtgtgacgcgatcgttatttatattttattcggttttataggggtattcgagaatgatcgtagttttgattttttttttattatagatgtttggagtaaaggggaagggaggaggtttatggattttttttgtttagagtttttttcgttttacgtttttttgtgttaaaggtaaaggttttatttgtgtttaggtattttttttttttaagttatttggtttttttattttgtttttttttttagtagttttgttttttttattgattaagatatttttttgtgtatattttgggggggggttcgaggtttgttttttcggtaggaggacgaatgttggggaggtagggatcgcgttgttttgggtatatgtttatttttttggagttttaggttttgttttttatgttaggatataggtagggttagtaaaggtgaaggcgggaatataggaggtcgagagttatagatattgtttaagaggagttttttgagcggttatttgagaggaagtttttttttgttaaggacgtttaataggttttatttggcgatgagtagttttattaggtgta

SEQ ID NO: 789 - DNA, 5856 bp, Artificial Sequence
  chemically treated genomic DNA (Homo sapiens)
tgggattataggtacgagttattacgttgtttggagatggggtttagttatgttgtataggttgtttttgagtttttaggtttaagttgtttatttgttttagttttttaaaagtgttggaattataagtatgagttattacgtttagttttttttggttatttttaaaagttatttttttttatttgagacggagttttgttttgtcgtttaggagtgtagtggcgcgattttagtttatggtaagttttgtttttcgggtttatattatttttttgttttagttttttgaatagttgggattataggtgtttattattatattcggttaattttttttgtatttttagtagagacggggttttattgtgttagttaggatggtttcgattttttgattttatgattcgtttattttggttttttaaagtgttgggattataggtatgagttatcgttttcggttaaaagttattttttagttatttgaaatattagtaaattttatagggtagaagttatgttgagagttgatgaataagttagaaaaagaatatgtggattttgggttagttgttgttttagaatggggattttttttgtaagttatgttagaattatttattagtagtgatagatgttttgtaaagtgtttgtttttgtggggtaggaagtgtttttcgtgaaattattttgtgttgtggattttttgtttttttagagtttttattcgggttttatttatagagatgtttagtattatttttggttggattgagaaaaagttgttggttttttgtttaaaggaaagggattatattttttttttatggttttgaaattagtgagttttattaaatgtttagtatttttttgaagttataaagaaagtgtttttgtaattttattgaggtttttggaaagtttttaagatagaattgtatgtatttttaaattttttatattttttttttagaaaatattttagaaaagtggattttagaagttaagtatttttgttttaacgtgtttattattttggttgggaataagaaggattttcggaatgatgagtatataaggcgggagttagttaagatgaagtaggtatgatttggggtaggattgttttgtagtatttttgaattagggttttaagtttggaggtttggggagtttagtaggaatttttataggttaggttgttttagaggtttagaagtttttttgtggttttttgatttttattaattgggatttttatagaagatttttaagatagtttattagttttgtgagatggaatgtttttttatgaggtagtgttatgtttataaggattgttggtttgagaatgaattattttattagtagttagtaattagtggttttagatgtaggaatttttttttttttgatatggagttttattttgttatttaggttggagtgtagtggcgtaattttagtttattgtaattttcgttttcggggtttaagcgatttttttgttttagattttcgagtagttgggattataggtattttttattatgatcggttaattttttttttttttaatagatggggttttattttgttggttaggttggttttgaattttttattttaagtgatttgtttatttttgttttttaaagtgtagggattataggtgtgagttattgtgtttggtttttgttagattttttatttttattttttgagatatagttttgtttttgttatttaggttggaatgtagtgatgttatttcggttgtaattttagtttttaaggtttaagtgatttttttgttttagttttttaagttgttgggattataggtatgtgttattacgtttggttaatttttgtatttttagtagagacgggttttttttatgttggttaggttggttttaaatttttgattttaggtgatttgttcgttttggttttttaaagtgttgggattataggtgtgagttattacgttcgggtttgttagatttttgattgttttttttagttattattttggtatatgtgaggttaaagataaattagtggtaattgaaagataaggaaattttgaaggttgggagtttagatagaaagttttaatgtttttttttttttttatttttaatgtttttttaaaagtgatgatggatgtggtattttggttttttagaaattagttggtttaatggtagggtttttttattggaggagaagtattgagatttttaatttaagtttttttatttaggtttttttgtttgaatgttaagggtaggttttattttttttagggtatttagttttggattggtagtttgagtaattttgtttttgattgattttttaattttttagggtttttttgattttttttttttattttttagtgaatattatgtttattagagattttatgtttggtagggggtagttattatatgttagtttaaaaattttataagtttagtagtttgttgttttttttttttgttttgttttttttgagaaggagttttattgtgtcgttaggttggagtgttgtggtacgattttggtttaattgtaattttcgttttttagatttaagcgatttttttgttttagttttttgagtagttggggttataggcgtttattattatatttaggtgattttttgtattttagtaaagaggggttttattatgttggttaggatggttttgattttttaaattcgtgattcgtttagtttagttttttaaagtgttgggattataggtgtgagttattatatttagttaagtttaatagtttttgaaagttttttttttttttaggttgggtatagtggtttatgtttgtattttagtattttgggaggtcgaggtgggtagattatttggttaggagttcgagattagtttggttaaaatggtgaaattttatttttattaaaaaattatttgggcgtggtggtgggtatttgtagttttagttattcgggaggttgaggcgggagaattttttgaatttaggaggtggaggttgtagttagttgagattatgttattgttttttagtttgggcgatcgacgagtaaaattgttttaaaaaaagaaaaaaaaattttttagatgaatttgaatattttttatttattatatgtatgttatattattagttaaaaggattatttttttttttttgttaggagtcggtgaaatttgaagaaggtagagatatggtaaataggattggcgtttttgggtatatggagtgtttagtaaagattaaagatggagtgagagaggtttttgaaatggttacgagagttgttttgtaagttagacgtgggaagaaaaaatttgggtgttttgttttgtgaaattttgttgtaagtatagtttttatgcggttaattttgaagtgttgtttattaattttagtgtatgattattggttttttttatttatttataatttatttaagattataaattagaagttattttgttattagtatttagaagttaattatgattattaacgatgtttaattcgtttggtttattagggtttttttgatattgttttaatagtttttttttgtatttttatttgatatattaggcgttaatttaaggaattttttaattttttgtttttttttagaaagagaaatagttggtaatttttgtgaattaggttgtaattattttataattaatatgttttgtttattatttgttagttgtaaggtattttggtgagttattattttagggttttatttcgtaatagattttgttggtatagttttggggtgggtagttttttgaaaatgggtttaattagaaaagtttaagtttatgtagttgtggtagagttatagttttgtggttttatgttagttattttatagttattgtgtaattagtgttatttaatgtatgttattaaaaataaatatatttattttagattagatgtagtattttttgtataattggattttttaatattgttatttttaaagaaagtgtattggttttttaaaaaagaaagtgtatttggaaataaagttagatggaaaatttattttttaaattttcgttttgttattttttttgataaaagatggttatattattttttttcggttttatgtattttagtattttatggagttgggttaagtaaataggaattggttttacgtttgaggtaattagatattttggaagatggtataatttgttttatttggatttaagtatttggttttaatttatagtgtttttttttttttattgtatttaggtttttttttagaggagttattagtttttatgggtggtatttagttttttttttttttagttgattaaattttttttttgtattagttaatttttttaattattaatagaataaaggtagttttttaaattttttgtattttgttgtttgtgttgttttttttagggttgggggtaggaggatgtaaggattttttggtttagtttattttggagaggtttgttgagtgtaaaggattagtttgtgttttattttttatttatttagtagttaatttggttttttttaataatatggaaatgattattttgtatcgtattttggtttagatttgggggtagggtgaatgtagtttgaggaggttagggagggaggatttcggtagcgtttttttggtttcggcgagttattgggttttatttaaggaggttggggtagagtttttaggattttgttcggttagaaaattcgtacgagggcggtgtcgttttggagatagggaggagggagatcggaagtttagatttttttggttgttttttgtattgtcggtaatatggtataggagaggagggttgtttgtgtacgggtagtttttgtagttgttgtcgtcgtttattagttttttatgttaaattttatattttaatttaggaatttttgagaaaaaacggagttttcgagggttttagtttttggaagggtaatttggatcgttgtcgtttggttgtttgggttagattagatatgtttgttgtttttttcggtttaggaggagtacgcgtttcgttcgggcgtattttttagtttttttttggttgaggaggggtcgagtttttcgggtagggcgggggtcggatgaggcgggatttttaggttcggaaaattgtttgtgttacgtgattcgtcgtcggttagttaaaaggaggcgtttgttggtttttttttatagtgtttgttcggggcgtttcgttggttttttggataattgcgttatgtgtgttgttcggttagcggcggcggcggcggcggtttagtcggtgtatgttttttcggcgcgttcgttggtcggcggggagtttgtgagtttgggttttttgcggggtaaggtattatttatcgagaatgtggcgtttttttgaggtattacggttcgggattatatttagatgaacgagttgtagcggcgtttcggatttcggggtttggtggtgttcggtttttcgtgtaattagtttgggtattaggtgcgtcgggcggagcggggcggggcgggggcggacgtgtagtagtggttgggggcgtcggcggtgtgttggtgggtgtcgtcggttttatgcgcggagagtttggttattttttcgttttttttttgttgttcgtagttgttgaaattttttttcgtttttgggattgcgtatggagggtaaaatttcggtgatttatagaaaattttttttgtttgtggttagaacgttttttttttttttttgatttcgggttttagttgttttttttttttgtagg

SEQ ID NO: 790 - DNA, 5856 bp, Artificial Sequence
  chemically treated genomic DNA (Homo sapiens)
tttataggagagaagggtagttagaattcggggttaagaggaggagagaaacgttttaattataaataagggagattttttatgagttatcgggattttgttttttatgcgtaattttaagggcggagaggaattttagtagttacgagtaatagaaaggaaacgagagagtagttagatttttcgcgtatggagtcgacggtatttattagtatatcgtcggcgtttttagttattattgtacgttcgttttcgtttcgtttcgtttcgttcggcgtatttgatgtttaaattggttgtacgggaagtcgagtattattaggtttcggggttcgaggcgtcgttgtagttcgtttatttgggtgtagtttcggatcgtggtgttttagagggacgttatattttcgataagtagtattttgtttcgtagggagtttaggtttataggtttttcgtcggttagcgggcgcgtcgagaaggtatatatcgattgggtcgtcgtcgtcgtcgtcgttagtcgagtagtatatatggcgtaattgtttaagaagttagcggagcgtttcgaataagtattgtaaggggaggttagtaggcgtttttttttaattggtcggcggcgggttacgtggtataggtagtttttcgggtttgagggtttcgttttattcggttttcgttttattcggagggttcggtttttttttagttaggaaaaggttggagagtgcgttcgagcgggacgcgtgttttttttaagtcggaaggagtagtaggtatgtttggtttggtttaggtaattaggcggtagcggtttaggttatttttttaagggttggggttttcgagggtttcgtttttttttagaggtttttgagttaggatgtggggtttggtataggaggttggtgggcgacggtagtagttgtaggagttgttcgtgtataaatagttttttttttttgtgttatgttatcggtagtgtaggggatagttagagggatttaggttttcggttttttttttttttgtttttaaagcggtatcgttttcgtgcgggttttttaatcgggtagagttttggaagttttgttttagtttttttaagtggagtttagtagttcgtcgaggttaaggaaacgttgtcggagttttttttttttggtttttttaggttgtatttattttatttttaaatttgaattagaatgcggtatagggtaattatttttatgttgttgggagggattagattagttgttgggtgggtgggaggtggggtataagttagttttttgtatttaataaatttttttagggtgagttaggttaggaagtttttgtatttttttatttttagttttggagagagtaatataaataataggatataggaagtttagaaaattgtttttattttattagtagttggaaaaattaattggtatagaaaaaaagtttagttagttggagagaagagagattgagtgttatttatgagaattggtggtttttttgggagggaatttggatatagtgaggagaaaagagtattgtgaattagagttagatgtttaagtttaggtgagataggttatgttattttttaaagtgtttaattgttttaggcgtgaaattaatttttatttatttagtttagttttatggggtattgagatatatggggtcgaaaaggggtaatatggttattttttattagaaaaagtgataaaacgggaatttaaaaaatgaattttttatttgattttatttttaaatatatttttttttttaaaaaattaatatattttttttgaggatgatagtattaggaaatttaattatataaaaaatattatatttagtttggggtagatatatttatttttggtaatatatattaagtggtattaattatatagtaattataaggtaattaatatgaaattatagaattgtaattttgttatagttgtatgaatttgggtttttttggttgagtttatttttaaaaaattgtttattttagagttatgttaataaaatttgttacggagtaaagttttgaagtggtgatttattagagtattttgtagttgatagataataggtaggatatgttagttataaagtagttatagtttaatttataaaagttattaattgtttttttttttagaaagaagtaagaagttaagaaattttttgaattagcgtttggtgtgttaggtgggagtgtagaggagggttgttagagtagtgttaaaaggattttggtgggttagacgggttggatatcgttaataattatagttggtttttaaatattggtagtaagatgatttttgatttgtaattttaggtaaattatagataaatgaaaaaggttagtaattatatattaagattaataaatagtattttaaaattaatcgtataagggttgtgtttgtagtaaggttttataagataaggtatttagattttttttttttacgtttagtttgtagagtagttttcgtagttattttaaaaattttttttattttatttttggtttttgttgaatattttatgtatttaaaagcgttaattttgtttgttatatttttgttttttttaggttttatcggtttttagtaaagaaaaaaaaatagtttttttagttaatagtgtggtatatatatagtaagtaaaaagtatttaaatttatttaaaagatttttttttttttttttgagatagttttgttcgtcggtcgtttaggttggagggtaatggtatgattttagttgattgtaatttttattttttgggtttaagggattttttcgttttagtttttcgagtagttgggattataggtgtttattattacgtttaagtaattttttagtagagatggggttttattattttggttaggttggtttcgaatttttgattaagtgatttgtttatttcggttttttaaagtgttgggatataggtatgagttattgtatttagtttaaaaaaaaaaaagatttttaaaagttgttaaatttggttgggtgtggtggtttatatttgtaattttagtattttgggaggttgagttgggcggattacgagtttaggagattaagattattttggttaatatggtgaaatttttttttattaaaatataaaaaattatttgggtgtggtagtgggcgtttgtaattttagttatttaggaggttgaggtaggggaatcgtttaaatttgggaggcggaggttgtagttgagttaagatcgtgttatagtattttagtttggcgatatagtgaggtttttttttaaaaaaaataaaataaaaaaaaaaaataataaattgttaaatttatgaaatttttaaattgatatatggtaattattttttattaaatataaaatttttaataaatatggtatttattgggaagtagagggaagaggttagaggagttttggaaggttaaggagttaattaagagtaaaattatttaagttattaatttaggattaaatgttttgaaggaaataaagtttatttttgatatttagatagagaaatttgagtaagagaatttaagttgaagattttaatgttttttttttagtgaggaagttttgttattaggttagttggtttttgagaggttaagatgttatatttattattatttttaaaaaggtattgggagtggaggagagggaaggtattagggttttttatttggatttttagtttttaagatttttttattttttagttgttattaatttatttttggttttatatgtattaaagtaatagttggggaaggtaattaagagtttaataggttcgggcgtggtggtttatatttgtaattttagtattttgggaggttaaggcgggtagattatttaaggttaggagtttgagattagtttgattaatatggagaaaattcgtttttattaaaaatataaaaattagttaggcgtggtggtatatgtttgtaattttagtaatttgggaggttgaggtaggagaattatttaaattttggaggttgaggttgtagtcgagatagtattattgtattttagtttgggtgataaaagtaaaattgtgttttaaaaaataaaaataaagagtttaatagaggttaggtatagtggtttatatttgtaatttttgtattttgggaggtaaaagtgggtagattatttgaggtaaggagtttaagattagtttggttaatagggtgaaattttatttattaaaaaaaaaaaaaattagtcggttatggtggagggtgtttgtagttttagttattcgggagtttgaggtagaagaatcgtttgaatttcggaggcggaggttgtagtgagttgagattgcgttattgtattttagtttgggtgatagaatgagattttatattaaaaaaaagaaagtttttatatttagagttattgattattagttattaatgaaatggtttatttttaggttagtagtttttatgggtatagtattattttataaaaaaatattttattttataggattggtgaattattttagggattttttgtgaagattttaattaatgagggttagagggttatagaggggtttttgagtttttaaaataatttggtttgtgaaggtttttgttgggttttttaaatttttaaatttggggttttagtttaagaatattataagatagttttgttttagattatgtttgttttattttggttagttttcgttttgtgtgtttattatttcgaagattttttttatttttaattaggatgatgggtacgttgggatagaaatgtttgatttttggggtttatttttttgggatgttttttgaaagaaaaatgtagagaatttggggatatatataattttattttgaagattttttaagaattttagtgaaattgtagagatattttttttgtggttttagaaaaatgttagatatttaatgaaatttattagttttaaaattataaaaaggaaatataattttttttttttaaatagagaattaatagtttttttttagtttagttaagagtggtgttgagtatttttgtaggtggggttcgagtaagggttttggaggagtaaaagatttataatataaggtagttttacggggggtattttttgttttataaaggtaggtattttataggatatttgttattgttggtagatgattttgatatagtttatagaaggggtttttattttagggtagtagttgatttagggtttatatgttttttttttaatttgtttattaatttttagtataatttttattttatggggtttattggtattttaaatggttgaagagtgatttttggtcgggagcggtggtttatgtttgtaattttagtattttgggaggttaaggtgggcggattatgaggttaggagatcgagattattttggttaatatagtgaaatttcgtttttattaaaaatataaaaaaaattagtcgggtgtagtggtgggtatttgtagttttagttatttaggaggttgaggtaggagaatggtgtgaattcgggaggtagagtttgttatgagttgagatcgcgttattgtatttttgggcgatagagtaagatttcgttttaaataaaaaaaagtgatttttgaaaataattaaaagaggttgggcgtggtgatttatatttgtaattttagtatttttgagaggttaaggtaagtagatagtttgggtttaggagtttaagaatagtttatgtaatatggttaaattttatttttagatagcgtggtggttcgtgtttgtaatttta

SEQ ID NO: 791 - DNA, 6397 bp, Artificial Sequence
  chemically treated genomic DNA (Homo sapiens)
tttatttttatagagaagtagaggtttttttttttaagattttggggtgaggttgggttatgtgttggggttgtgaggatgagttaaggaggttcgtttttggggagagggtgggtattaatttatttatttttgttattttttgtttggaattaaagtagggttgttgggtaaggtacgaggaggtagatttttcgttggggttgttagagaaagtgttaaagggatgagttttgaggatgggttgatggggtgtgtatggtggatggggtagagaatattttatatagtgagtatttagggtcgagtgttgtgagaggtatatagtagttattttggagttaaggaatattagttgggttgtggtttttagagtgttatggaggtatgagttacgttatattaggaagggtagtttatatatagatatttgggttttttattatgggtttgatttagtagttttggttggggtttgggagtttgtatttttattatgttttttaaggtgaggattagttatattaggttatttggtattttaataggtatgtttatagtttatagtatagtttattatttttttttttttacgagttattttttatgtgtattttttgaaatttttagtttttaatttatagagtgagggaagttaagttatttgtttttgttagttagggtttcggtagtttgtagtaggtatttttcggagggcgcggggtgggggtggggagtaaaaaaaaagagtttaatggaggggtttggagaaagtagttgagttgtgggttttagtttgaggttagtaaggagagggagtgaggttagggggtatttgtgtaatttttaaaacgtggtttacggaaggaatagtttagttggtttttcgggttatgtttttgtttggtttggttttttcggtcgtttattattgggggttagaggattagttgttggtcgatgtagtttaggtagatttattgtttggtataggatggaggagtagatagaaattattttttttatttattggagggttttgttataggagatggtttagtatagggtttgggattgggttattttaggagagggagggtttttcgtgtttatttttatgaaggtggtgtttttgttttgattttgttggatgggtttgttttgattttggtaagtttttttaaagtatgtggatttgggaaagtttagtattagtgaagtgatttgtgggattttaattaaggagtttggttgtttttttttatttttttatttttttttagaggtagagagtatagtgattaagggttttgagtaaaaagcggatttatagttgggtattgtggtttacgtttgtaattttagtattttgggaggttaaggtagacggattacgaggttaggagattaagattattttggttaatatagtgaaatcgtatttttattaaaatataaaaaattagttaggtgtggtggtgcgtgtttgtagttttagttattcgggaggttgaggtaggggaattgtttgaatttaggaggtggagattgtagtgagtcgagattacgttattgtattttagtttggcgatagagtgagattttgttttaaaaaaaaaaaaaaaaaaaaatagatttatagggttttttttattttttttttagttttttttataatgggcgaggttgggaaatagatatatagataaataaaaattaatttggagaggaaattaagttaatataatgataaattttttatttttgtttttgtgtttattattttgtatttggtagagcgttattgtttgtttttgaatggtgggtagatatttgtcgtttattttttagttttgttcggatgatttttagtgttatagtggttaattttttttttgttgttttttgtgttttggttttattttataattattattatttgttatattatgaaattttttttggttttttaagataatagattttatgtttgaagtgtttatttattgaattaaagaaggtatatttttgttttgattttggaattttataaataaatgagttatttgttgaaattttgtttttattgttatattttgttatgtaggtttgttagattttaatagtgtttgaggtatagagttgtaagataaaatatagtatttttagttaaattatagataagttataaatatattttaaggataagttttatgaaatatttgttatatatttatattaaaaaattattagttattaattcgaaatttaaatttaattggatattttgtatttgtatttgttaaatttggtgatattgtttagataaggttgttttaaattaggtttgtaagttatttgttttttaaatagatgttttagtggagtttggttggtatttaaaagaggaggtttcgggtaaagtagttatttgatagaggaatgggttttatattttatagtgtataggaagtacgtaaggggtttgttaatttgtagggttttagggttttttgtaggataggtttggagtagggttgtgtaggttttgggtgatttggaggttggttttatttattttttgaaatacgtggggtagtatgttttttgaatgtagttttttagtgtttgtgggattaatttaatagtaatatttgtattagtagtatgtagtaattatttatatatatagtagtaaatattttagatgagatgttttaataatttaagtaaattttgaaattgttttgatgtttgtttggaagaaaatgattaaggaatttatataaaagaagtaagaggggaaatgttttgttgatgagaaaatacgttggtaggttgtgagaatggaaaatgtaggattgtcggttcgggagcgggtagttttgtggaatcggtgaggaggtggttgagaaatatttggatgtgtgtaagattataatacgtgagtagggtgattattttttaaattagataaaaggaaggtttgggtgttaagtgggtttggtagaattgattaattatttttggggggaaggagttattgtattttttttttttttattattttttaaaataaatgttaggaagaggaaagagtaatatattaagttagaagaggaattagagtaaaatataaatgaaggttttttagtttttttgatagaagttgtaaattatttttacggttaaatgatgagttaaaaagataaggttaataaatttgattatattggattatatttttaagaattaaaagtataattaaatttaaagatatgtaaagtgggaaaaatatttgttataaatgtgaatgaatttatttgtttattgcgtaaaaagttcgttatgggagaagtggaagtaagtcggtgtttagtaatagagggttgggaggttagcgggttattagggatgggtgtttatttagggtttagtttggtttgttttttattataaatagatgagtagattgatttagagaatttaggtaattggttttaaatttttagttgatgagtattagggttgtgatttatttatggatattttttattgggaattttttgtgtttttaggatttagtttagttgatttgttaaaggatagtttaaaagaagaaatataaaggtttaattcgtttatgaaaaatgtttaattttagtattatagatttgtatattaaaattatagggtggggttattgtttatttttggaattagttagaaaaaaattttagaaaaataaatagttattggttggtttgggtgttatgaaataggcggttgtttttatttcgggtagaagggtgagtgtgtgaagaagagtttgattgtgtgtatttagaattttaaaaaagtgtacgtggtttttggtttagtttttttatttttagggattttaagtaaataattagaaatgtggataaagttttgtgttcgaaggtgtttatttgattattatttatgttgtttgaaagttgaaaataattatagagtgtttattagagtagtttagaatatgaaaaaaatagtatttattgaagttttaaaatagttgaagatagggataggaaaatataattatttatataattttattttaatagtgtttagttgtgtataataaaggtgtaaagattacgggaatgttattattttattgttgtatgatttaggttaattttttatttattttaggttagatatttatataaaaattttttttgtatggattgttgtaaaatttagaaaagaggaaaaatattttagatgttaaagagtagattgggtgggaaatgttggttatggaattgtagaaattagatgggggatggttgaatttgaggggttggggttgggaggtattatttttttagatagttaggggagtatagttttttttttagcgtttgttgcggaggtttttggggattttgttttttttttttagatattgtgtgttttaaattgtttttttttttttttttagtggaaagtttatatttttaataatttgtatttttattagtaggatattggtgaaatgaattatattatatttttatttggtggggtatattagagtgttgatggagatgattgttggtttgaaaaattttaaaaacgatattaaaatataatatgtggaagataattatgatttagtgtttattaggattatttgtaatttttatgtgatttaaatagagtatgtatgttttttataaataatttaaatattgtatagatgtatatggtagtttttgtttttgttattttgataaaaagagaggtttcgttttaattttttgtttattttttagtatataaaaatataaatttttatatttagtaagttttatatttgcgattaaaaaatgaaaagaaagttattttttttgaaaggggaaaaagagagaagttggtgaaaatgttttttttttttagggttttgttcgttttattttgttttttttagatattttggaggaaggtgtgaacgtaattttgttttttagggaataaatattttttttttaagtggtagatgtgggtgagttgattttgttggagtttgttttttgggttattttttgtttttttttattgtgagtggttcgtgaagtatagcgttgattagatttaaatttgtttgtttttaggttagtgtgtacgtagtagagaagtgagtatttattttattttatgcgtgagtaaggagggttttgggtagagaaattgtttgttgggaagtatttaggtagaaattaagagttatatttttaaggtttgttgtttgggtattttgttgaaattaatgtgttttttgagttttttgggtagtttgggtattgtagagtggtgggaaggagtgtggattttgtagttcgagatttagaatagtcgggatttattgggtgatgagggttgtgagggtaatttatttttttatgttttagtggtcgtttttgtggcgagagtttcgtttggtagagggagttgtgtgtgtatgttggttgtcgttagtatttcgtatgttggatgttttacgtgttttagtttgtaatttggaaggttttttttgtatgaataggagggaatttgttgaagttaattatgatatttgtgataatgtattaatattagtagttttggggtatattttatatttttggtatagtttaaatttttttaattatagtagtggtatatatgtattataaagatgttaaagatttttataaatttataagagaaaatagatatttttttattttaagttagttattgataatatttttttttttatatttgaatgtattttttattggtttttggttttatgtaggtgtgtttttagaattatgggtttaggattataatattgttgttttatattttgtttgaaagtgttgtttttatattaatgtttaaaaaaatgttattgagttttttaatattttgtagagggaattatttataaaatattttttagatgtttttgttttaggtaatagaacgtttagtatttgattatttgtagttgttatagaaaatgtatgtgttttatggaatgttaattatttttatttattgtttaaattggagtagttggtaataattttttttgaattgttatttagggaaagttatttaagtttaaatataggagtaatttttaatttttttgttaaatagtttgtatttttttatgattagttttttttatgtagtttgtttttaataattattattgaaaatggaaaaagtaagtaagtggaaaggaagtaaggaattgaggaagaaaggaaatgttggggaagttgggtgttgaaaagagtgggatgttttttgtgaatttatagtttttttgttgcggttttgtttttttagg

SEQ ID NO: 792 - DNA, 6397 bp, Artificial Sequence
  chemically treated genomic DNA (Homo sapiens)
tttaaaaaaataggatcgtagtagaaaggttgtgagtttataagaagtattttattttttttaatatttagtttttttagtatttttttttttttttaattttttattttttttttatttatttattttttttatttttaatgatagttgttgaaaatagattgtataagggaagttaattatgaaaaggtgtaagttgtttggtaaaggagttaaaagttatttttgtgtttgggtttaaatagttttttttgaatagtaatttaaagagaattattgttaattgttttaatttaggtagtgaatagaaataattaatattttatggaatatatgtattttttgtaataattataggtaattaagtgttgggcgttttattatttgggatagaaatatttagagagtgttttataaatggttttttttataaaatgttaaggagtttagtggtatttttttagatattagtgtgagaataatatttttaggtaaaatgtaaaatagtaatattatgattttaagtttataattttagaaatatatttgtatgggattagaagttaatgaaagatatatttaaatgtggggaaagaaatattattagtgattaatttggggtagagagatgtttgtttttttttatagatttataaaaatttttgatatttttatgatgtatatgtattattattgtaattagaaaggtttgaattgtgttaaaagtataagatgtgttttagaattattaatattaatatattgttataaatattatagttgattttagtaaatttttttttatttatgtaaaagagattttttagattgtaaattgaagtacgtgaaatatttaatatgcgaggtgttggcgatagttaatatgtatatatagttttttttgttaagcggggttttcgttatagaggcggttattgaggtatgggaaggtgagttatttttataatttttattatttagtgggtttcggttgttttgggtttcgaattatagagtttatatttttttttattattttgtagtgtttaaattgtttaagaaatttaaaaggtatattgattttaataaggtgtttaagtagtaggttttgggaatgtgatttttaatttttgtttgaatgttttttagtaagtagtttttttgtttagagttttttttgtttacgtatgaaatgggatggatgtttatttttttgttgcgtgtatattgatttgggagtaaataggtttaggtttggttaacgttgtgttttacggattatttataatggggggaagtagagggtagtttaggggatagattttagtagggttagtttatttatatttattatttagaaggaggatgtttgttttttgggaggtaaagttgcgtttatatttttttttagaatatttggagaaaataaaataaaacgaataaagttttaaggaagggagatatttttattagtttttttttttttttttttttaaaagaaatagttttttttttattttttaatcgtagatgtaaaatttgttaagtataaaaatttatatttttgtatgttaaaaaatgaataaaaaattaaaacggaatttttttttttattagaataataaaaataaaaattattatgtgtatttgtgtaatgtttgaattatttgtagagaatatgtatattttatttgagttatatggggattataaatgattttgataaatattgaattataattattttttatatattgtgttttaatatcgtttttgaaattttttaggttaataattatttttattagtattttagtgtattttattaagtagaagtgtagtgtaatttattttattaatattttattaatgaaaatataggttgttggaaatgtaagttttttattaagaaagaggggaaagatagtttggagtatatagtgtttgggaggaaagggtaaggtttttaagaattttcgtaataggcgttgaggagggagttgtgtttttttggttatttgagagggtggtattttttagttttagttttttaagtttagttattttttatttagtttttgtaattttatggttaatattttttatttagtttgttttttggtatttgaaatatttttttttttttttgaattttataataatttatgtaaagaaaatttttatataaatatttaatttagagtagatagaaaattagtttaaattatataatagtgggataatagtattttcgtggtttttgtatttttgttgtatataattagatattgttgaagtgagattgtgtaaataattgtgtttttttgtttttgtttttaattattttaaaattttagtaaatattattttttttatattttagattattttagtagatattttgtagttgtttttaatttttagatagtataaataatgattaaataaatattttcgagtataaaattttgtttatatttttgattatttgtttaggatttttagaagtagaaggattaggttagaggttacgtgtatttttttaagattttagatatatatagttaaatttttttttatatatttatttttttattcggagtggaggtaatcgtttgttttataatatttaagttagttagtgattgtttatttttttggaatttttttttggttaattttagaggtaagtagtggttttattttgtggttttaatatgtaggtttataatgttgaggttgaatattttttataagcgaattagatttttatatttttttttttgggttattttttaataggttagttagattagattttgagggtataaggggtttttagtaaaaaatgtttatgaatgaattataattttgatatttattagttaagggtttggggttagttatttggattttttgagttaatttgtttatttgtttatgatggaaaataagttaggttgagttttgggtgagtatttatttttggtggttcgttggttttttaattttttgttattgaatatcgatttgtttttattttttttatgacgagttttttacgtagtaggtaagtaagtttatttatatttgtagtaaatgttttttttattttgtatgtttttaaatttaattatatttttgatttttaaaagtataatttaatgtagttaagtttattgattttatttttttggtttattatttaatcgtgaaaatgatttgtagtttttattaagaaaattgaaaaatttttatttgtgttttattttgattttttttttgatttgatgtattatttttttttttttttgatatttattttggaggatagtaaaaggagagaaaatataatgattttttttttttaaaagtagttgattagttttattaggtttatttagtatttaagttttttttttgtttgatttgggaggtggttattttgtttacgtgttataattttatatatatttaagtgttttttagttatttttttatcggttttatagagttgttcgttttcgggtcggtaattttatattttttatttttatagtttgttaacgtgtttttttattagtagaatatttttttttttgttttttttatatgaattttttagttatttttttttaagtaaatattaaaatagttttaaagtttgtttaaattattaaaatattttatttgaaatatttattgttatgtatgtgaataattattatatattgttaatataaatgttgttattgggttgattttataagtattgagagattatatttagaagatatgttattttacgtattttaaagggtgggtgggattagtttttagattatttagggtttgtatagttttgttttaggtttgttttgtaaggagttttaaggttttgtaggttaataagttttttgcgtgttttttgtgtattgtgaggtatgaggtttatttttttgttagatgattgttttgttcgagatttttttttttaagtgttaattaggttttattgagatatttatttagaagataagtaatttgtaaatttaatttaaggtaattttgtttaaatagtgttattagatttagtaaatataaatataggatgtttaattaaatttgaatttcggattaataattaataattttttggtataagtatgtggtaaatattttatgagatttatttttaaaatgtatttgtagtttatttgtaatttaattggagatattatattttattttgtaattttatgttttaaatattgttaaaatttgataggtttgtatgataaagtatggtagtaagaataaaattttaataagtggtttatttgtttatgaaattttaaggttaaaatagaaatgtattttttttaatttaatagatagatattttagatatgaagtttgttgttttgagaagttaagaaagattttatggtatgataaatgatggtgattgtaaaataaagttaaaatataaaaggtagtagggaaaaagttagttattgtggtattaaagattattcggatagagttggaaggtaagcggtaaatgtttatttattatttagaggtaaatagtggcgttttgttaggtgtagggtaatgaatatagggataagaataaaaggtttattattgtgttagtttggttttttttttaggttagtttttgtttgtttgtgtgtttgttttttagtttcgtttattgtgggaaggattgggaagggaatgggggaggttttgtgagtttgtttttttttttttttttttttgagatagagttttattttgtcgttaggttggagtgtagtggcgtgatttcggtttattgtaatttttattttttgggtttaagtaatttttttgttttagtttttcgagtagttgggattataggtacgtattattatatttggttaattttttgtattttagtagagatgcggttttattatgttggttaggatggttttgattttttgatttcgtgattcgtttgttttggttttttaaagtgttgggattataggcgtgagttatagtatttagttgtgagttcgttttttatttagagtttttaattattatgttttttatttttaggggaaggtgaaaggatgggagagggtagttaagttttttaattaaagttttataggttattttattaatgttgaatttttttaaatttatatgttttagaaaaatttgttaaagttagaataagtttatttagtaagattagggtagaaatattatttttataaagatgaatacgagaagtttttttttttttagggtgatttagttttaggttttgtgttgagttattttttgtaatagagttttttagtgggtgaggagaatggtttttgtttgtttttttattttgtgttaggtagtgagtttgtttgagttgtatcgattaatagttggttttttggtttttagtggtgggcggtcgagggagttaggttaggtaggaatatggttcgggaggttagttgggttgtttttttcgtaagttacgttttggggattgtataaatgttttttggttttattttttttttttgttggttttaggttgggatttataatttagttgttttttttagatttttttattaaattttttttttttgttttttatttttatttcgcgtttttcggagggtgtttgttgtagattgtcgagattttggttaatagaggtaggtggtttaattttttttattttgtggattaagggttggaggttttaaagagtatatataaaaagtgattcgtgggaggaagaaaatggtgagttgtgttgtggattgtgggtatgtttgttagggtattaggtggtttggtgtggttggtttttattttggagaatatggtagaaatgtaggtttttaggttttagttagagttgttaagttaggtttatgatgggggatttaggtgtttatgtgtgaattgttttttttaatgtaacgtggtttatatttttatggtattttaggagttataatttagttggtgttttttgattttaaagtgattgttgtatgttttttatagtattcggttttgggtgtttattatgtagaatgttttttattttatttattatgtatattttattaatttatttttaaggtttatttttttggtattttttttgataattttaacgaaaagtttattttttcgtattttatttagtagttttgttttaattttaagtaggaagtaataagggtgaatggattggtgtttattttttttttagaaacgggtttttttgatttatttttataattttagtatatggtttagttttattttaagattttggggagagaagtttttgtttttttgtgaggataga

SEQ ID NO: 793 - DNA, 6123 bp, Artificial Sequence
  chemically treated genomic DNA (Homo sapiens)
ttgaggaagtatatttattttaatcggtattcgtattaagagtttttgaaaaaatttggagggcgttttattagggtaaggagtgggtagtgttattagggtggattataaattttaagaatttttaacgaattatattttttgatatttttatttttaaggagatagagtttttttattaaataatacgatcgagttgaggttttttagagaataatttttaatttaggtaatggggaatattagaaaatttattattagtagttttttggtaatgtatagattattttttatcgtttatttatttttatattgtaagtattttgttattagaaattattttatggattgatgattatttttattttacgagagatgattggtttatttgagttttaattagttagtttagttattgaaataaatgtaattgtattttaattttgatttgttttagtttattattttttaattttatagagtttatttttgtaattattaaggtagtttattaatttttagtggttttaaaaatttttgagttaaataaataataaaaaattgaaatgtataagagtaaggtgatagagaattgagtaatgtttggaagttttatttgtttgtttttttttatttaaatttattgaaaattatataggttgaaatttaaaaaaaaaagttttgggatatgtaaatttattttattttaatttgttaattaagatatatttattttagtgtttaaaaattaattaaaattttaaatgttattaattattaatgtagtagaatgttgttggaatagttgataatgtgtttagaattataagggatattatagtatgtatagttaagaagagtgagttgtaagtatgtaatagtgtgattttaattgaaatttgatttagttttgattttattttttgagatttttaatgttatgtataaataggttgtttgttttagttaaattgttatgtaataggttatttgtatggaataataggttaggtgttattataagatgaggttttttaaatgttatataatagtaggattttcgtgataagttaagtggaatttttagtaagaattttatgtgaaaaatttaaatatagttatggtatgtaagaatttttgaaatatttttgaaatttaggttgttttggggtatgtatttgttgtttttagtaaaaggtataggtattgtttttttaaatgttgtgttataaagattattatatatttttttatattttagtaggtggtagttaattagaataagatttatttttattggtagaataggaaattaaaattgttttttaagtaatagtgtttaagaataagaggttattagtatttgtaaatataaaaatatagtgaaagatgaagttagtgggtttttttgttattgttggaagaagttttgtattaatatgatatgtatttttttttttgttaatttattataggtttgatatttgtgttagttttttatgatttttttgaggtatatttttaaatatagtttttttttgggtgtgcgtgtatgtgtgtttttgtagtttgttatttttgttttgattttggaatttatagagttttggtttatagaaataaagagtgttatatggttaaaatgaggaaaaaaatgagattatagaataaaatatataaattttattaagtatatataattgtttgatatttaatagtagtagtttttttttttttttaaggaagaagtaaattatagaattgatataatttttaaaagggttaaatttagttagtgaaatattgtgtaaggaatttattaattttttatataattttagaattatgatgtgtggtattagtattggggagaaatttgtaataattttaaaattgttatatgttaaggtattaattatgttattaaattattttattgtagtatagggatgtaaatttagtattttttttttttttaggaagtgagtgagtttaatgtgaaagaataagaattaattttattattttagtaatagatggaaatttggaggtggagaattgaaagtgataattaattgtatatttaaaaaatgtttttagttattgaatattgatagtatgttatttggtattttgaattgtggtttttttagtaatttttttttgtattgataattaagtagtttagtgtttatgaggaattttataattaatataagtagtttttttaatagtatgttttattataaaaaaagataattatattttgggtttattaagtaattgtattgaaaaatatatataatatagttgataaaatagtttttttgataatgtgaataatgtaataattttaatttttttattttgtgtagtagaaatttatatattgttatttaaatattatgttagttatttattgtgttatttttaatgtattattttagaataatgaatgttaggagcgttgttcgtggttttgaagaaaggtcgtttttagttttttagaagtttaattggataggtggaattgttgtttgttgtgttaaagttttttaattgagttgatggatgtaaatgaatttaatttattatatgtgtaaaattggttttttggggattaattaatattaaaaaagtataattttttaattgtttaatttattgtgtaataattttatgaatatagaggtttgattttttatttttttaattagatatttaaataattttttaaaataaatagtttagaatattagttttaagtgtaaaagttgtaattataatgtaaaatgttattatattaatggaatatatgaataaagagatgtggtatattttgtttttttaggttttaataaatgttagttatattgtgaaattttagtattttgattagttataataaaatatgttatttttaggtagtagatattagttatattggtagataaaaatgtgaaggattattttttttttttggtagttattattatttttgttaggattaaaaagaaaatgaataaatagaatggaataaatgagatagtaaatagaagatagaacgtgttgggttgtgtatgtgttttataagagatattttaaatatggattgaaggagtcgttagatatttttggttttagtattaggtgttttttttaaggtgttcgaatagtcgaattatttgattgaattgtttgttatattgtagaattagttatttatgatatttatttttgatattgtagttattgtttttattttaaaaaaaattaatgttatttaatgtttttgtaaaatgtagatttttttttaaattagtattttataatattttaagaaaatttaaattaaaaaatcgttgtaaggaaatgaaaatattatagtgtttttttgttgtttggaggaaaaaatagtaagtcgaatatttatattatttatattattttttatttaaaaattagtttttagataggatatttttttgtgagatttaatttatgttttgttagttggttatgaaaaatagattaatgataagatataggtttaatagtttgttttttgtgatgtttaattttttaaaaatgttgataatatatatttattatataagttagttttatttagtgtaaaatattaaaattgtatatttttaataaatagatagaatattatttattttaataataaaaatgtatttttatgttgaaagaaattttatttttgtattttattttttgaataaatttttaacgaaagttaagagagttattatttagtgattttaaatatttttattagaaaattagtaaatgataagatagttttagaggaatttgtaatatttaatgtcgtttatgttatgattttatattttgtttttttaggaaaaagaatgtttaaaaaattaaaatacgaagaaatttgggtataaattattgaaggttttagagtttgttgtatttatttaaatattattgtttttatatatgtataattattttttttgagtttaaaaaatgggtggaaaatttaatttttttattttaatttgagattttttttataaaagtttattgaagaaattttttttatttttgggtagtaattaaggaatattttagttaagtttttaaagagtgggtttatttttttaattgtattttaatttatatttatttttggttaaaataaaagtataaataagatttttttaatttaattataagttagatttgtagtaaattttttcgttttagattatttttttttttatagtttttagataaattgattttgatttagttagtaatttaatgaaatttattagttgattgtaagaagttcgtttatatatattagttatttttttagtaaatatttatggaaaataaaagtaatgttttttttataaataaattttattttttttttgtaatttaaggcgggttgttagatcggttgtataatagatattggggagtttattggtcgggagttttaagaggagagtagttattttagttttttttatttaattttggttttacgttagaagttgtgtagtagtgtagtagaatagggtttggtaaaatttttgttagtaaagcgttttttgtgtcgggttgtggttcgttatcgatatttcgttcgttattaaggttgggttttttattgatttttttttttttttgtttttataggttcgcgcggtcggatattgtgggtgtgcgtgttggatttttttcggatgtttttcgattaatatggatgttttattattttttgtagtggaaggttgttttttggcgtagtgagtgaagaatatgtagcgattgttaatgggtttgggaagcggagatttttttttttttttatgattatgtcgtgatcgtgtttgcggttattattcgacgtatttttatttttattcgaatttaggagtcgaacgttagatcggggaagtgggtgtcgtgcgtgtgggtatagaaatattatgaagattattttttcgattttaagtaatttagtttttaggcgtatcgttaaatttttgttttgtttattgtggattggatatttttaaggaattatatatgtattaagatttggtaagattttttattttttttggttgtttggtattcgtttttaggtagtcggatgtaaataggcggttcgttttgtttggcggtgggtttcgtggattttgatttgtttattgttttgtcgttttttggggtttttaaagaattttttgtgtttttatttttttttttttttatttttatttttagtcgcgggagggtgaagggagggttaatgtgtggtagtggtttttgtattatttttttatagtagtttgttacggagatgatgatgacgatggaggtacggttagtcgttattttcgtttgtttttttcggcgttttgcgagtttggaggggtgcgcggttcgcgtaaaagtgcgcgtcggggttgtacgttttttagtttgcggggttggtgagttaatatttggtaattttttggcgagttgcgtttgttcgttttcgttagtgattagggtagtttttacgtgtaaatgaaaggtattaatttttttgatttttttttttagagagttttttcgattgtttttatcgtttttttagtttttggtgtttttattgggatgtagagttttaaaaaatgttttaagattcgaggttttatttaatatagggaggttgttatttagttggaacgaaatagcgttaaaattagaacggtattttgtttgtttttaatttgttgagttttttttttatagttttttggacgttatggattaattaatgaaggatagtatttggggcggtggggaagagtagttgtttaaggagggttgattaagtttgtattttttattttggtaagacgaaagacgttaggtagttatatttttttatggaaatgtattgtttttttaagaattagggtttttttggagtttgaaggaaaatttaaacgtgggattttagtggaaattttggttagagggttagagtgattgtttggagaaaatgaagcgtgggcgatgtttaggttttttggatggttaaaggagttttagtag

SEQ ID NO: 794 - DNA, 6123 bp, Artificial Sequence
  chemically treated genomic DNA (Homo sapiens)
ttattaaaatttttttggttatttagagaatttgagtatcgtttacgttttattttttttaagtaattattttgattttttgattagggtttttattggaattttacgtttagatttttttttaagttttaaagaaattttgatttttagaaaagtaatatatttttataaaaaaatgtaattatttaacgtttttcgttttgttaaagtgaaagatgtagatttagttaattttttttaaataattatttttttttatcgttttagatattattttttattaattagtttataacgtttagaaagttgtgagagggggatttagtaagttaaaaataaataaaatgtcgttttaattttgacgttatttcgttttagttaagtagtagtttttttgtgttaagtagaatttcgaattttagaatattttttaaagttttgtattttagtaagggtattagggattggaaaagcggtgaaaataatcgaaaaggttttttggaaaaagaaattaaaagggttagtattttttatttgtacgtgagaattgttttggttattggcggaagcggataggcgtaattcgttaaagagttattaggtgttaatttattagtttcgtaagttgagaggcgtgtagtttcggcgcgtatttttgcgcggatcgcgtatttttttaagttcgtagggcgtcgggggagataggcgggagtggcggttgatcgtgtttttatcgttattattattttcgtggtaagttattgtggggaggtaatgtagagattattattatatattggttttttttttattttttcgcggttaaaaataaaaataaagaagagaagaaatgaaagtataaggagttttttaaaagttttaggagacgatagagtagtgagtagattagaatttacggagtttatcgttaggtagagcgaatcgtttgtttatattcggttgtttgggagcggatattaggtaattaagagagatggggaattttattaaattttaatatatgtgtggttttttgagaatatttaatttatagtaaatagagtaggagtttaacggtgcgtttgaagattggattatttagaatcgggaaaataatttttatggtgtttttgtgtttatacgtacggtatttattttttcgatttagcgttcggtttttgggttcgggtagaaatgaggatgcgtcgagtggtgatcgtagatacgattacggtatggttatagagagaggaaggagttttcgttttttaaatttattagtaatcgttgtatgttttttatttattgcgttaaggaataattttttattgtaaggaatggtgggatatttatgttagtcggagagtattcgggagaaatttagtacgtatatttataatgttcggtcgcgcgagtttgtgaaagtagaggaggagggaaattagtaggaaatttagttttggtaacggacgagatgtcgatagcgagttatagttcggtataaaaggcgttttgttagtaaaggttttgttaggttttattttattgtattgttgtatagtttttgacgtgaagttaagattaagtgagaaagattgagatagttgttttttttttaaggttttcggttagtgagttttttaatatttattatgtaatcgatttgatagttcgttttgagttgtaagaaagaagtaggatttatttatggggagaatattgtttttattttttatgagtatttgttgagagaatgattggtgtatgtaagcggattttttataattaattgatgaattttattaaattattagttaaattaaagttagtttgtttgggaattgtaaaaaagaaagtgatttaagacggaggaatttattgtaaatttaatttgtggttagattgaaagagttttatttatatttttattttgattaggaatgaatatagattggaatgtaattggagaggtaaatttattttttaaaaatttgattggggtattttttgattgttatttagaagtaggagaaatttttttagtgaatttttatgggagaaattttaaattaaaatggagaagttaaattttttatttattttttaagtttaaagaaaataattgtgtatatataaaaataatgatgtttgaatgggtgtagtaaattttaaagtttttaataatttatgtttaaattttttcgtattttggttttttgaatatttttttttttaaagaggtagaatatgagattatagtatgagcgatattgagtgttatagatttttttaaaattgttttattatttgttagttttttggtaggaatatttagagttattaggtagtgatttttttggttttcgttaggagtttatttaagaaataaagtatagaaatagaattttttttaatataaaaatatatttttattattaaaataagtaatattttgtttatttattaaaaatatataattttaatattttatattaagtaaaattaatttgtataataaatatatattgttaatatttttaaaagattaaatattataaaaggtaaattgttggatttatattttattattaatttattttttataattaattaatagggtataggttaaattttataaaaaaatattttatttgaaggttaatttttaaataaggagtgatatgagtgatatgaatattcgatttgttatttttttttttaaatagtaagaaaatattgtaatgtttttatttttttatagcgattttttaatttaaatttttttaagatattataaagtgttaatttaaagagaaatttatattttgtaaaggtattaagtggtattgattttttttaagatggaggtaataattgtagtgttaaaaataagtattatgaatggttagttttgtagtatagtaggtaatttaattaaataattcgattgttcgagtattttaaaaggaatatttagtgttaaaattaagggtatttagcgatttttttagtttatgtttaaaatattttttataaaatatatatatagtttaatacgttttgttttttatttgttgttttatttattttattttgtttgtttattttttttttgattttagtagagataataatgattgttaggggaaaaaaataattttttatatttttatttgttaatataattgatatttattatttgaaaatagtatgttttattgtgattaattaaaatattgaaattttatagtgtagttggtatttattggaatttgagaaaataaaatgtattatatttttttgtttatgtattttattaatataatgatattttatattatggttgtaatttttgtatttgaaattagtattttaaattatttattttggggggttatttggatgtttagttggaaaagtgaaagattaagtttttatatttatgaagttattatataataaattaaatagttaaaagattgtatttttttaatattaattgatttttaaagaattaattttgtatatatggtaaattagatttatttatatttattaatttagttgaaaggttttagtataatagatagtaattttatttgtttagttgaatttttaaaagattggagacgatttttttttaggattacggatagcgtttttggtatttattattttggagtagtatattgaaagtagtataataaataattaatatgatatttgagtgataatgtgtaaatttttattatatagagtaaaggaattggaattattgtattgtttatattattaagaggattattttattaattgtgttgtgtgtattttttagtgtaattgtttgataagtttaagatgtagttatttttttttgtaatagggtatattgttaaaaaaattatttatattaattgtgagattttttatgaatattaaattatttgattgttagtataaaaaaaaattgttagaaagattataatttagaatgttaaataatatgttgttaatatttagtggttaaagatattttttaaatgtataattagttattatttttaattttttatttttagatttttatttgttattagggtaatgagattaatttttgtttttttatattaaatttatttattttttggggggggggggaatgttaaatttatatttttatattataataaaatgatttggtggtatagttgatgttttaatatgtggtaattttgaagttattataagtttttttttaatattgatattatatattatagttttgaggttatatgaaggattaataaattttttatatagtattttattgattagatttaatttttttaaaaattgtgttagttttgtaatttgttttttttttaaaggaaagagaaaattattgttattggatattaggtaattatatatatttagtaagatttatatattttattttatggttttatttttttttttattttaattatatggtattttttatttttatgagttaaagttttgtagattttaaggttaaagtagagataataaattgtaaaaatatatatatacgtatatttagagagaagttgtatttagaagtatattttaaaaaaattatagaaggttgatataaatattaaatttatgataaattgataaagaagaaaatgtatattatgttaatgtaaagttttttttaataataataaaaaaatttattagttttattttttattatatttttatatttgtagatattaatgattttttatttttgggtattattatttgagaaataattttagttttttattttgttagtgaaaatgaattttattttagttagttgttatttgttggggtatgagaaaatgtgtaataatttttatagtataatatttaaaaagataatgtttatattttttgttggaaatagtaaatatatattttagaataatttgaattttaaagatgttttaaaggtttttatatgttatagttatatttaaattttttatatggaatttttattaaggattttatttgatttgttacggaagttttgttgttatgtgatatttgaaaaattttattttatagtaatatttaatttattattttatgtaagtggtttgttgtatagtaatttagttaaaataaatagtttgtttatatatggtattaaagattttagagaataaagttaggattgagttaggttttagttgaaattatattgttgtatatttgtaatttattttttttaattatgtatgttgtggtattttttatgattttgaatatattattagttgttttagtaatattttgttgtattgatgattaatgatatttagagttttgattaatttttagatattaaaataagtgtattttaattaataaattgaagtggaataaatttatatattttagaatttttttttttaaattttagtttgtgtgatttttaatgggtttaaataggagaaaataaatagataagatttttaaatattgtttaattttttattattttgtttttgtgtattttaattttttgttgtttgtttgatttaaaagtttttaaggttattggaagttgataggttgttttggtggttataggaatagattttataaagttagaaagtaatgaattaagataaattaagattgaaatataattgtatttattttagtaattaaattgattaattaagatttaaatgaattaattatttttcgtgaaatgaaaataattattaatttataagataatttttgatgatagaatatttatagtatggagatgaataaacgatagaagataatttgtgtattattaaaaggttattaatagtaagttttttaatattttttattgtttaaattggaaattattttttaaggagttttagttcggtcgtgttgtttggtaaagaaattttatttttttaaaggtaaaaatattagaggatgtggttcgttaaaagtttttgaggtttatgatttattttggtaatattgtttattttttattttaatgggacgttttttaagtttttttagaagtttttaatacgggtgtcggttaaaataaatatatttttttag

SEQ ID NO: 795 - DNA, 5278 bp, Artificial Sequence
  chemically treated genomic DNA (Homo sapiens)
ttattggatattttttgagaaatgatgtagaatgtttgtttaaagtatgaaaaatgggaaaatatgtattttttgtttttggttttttttgcgaaagggatgttatatggtagtaatagagaaatattgggttagtgagtgaaaaatatttgatgtagttgaggtagggagttgttaggtgatatttgtaggtagtagagtgttatagtaatgatagataaataggtttagaaaatatgagtttttagatttgattgttaattatgaaagtttttatagtgattttaggtaaaatggaatttagttattaaagtttttatttttaaaggtttttttatttttttaagaattgttgtttgtatacgtttaaagattgcgtaaaatttcgttatttaatttttgaaaaaaattagtttggaggaatatttgttttaataagataatgaatttgtttatttttttaggttatagtatttttgtgtttataaattttgaattttggtttatgcggattttattgatataagtggtatattaaggaggaaataataataaaaaattttttttattttaatttatttatataaaatgtgattttgatgaaaatttttttgagttaagttttgtttaatttgcggatgtttattgttttttgatatgtttaattcgttttatttttttggtagtttttgtggagttttgttttttttgagcgtttttattgcgttagttttgggttgggttttgagatgattatagtagaaatatttgtgtttttttttagttattagaattagatgagagatttgggtagtatgattaatgatgaaggtaaattatttaattttatgaaatatgatgaagtgtttaaattcggtagtagatattttggatttttatatttgaataaataggtattaaacgaaaatttagttttttttttaaaagttagtagatgaaatacgtatggttatttaattttggtggtattttaaatgaatttagaaagagaaattttttaaaaaataaattattttaaaaaaagaaattaaaaaataaaaaaattattttgaaataattttaagtttataaaagttgtaaagttaatatagtatttgtgtattttttatttatttttttttaaagtgaatattttataatattatggtatattcgttaaagttaagaaattatcgttgatatattatttttaattgaattgtagattttatttgggttttgttagtttttttattaatattttttttttgttttagaatgtaaattaaagtattatattgtagtggattgttatgtttttataattttttttggattgtgatggttttttaatttgtttttattttttatgatattgataattttgaagagtattatttagttatttaagattttttgatttaggtttgaagtatgttttttttatgattagatttgggttattaatttttgaaagagtattaaagaggtatgttgtttttgtgatattatattaagggggtatatgatatgtatatgatattatattgatgacgtaaattttttttatttggtatagggcgagtttattaggtttttttatggtaaagttattattttattttttagaattgtgtattttaggaaaatataataagttattttaatgttataggaaagatatgttgttagtgaaataaaattatggagatgtgtgattattttgttgtgtttttatttaagaatatgtaaatttgaattatttaattagggtaataatagattttttaaaattattttatttttgaaagtattaattatatattatagagtgtttttattatagtataatagttaaatgttattttatttgattttgatttttaggtttaaggatgtatgattttaggtaagtgatttaatttttttgtattatagtttttttatttgtaatttaaaattttatagatataataatatttattgatattgtagttattagtataagtataggtttgtttggaagattgaatgagttaatatttgtaaattgtttagaagagtagaaaataaatgttttgttttttgtttcgggtgtagaggtttagtaatttgtttttggtatgtagtagtataattaaggaagtagtatattttttatttattagaattttgtaagtttttataatttagtttttttgttgaagaaaaaaaagtaaatttttagcgatttgtgaatgtttgttttatagataaagtgaagagatattagagaagaaaaatttttttttgtttttttggtttgtataaattttataaaatgagtatatattataattataattagaaaataaaataatatattttttaagttttaaagaattatttttatgtttttggaaattttagttttttattaaattttagaaaaagagtgataataagaggtgtaattatttaaatttttaattatgtatgagttagttatatatttaataaattttagattatatgttattttttattttttattattaatttgaatttttttttaatttttttgattttttttttagagttatattgataaatattagagttttttaaaaaaatagttatttttttagtatatttttttaataaataagatgaagattattatatttaaagtttttttttatatatatgaagtgattgaaaggtggattataaaataaattaatgatttgtttgaacggtaataaataaaattttatttaagtgtatttcgtggtagagtaaatatttgtttttttttttgaaagtttgatatagaaaattttattttaatttttgtaaatttttagttgagttttttttttaaaaaatttagatttagaagtttgtagtattgattatagtttgaaattgatgaagatatttgggatattgtatttggtttttattgggttaatgtttttttatttattttttttgttaagaaatataagtaattaggaagatgtgaaaagagaaataattgaaaaagattggagtatatatattatttatagtgtttgttttaaagaaataatattttagtatatttttttatttttgattaagattattgtaatgagagtattagtatttttgagtaatcgaaagggtattttggaaattgagtttttggtgtttatatgaatattttgttttttaggatttgttttgatttatttaagatttatattgttgtatatggtgttgtatatattaggggtagttgggtagtagtaattgatatagaaaattttaaatgtaaaaaatattggggagtgaatttttttattatatatatatatatatatatatatatatatatatatatatatatatatatatataaatttatattaggatgagtttttgtttaggtaatgttggaaaacgttatttttattttttttttttaataaatatttaataaatatttataaggtatttaaatttatgttggtttttataaatgttgatttattttttataattattttggggtagaaacggagaggttaaataatttgtaggcgatgttttattattaaatgtaggtggtagttttgtttgtgttttttgtttggttaggaatataggttttatttattgagttgggttgtgtagaattttgttgtggagatatttgtttttggggtagaagtttttgttttttttttttttttttattttattttatgttttagagagttttgaattttatttggagaattatatttaaattttttaaaaatttaatgatgaataaaaataagttttttagaatttttggagaaaaaagtaataaagttattaggttaaatgattgaaatttttgagagaaaataatatgtgtgtgtttttttagaaagggggtttaatattgaatattaggaagttttatagtaaatggaatgtgattttatgtgggattcggcgtttttattttattcgaatgtatgtttgttgttttagtgggaagggtgtttgtatattaggtatttattttttggtgttatgtgttatgtagtttaaagatagaattaggaatggtgagtttatgagtttgttggatttagttttttcgaggttcggagtgataattagtgtcgtatttttagattaaatttgaattttttttatagggaaaagatttttaggggattttgaaagttttaatattttatagggaagaaggaagataagtaggatatgaaagaagagtttatgttatatagttttggtttttattgacgttaatattggatttagtttttgatattgataatttgttgttattaaatggaaaacgtaaataagatattttaagtgtggttagagaatatgtaatataaggaataagtagaatatttttttttggaatttgatataatggattgtatttttatagatagtattgatgttagatgtacgtgaaataggttaaattgaaaataagaaaggttgaggtagagaggataatatagttttagtttattttttagtattttgttaattttttttaatttttagttataaattcgagatataacgttttttttttaaagaggtcgcgttttttttgtggtggtttttagggattcgttttagtttttttttcgtttttagttttatatattgggattattaggtatttaagattttattttttaggtggtatttttagcgtaggttgttatttagtttttttttagggatttggggtagaaggcgaatattttagagttttagagtttataggagttattttgaagggcgaggcgcgggttgtattagtggatttttatattttattcgtattttaagcgttttattttgggggcggggtcgtcgtttttttttcggattcgggatcgatttggaatttcgggaatttttttggttcgggggtttcgggttttttagttttaattatgtataaaaggggttcgcggatttcggagagttatagagttcgggtcgtaggtattttttcgttagttttttcgttttttttatagtcgttagattcgtttgttgagttttatggttcgcgttgtttttttcgtcgtttttagtaattttcggtttttgcgagtggcgttgttgtttttgtttttggtagtcgttggtcggcgcgtagtaggtgggtatcggcgttttggggttttcgggtcggacgcggttggggtaggtatttagcgtcgatagtttcgtttagttagtgagtttttttttttttagg

SEQ ID NO: 796 - DNA, 5278 bp, Artificial Sequence
  chemically treated genomic DNA (Homo sapiens)
tttagggaagaagagatttattgattgagcgaggttgtcggcgttgggtgtttattttagtcgcgttcggttcggggattttagggcgtcggtatttatttgttgcgcgtcggttagcggttattaggagtaggagtagtagcgttattcgtaggagtcggggattgttgggggcggcggagagagtagcgcgggttatggggtttagtaggcgggtttggcggttgtgagaggagcggaagagttggcgaggaggtgtttgcggttcgggttttgtggtttttcgagattcgcgaattttttttatgtatggttggggttggaaagttcggagttttcgggttagggaaattttcggagttttagatcgatttcgagttcggaaggaaggcgacggtttcgtttttagggtggagcgtttggggtgcgggtggggtgtgggggtttattgatgtagttcgcgtttcgttttttagagtaatttttgtggattttgagattttgggatattcgttttttgttttagatttttggaggggggttgagtggtagtttgcgttgaagatattatttgagaggtgggattttgggtgtttggtgattttagtgtgtggggttgggaacggagaaggagttggggcggatttttgagaattattatagagaaggcgcgatttttttggaggaagagcgttgtgtttcggatttgtggttggaggttgagagaaattaataaggtgttgggagataggttggagttatattattttttttgttttagttttttttatttttagtttagtttattttacgtatatttaatattagtgttgtttgtgaaagtatagtttattatgttagattttagagaagaatgttttgtttgttttttgtgttgtatattttttaattatatttagaatattttgtttacgttttttatttggtggtaatagattattagtgttaaaagttgaatttagtgttagcgttagtggaagttagggttgtataatatgaattttttttttatattttgtttatttttttttttttttgtaaaatgttggaatttttaaaattttttggaaattttttttttgtaggaggggtttaggtttgatttagaaatacggtattggttgttatttcggatttcggaggggttgggtttagtaggtttatgggtttattatttttggttttgtttttggattgtatagtatatgatattagggagtgggtatttggtgtgtaagtattttttttattgaagtagtagatatgtattcggatgaaataggaacgtcggattttatatagagttatattttatttattataggattttttggtatttagtattgggttttttttttagagaaatatatatatgttgtttttttttaggaattttagttatttaatttggtagttttattatttttttttttagaagttttagagaatttatttttatttattattaggtttttagagggtttaagtgtgattttttaagtgggatttagagttttttgagatatggagtaagatgggaggagggggaaaaagtagaggtttttgttttaggggtagatgtttttataatagagttttatatagtttagtttaataggtaagatttgtgtttttagttaagtagagaatataggtaaggttgttatttgtatttagtagtgaagtatcgtttgtagattgtttagttttttcgtttttattttaaggtggttatgagaaatgagttaatatttgtaagagttagtatggatttaagtgttttataaatgtttgttaaatatttgttaaaaaaaaaaaatggaaatagcgttttttaatattgtttaaatagaaatttattttgatgtgaatttatatatatatatatatatatatatatatatatatatatatatatatatatatataatggaaaggtttattttttagtgttttttatatttaaaattttttatattagttattgttatttaattatttttaatgtatataatattatatatagtagtatgagttttgaataaattaaggtaggttttggaagatagaatgtttatataaatattaaaagtttagtttttaaaatgttttttcggttatttaggggtattggtgtttttattatagtaattttagttaagggtagaaaggtgtgttagaatgttgtttttttaaaatagatattgtagatagtatatgtattttagttttttttaattatttttttttttatatttttttgattatttatattttttaataggaagaataaatgaaaaagtattgatttaatggagattaaatatagtgttttaaatatttttattagttttaagttgtaattaatgttgtaaatttttaaatttaaattttttaaaaaagaaatttagttgagaatttataaaaattgaaataaaattttttgtattaggtttttagaaaggaagataaatatttattttattacgaggtatatttagatgaaattttatttgttatcgtttagatagattattggtttattttgtagtttattttttaattattttatgtatataaaaagggattttgaatgtaatagtttttattttatttattgaaaagatgtattaaaggaatgattatttttttaaaaaattttagtatttattaatatgattttaagggaaaaattaagaaaattagaggaaggtttaaattagtagtaaggaataggaaatgatatataatttaaagtttattaagtgtgtgattagtttatgtataattgaaagtttgagtgattatattttttattattattttttttttgggatttgatgggaaattgaaatttttagaaatatggaaatgattttttaaaatttgaaaaatgtattgttttgttttttaattgtagttgtaatatatgtttattttataaagtttatataaattaaaaaggtaagaagagattttttttttttaatgtttttttattttgtttatgaaataaatatttataggtcgttgaaaatttgtttttttttttttaataaaggagttaaattataagagtttatagaattttggtaaataaaaaatatgttgtttttttgattatgttgttgtatattaagggtaaattgttaaatttttatattcgaggtaaagggtagagtatttattttttgtttttttaagtagtttataaatattaatttatttagttttttaaataagtttgtgtttgtattgataattatagtattagtagatattgttgtgtttatgagattttaagttgtaaataaagaaattgtggtgtagagaggttaagttatttgtttaaggttatatatttttgagtttggaaattaaagttagataaaatggtatttaattattatattatgataaaaatattttgtgatatataattaatatttttaagagtagaatgattttaaaaaatttgttattgttttagttgaatggtttaaatttatatatttttaaatgaaaatatagtaaaatggttatatatttttataattttgttttattaatagtatattttttttgtggtattgaaatagtttgttatatttttttgaagtatataattttgaaaaataaaatagtaattttgttatgagaaaatttggtaaattcgttttatattaaatgaggaagatttacgttattagtgtgatgttatgtgtatattatgtatttttttgatatgatgttataagaatagtatatttttttggtgtttttttaaaaattaatagtttaagtttaattatgagaaaagtatgttttaaatttaaattaaagaattttaaatggttgagtggtattttttaaaattgttaatgttatgaaaaataagggtagattgaagaattattatagtttagaggaaattatggagatatgataatttattgtagtgtggtattttggtttgtattttgaaatagaaagaggatgttaatggaaaaattggtaaaatttaaataaaatttgtagtttagttaaaagtaatgtgttagcggtggttttttagttttgacgaatatattatgatattgtaaaatgtttattttaaaggaaagtgggtgaaagatatatagatattgtattgattttgtaatttttataaatttaaaattattttaaaataatttttttattttttagtttttttttttaaaatagtttattttttaaaaagtttttttttttgaatttatttagaatgttattaaaattaaatggttatgcgtgttttatttgttagtttttagagaggaaattgaattttcgtttagtgtttgtttgtttaaatatgaaaatttaaaatatttattgtcgagtttggatattttattatgttttataggattaaatagtttgtttttattattaattatgttgtttaaattttttatttagttttggtaattggagaaaaatataagtgtttttgttgtaattattttaggatttaatttaaaattgacgtaatgagagcgtttagggggagtagagttttataggagttgttaagagaatgaagcgaattaagtatgttaagaagtagtgggtattcgtagattagatagaatttgatttaggaaaatttttattaaaattatattttgtgtaaatgaattggaatggaaagaattttttgttgttattttttttttaatatgttatttgtattaatgaaattcgtataaattaaaatttaaaatttataagtataggaatgttgtagtttggaaaaataaataaatttattgttttgttggaataaatgtttttttaagttaattttttttaagagttgaatgacgggattttacgtagtttttaaacgtatgtaagtaataatttttaaagaaatggaggaatttttaaaaatggaagttttggtagttaaattttattttgtttggaattattatggaaatttttataattagtagttaaatttgggagtttatgttttttagatttgtttatttgttattgttgtagtattttgttgtttgtagatgttatttggtagttttttgttttagttgtattaggtattttttatttattagtttaatgtttttttgttgttgttatgtaatatttttttcgtaggagaaattagaggtaaaagatatatgtttttttattttttatgttttgggtagatattttatattattttttagaggatatttagtag

SEQ ID NO: 797 - DNA, 5275 bp, Artificial Sequence
  chemically treated genomic DNA (Homo sapiens)
agataatgtttataaattgggaatttattatatagttatagttttgattaatataataacgttttttgaagggatatttttatttttgggagttttgtttttgtattttgtgtattaaatgtttagttttatatagttatttatttatataagatataaaagtgttataaaataatagttaaattaataatatgtgatgtattatggtatatgtattttaaaattttattttattttatttatatatatatgtgtatgtatatatatattatattttttttaggtggagtttcgttttgttgttaggttggagtgtagaggtgtaattttagtttattgtaattttttttttttaggtttaagttatttttttgttttagttttttaagtagttgggattataggtatttgttattatgttcggttaatttttttttttgtatttttagtagagatagggttttattatgttggttaggatggttttaattttttggttttttgatttgttcgttttggttttttaaagttttgggattataggtatgagttattgtttttttatatttttaaatattggttataatttataaaattgattttatgattttttagtggattatgatttgtagtttatatatattgaaatattgttttagttttttgatgatagattaatttttaatagtttatagtggtatttatttttttattagtgttttttaagatattttaagagttgttagaggtaagatgtttagttagattttttatttacgttattatttgtttttaatttttttttttttataaagatagggttttattattttgtttaggttggttttgaatttttggttttaagtgattttattgttttggttttttagagtgttggaattataggtgtgagatattatttttagtttgtttttaattatattagattttgatatggtgttgggagttgttgggaattttatggaatgaatttgggggttgacggtataataagtaggagattttttgggttgttgggattttggaggttattagttgttattatttttatatgtttgtttggtttttaattaaaattgtattaaatattttaataaatgtattgttttttggtagggttgaaaaataataaaatattttttatagatttaattaagatttttttatatgtttttttttttttttgttatttttttttttgtttagagaaagattggttatgagtttttgagttagatagttttgggtttgaatttaattttatttttaagattttgtattttagtttttttatttataaaataagatttatgatattagttttttaatatttttgaaattattaaaatgatagtatattgaaaaatttaggtattgtatttaattaagaattggaatttaataaataaatattattttttttttttttttttggcgttttatttttagagtatatgtttcgatgagtggtggttataatttttgagttaataagtaatttattaaagaattatagataaggaagaatgtttttttcgtaggattataatttaaagtcggggtgttagagttagtaaggaaaattttagtataatgaatataaattatagtttttaaaaaattataaaagttttatagaatatgttaattgtaatgtttataatattaggaagtatttttaggttttggttattgagagattgttttaattttttagtgaaaaaaataataagaaatatatatagtatgtaattaagttaattatgtatttttttatgtagttagatataataaaggggttgtattattgtttattttgtatgcgtggtagtaaaatttgaaagtaaaggagttattaagtataaatagtgtgaggattaataagttttattatgaattatgttatttgttttttattttgtaattttagagttttatattttaatttttattagatttatttttaaaattagttgtatttttttatttattttttagtttgtttttttagaggagtaagttatatgttggaggttatattagtaaagtttttaaggtaatttacggtaaagtagagttatattatttattttgttgtttaagtaataagaatgttagtggtcggtatggagtagtaagtttatattttgtaggtatattagattgtattagttaaatttgaaaaatataataaaaattaaaggggagaatggaatttaggaaattgtatttttattttagagatagtatttttgagttagtaattgtatgggtttataatttgtgtttgtaatagtggtatttaatttatattaagataagaaggaatttattatggtaagttttataatattggtatttttaaaaattttagaagtttggtttggggttgttataagttaaattatggaaagtggtatattaagaaaagaaaaaggaattttatttttttttttaaagtaaataatttttagtaaataaattttaggaataacgtatataattttataaatgatgggttgatttttgaaattttttatttttttgagggattgttattgtagataatagaaattttattttttttatttatttatattaatattttgggatgagtttggtaattattataagttgatgttttttattgttttttagttttttagtataaaataaagaagtttgggtagttagttgttaatgtttaaggtagagttattttataaattttttttaataaatggatagggtagaattttatttttatttttattttatgtggaaagtgattgaaattaaaattttaaataaataatggattaaaaaattattgtaagattttataaggatagaaatgtatttttttttaaaatttttgatgttgaaaaattttaaaggtaaattagaagatgtttttttgaaaatatttttttttttgtgcgtgtgtgtgtttataaggttttattagagtgtttttgtttagttaagtgttttagttagtttgagttgttataatagaatgttataggttagggggtttaaataataattattttatagttttggaggttggggagtttaagattaagattttggtagattttatgtttggtgagggttttttttttagtttgtagatggtggtttttttgttgtgtttttataatgtagaaagggagagagagttagagatcgaaagtttattgattttttgttgtaatggtatttattttattatgggggttatatttttataattttatttaaatttaattattttttatggttttgttttttaatattagtatataagggagttagggttttattatttgaatttgaaagagatataaatatttagtttatattagtaaggttgtgaaatattatttttattttgttatttaataaatatttatataatattttatatgtattgatggtttatatatattaataattaatatttttaataatttcgtgaggtaggtattattataagtttttttataggggagaaatatgagtaaataaagtataaattattaagggttatgaagtaagttagtggtatggttgaaattttagttttgatatttttattaagtgatttttatagttgtagtatttagggaatattttatttttaaggtagttttatttttttattttcgtgttatttttagttttttttatagtagtggtagaatatttttatatttttgaagtttgtatttattaggaagaattaagatagagtattgtaggtttatagtttaatttttaaagagagggggttattgaaattgatgatgaaaagttagtaatttagtgagaaggtattagttaaataggtttggaaatgttttattgatatttttttagaattaaaattttttcgatagttgtttttttagagggaattaattttaggatgttggtaaatatatatggtatggaaatgtaattatgttagtaatttagtatgtatatattagatatgtttgtttgtgtttagagtagtaaataagcggagttttattttttgttttttttttggtggtgtttatggttttttttgtttagggatagtattagaaaaggtagattttttgagtttaataggtttttcgtagtttttagtgattgttatggatttttatatagatatttatatattataaaatagatgttattggaagtatatagagaggcgagagatattaacgacgattatagagagagagaatgtgggagtgcgatatagtttgtataaatatatatatagtagagattcggcgttgttttgttttcgtatttatatatttgggtttattacgatgagatatatatatatatatatatatatatatatatatatatatatatacgtgatatttgtttttaagattataaaatattaggaaggagataaaagtttttatgcgttatttgagatgatatatgtattgttaaagcgtgcgtttattttaaatattaatgaaatttgtagaatttaaattaaagagagaggatagataagatatgttgtagtttttgttttaatttttaattttaataattgaaatgttttttagagaagtaatttttttcggtaaggatgtagcgcggtttttacgtgggtttaagggatttgatttacgacgtattgtattgggtttacgaagcgttttttcgtaggcggttatttcggtatttttgagagcggcgggttttcgttttcgttttagggattcggggtagaaagagaatattttatagttggcgggagttacgtaagatagttagattcggacgttattcgtgagtgtttcgatttttttttattttagaggcggggttatcgtttttttttcgaattcgggatcgatttggagtttcgggaatttttttggttcgggatttcgggttttttagttttaattatgtataaaaggggttcgtcgttttcggagagttatagagttcgggttataggtagttttttgttagttttttttttcgtatagtcgttcgaatcgtttgttgagttttatggttcgcgttacgtttttcgtcgtttttagtaattttcggtttttgcgggtggcgttgttgtttttgtttttggtggtcgttagtcggcgcgtagtaggtgggtttcggcgttttggggttttcgggtcggacgcggttggggtgggcgtttcgcgtcgatagtttcgtttaattagcgagtttttttttttttagg

SEQ ID NO: 798 - DNA, 5275 bp, Artificial Sequence
  chemically treated genomic DNA (Homo sapiens)
tttagggaagaagagattcgttgattgagcggggttgtcggcgcggggcgtttattttagtcgcgttcggttcggggattttagggcgtcgggatttatttgttgcgcgtcggttggcggttattaggagtaggagtagtagcgttattcgtaggagtcggggattgttgggggcggcggagagcgtggcgcgggttatggggtttagtaggcggttcgagcggttgtgcgaggaggagagttggtaaggagttgtttgtggttcgggttttgtggtttttcgagaacggcgaattttttttatgtatggttggggttggaaagttcggagtttcgggttagggaaattttcggagttttagatcgatttcgagttcggaaggaaggcgatggtttcgtttttggggtggaggggggtcggggtatttacgagtgacgttcgggtttgattgttttgcgtaattttcgttaattgtgggatgttttttttttgtttcgaatttttggagcgggagcgagagttcgtcgtttttagagatatcgagataatcgtttgcgaggaggcgtttcgtgaatttagtgtagtgcgtcgtgggttagattttttagatttacgtagggatcgcgttatatttttatcggggggagttatttttttggaagatattttagttgttgggattgaaagttagggtaagaattgtagtatgttttatttattttttttttttagtttgggttttgtaaattttattaatgtttgaaataaacgtacgttttaatagtatatgtgttattttagatgacgtataagagtttttgttttttttttggtgttttatgattttaaaagtaaatattacgtgtgtgtgtgtgtgtgtgtgtgtgtgtgtgtgtgtgtgtgtgtgttttatcgtagtggatttaggtgtgtgggtgcggaaatagaatagcgtcgggtttttattgtgtgtatatttgtgtagattgtgtcgtatttttatattttttttttttgtgatcgtcgttggtatttttcgtttttttatgtatttttagtagtatttattttgtggtgtatgagtgtttgtgtagagatttatgatagttattgggagttgcgaggggtttgttgggtttaggaggtttgttttttttagtgttgtttttgggtagaaaaggttatagatattattagaaaaggagtagggaatgagatttcgtttgtttattattttaagtataagtagatatgtttgatatatatatattagattgttaatataattgtatttttatgttatatgtatttattagtattttgggattggttttttttagagaaatagttatcgaggaaattttagttttagaggaatgttaataaagtatttttaagtttgtttagttgatgtttttttattggattattgattttttattattaattttaatgattttttttttttaaaaattaagttgtaggtttataatattttgttttaattttttttggtggatgtagattttagggatatggagatattttgttattgttatgagaagggttgggagtggtacgaggatgaagaagtgggattattttaggaatagagtgttttttggatgttgtagttgtagagattatttgataaggatgttagggttgaagttttagttatattattaatttgttttatgatttttggtaatttatgttttatttgtttatgttttttttttgtagaagagtttataatagtgtttgttttacggggttgttagaagtattgattgttaatatgtgtaaattattagtgtatgtaaagtgttatgtaaatatttgttaaataataaaatagaagtggtgttttataattttattgatataggttggatgtttgtgttttttttaaatttagatgatgaagttttgatttttttatgtgttaatattagaagataggattatgggaagtaattaggtttaggtgaggttatgaaggtatggtttttatgatgggataagtgttattatagtaagagattagtgagttttcgatttttggttttttttttttttttgtattgtgaggatatagtaagaaggttattatttgtaaattgagaagagggtttttattaagtatgaaatttgttaggattttaattttggattttttagtttttagaattgtgaaataattgttgtttaagttttttagtttatggtattttgttatagtagtttaaattgattaagatatttaattaaatagaagtattttgataaagttttatgaatatatatacgtataaagaaagaaatatttttaaagaaatattttttaatttatttttaaaattttttagtattagaaattttaaaggagggtgtatttttatttttatgggattttataataattttttgatttattgtttgtttgaaattttagttttaattattttttatataaaatgagaataagagtaaaattttattttatttatttattagaaaagatttatgaaatgattttgttttgggtattaatagttagttgtttaaatttttttattttgtgttaaagaattaaagaataatagaaaatattagtttataatgattgttagatttattttaaagtattgatgtgagtaaatagaaagagtaaaatttttattatttatagtaatagttttttaaaaagatgagaaattttaagaattagtttattatttgtaaaattatgtacgttatttttagaatttgtttattaaaaattatttgttttaggaagggaagtagaatttttttttttttttttaatatattattttttatgatttaatttatgatagttttagattaagtttttgaagtttttaagggtattagtgttatgaaatttattataataaatttttttttgttttaatatgagttgagtgttattgttataggtataagttgtaaatttatgtaattattaatttaaagatgttatttttaaaatggaagtatagttttttaaattttatttttttttttaatttttattgtattttttagatttgattagtataatttaatatatttgtaaaatgtaggtttgttgttttatgtcgattattgatatttttgttatttgggtagtaaaatgagtggtgtggttttgttttatcgtgaattgttttgaagattttgttgatataatttttaatatatagtttgtttttttagaggaatagattagaaaataaataaagaagtataattgattttagagatagatttgatggaggttgagatatggggttttggaattatagaatagaagatagataatatggtttatgataagatttgttagtttttatattgtttatgtttagtgatttttttgtttttaggttttgttgttacgtatataaagtggatagtggtataatttttttgttgtgtttgattgtatgaagaaatatataattgatttagttatatattatgtgtattttttgttattttttttattaaagaattaaggtagttttttaatgattagagtttaggaatattttttagtattataaatattgtaattgatatgttttgtggggtttttgtgattttttgaaaattgtggtttatatttattgtgttaaagttttttttattggttttggtatttcggttttgggttgtggttttgcggaagaaatatttttttttgtttgtggttttttagtggattgtttgttagtttagggattgtggttattatttatcgaaatatgtgttttggagataaagcgttaaaggaaaagaagggaagtaatatttatttattagattttaatttttgattagatgtagtgtttgagttttttagtgtattgttattttaataattttaagaatgttgggaggttggtattatgagttttattttataggtaaggaaattggagtataaggttttagaagtggaattaaatttaaatttaagattgtttgatttagaagtttatagttagtttttttttagataagaaaggaagtgataggagaagaagaggatatgtaaaagaattttaattaagtttatggaggatattttattattttttaattttattagaaaataatgtatttattaaaatatttaatatagttttgattaggaattaaatagatatgtagaagtgatgataattagtagtttttagagttttagtagtttagagaattttttgtttattgtgtcgttagtttttaaatttattttatgaagtttttagtaatttttaatattatattagaatttgatatgattgaaggtaggttgggagtggtgttttatatttgtaattttagtattttgggaagttaagatagtaggattatttgaggttaggagtttaaaattagtttgagtaagatagtgagattttgtttttatggaaaaaaaaaaattgaaggtagatggtagcgtaggtaaaggatttagttaagtattttatttttagtagtttttaaagtattttagaaggtattaataagaaggtagatattattataaattgttaaaggttggtttgttattaagagattagagtaatattttaatatgtataaattataagttatgatttattggagggttataaagttagttttgtgggttgtaattagtatttaaaaatataaaggggtagtggtttatgtttgtaattttagaattttgggaggttaaggcgggtagattaggaggttaagagattgagattattttggttaatatggtaaaattttgtttttattaaaaatataaaaaaaaaaattagtcgggtatagtggtaggtgtttgtagttttagttatttgggaggttgaggtaggagaatagtttgaatttgggaggaagaggttgtagtgagttgagattgtatttttgtattttagtttggtaatagagcgagattttatttaaaaaaaatataatgtatatatatatatatatatatatatgaataaaataggatagaattttaaaatgtatgtgttataatgtattatatattgttagtttaattgttattttatgatatttttgtgttttatatagataggtaattgtgtaaaattaaatatttgatgtataagatgtaaaaatagaatttttaggagtgaaaatatttttttagaagacgttattatattgattaaggttgtgattatataataagtttttagtttgtagatattattt

SEQ ID NO: 799 - DNA, 5276 bp, Artificial Sequence
  chemically treated genomic DNA (Homo sapiens)
agtatttgtatattgattatattacgagattattatattaggaatagaaaaataaatgatttggtattataaaagaaagtagatagattaaatgaagaattttgtgttagaagtcggatttgatttaattttgttttttttattaaatttattattgtgttttatatgtatagattaattttaagtgtatcggaagaaagagaagttgttagataagtagtttttaggaggttaaatagagaggattatgaatttagtacgtattatggttttggattgtggaggtggattgatttaggaatttaatgttatgtttatatatttttatttttttttgttttgagttagagttattatattggaagagatgagtatagggaaatagggatagtaattgtgaggaagaagtttttaaattagtttggggtagagtagggttgttttttttatttgagtatggttattttttaggatggagtagtgtttaagtttaggtttttttaaaatgtagaatttgagttatgagtttgttatgtaggtaatttatttggggatatattattaatgtagaggatttgaaagttgggaagaataaattaggaaaagaggatatgggtaattggagtttaattttattggggattttttgagaaatggtgtagaatttttgtttaaaatatgtaaaagagggaaatatttatttattgattttagttttttttgtgaaagggatgttttttggtagtaatagagaaatattgggttataaagtgaaagatatttgatttagttgaggttaggagtttttaggtgatatttgtaggtagttagtgttgtagtagtgattggagaataggtggtttaggagatgtgagtatcgagatttgatcgtttgttagttttgtaaggttttataatgattatagggtaaatggaatttggttattaaagtttttatttttaaagatttttttatttttttaagaatttttgtttgaataagtttaaagattgtataaaattttggtatttaattgttgaaaagaaaataggtttggagaaatatttgttttaataagataatttatttttgtagttaatagtattataagttttggtttatgaagattttattgatataagcggtatgttagggaaaaatattattattattaataataacgaatttttttttttatattttatttataaaaataagtgattttgatgatattttttttaggagttaagttttgtataatttgtaaatgtttacggttttttgatatgttttatttgtattatttttttggtattttttttgtgttgggtttggagagtatgatagtaaatattttttgattttttttagttataagaattaaatgagagatttggaaaatataatgttgaaggtaaagtatttaatattatgaagtatgatgaattgtttaaattgcggtaatagatattttgaatttttatatttgagtaaatatgtattaaattaaaatttaattttttgtttagaaagttagtaggtaaaatatgtatatgttttgattttattttggtggtattttaaatggatttagaaaaataaatttagaaaaaaatgaatttaattgggataatttttaatttataaatattgtaaagataatatagtgtttgtgtgttttttattttttttttttgatagtgaatattttataatagtacggaacgtttgttaaagttaataaattattaatgatacgttatttttaattaaattttagattaagttgtgttttattagtttttttattaatattatttttttgttttaggattttatttaaattattatattgtaatgagttgttatttttttagttttttttggattgtgatggttttttagttttttattgtttttatgattttgatagttttgaagagtattgattagttttaggagtttttagtatgagtttgaagaatgttttttattataattagatttgggtgatgaatttttggaagtggtattaaagaggtattttgtttatgttatttttatgatattatattaagtgggtatatgatatttatatgatattatattgaagacgtttatttttattatttttttaaagaagtagtttgttagttttttttatggaaaagtgtttattttattttttagaattgggtattttaaggaaagataatgagttatattaatgttataggagagagttatgttgttagtgaaataaaattataaagatatattatcgttttgatgtatttttattttaaaatatgtaaatttaagttatttaattaggttaagaataaatatatttttaaaaattttttttttttttaaagtattaattatatattatagtgtatttttattatagtttaatggttaagagttattttttttgggtttgatttttagttttaaggatgtatgaagttaagtaagtgatttaatttttttgtattttagtttttttgtttgtaattattaagttttataaagataataattaatatttattttatagtattgtttggaagattgaatgagttaatatttgtaaaatgtttagaagagtattaaataaattttttgttttttgtttttggtgtagaggtttaatttgtttatagtatgaagttattaaataaaaaagtagtatgttttatatttatttagaattttgtaagtttttattatttattttatgtttgttgaagaaaaataagtaaatttttaatgattttttatttatgtgtattttttggtaaagtatagatgtgtttttttttttgaaagtttttttaaattaaaaatatttaatttttttgttttttataaatttttaattgaattttattttttatttataagtttgtagtatttattatagtttgaaattgtagaagatatttgggatattattttggtttttattgggttaatgttttttttgtatttatttttttttttaaggaatttaagtagttagggagatgtgagagaggaaattattgaaaaagaatggagtatatatattatttatagtgtttattttaaagtaataggatattttagtatatttttttattttttgtttaagattattgtaatgatattatagatattcgtgagtattagtaattataagattattttggaaattgggattgtggtgtttatatgaatatttttttttttaggatgtgttttgattttttaaggatttatattgttttatattagttagagatagggagagttgggtggtagtaagggatatagaaaattttaaatgtgaaaaatattggggagtaaaattttttattagatttttttttttttttttatagaatttatagtaggttgagtttttgtttaggtaatgtcgggaaagaaatagttttttaaaaatggaaatagtttattttatttatttaataattattaataaggtatttaatttatgttgttttttataaatgttaatttattttttataattattttgggttaggtatagagaggtttaataatttgtaagtgatattttgtaattaaatataggtagtatagttgtacgttttgtgtttggttaggggtaaggatttttattttttgagttgggttgtgtagagttttgtgttttaggtagatgttatttttttttttttttttttattttattttacgttttaaagaggtttgagattaatttgtagaattatatttaaattttttaaaatttaatgataaattaaaatatattatttaaaattagaaaaagggataaaggtgttaggttaaaagattgaaaatttagacgagaaaaaaaagtgttttgttaatgtttttagagaaagattttttagtgttgaatattagaaaattttatagtaaatgaaatgtgattttatgtgtgatttggtgtttaaatgttattagtaggtagttgtttgtttttttagtgggaatggtgtttgtatattaggtatttattttttagtgttattcgtaaagatagaattagaaatattgagtttatgattttgttggatttagtttttttatagttttagagtgatagttagtgttatatttttagattaaatttgaattttttttattgggagaaggtttttaggggatttaggaagttttaatattttagagggaggaaggacgttatgtaggatataaaagaagaggttatgttatatagttttggtttttacggatattaatattgaatttaaattttgatattgataatttgttgttattaaatggaaaacgtaaataaggtattttaagtgtgattagagaatatgtaaaataaggaataagtagaatatttttttttggaattcgagacgatggttgtatttttatagagagtatgatgttagatgtatatgaaataacgttaaatcgaaaatgagagaggtagagatcgggaggttaatatagaggatagattatatagagagaggatagttgagggaaaattcgtttgttttcgggtttttagtaaatttgataattaaggagataaagttttttttttttaaagaagtcgtgttttttttgttttggtttttacgggtttttttagtttttttttttaattttatttcgtacgcggggggttatcggggatttaaggtttttttttataggttgtatttttagcgaggtggatttattgtttttttaggaatttggggtagaaaatgaatattttaaagttttagagtgtacgggggttattttggagggcgaggcgtaggcgttattagtgggttttttttattcgtattcgattttatttcgggggcggggtcgtcgttttttttcgggatttcggatcgatttggagtttcgggaatttttttggttcggtcgtttcgggttttttagttttaattatgtataaaaagggttcgtcgattttggggagttatatagttcgggtcgtaggtattttttcgttagttttttcgtttttcgtatagtttttcgacgcgtttgttgagttttatggtttacgttacgtttttcgtcgtttttagtaattttcggtttttgcgggtggcgttgttgtttttgtttttggtggtcgttagtcggcgcgtagtaggtgggtttcggcgttttggggttttcgggtcggacgcggttggggtgggcgtttcgcgtcgatagtttcgtttaattagcgagtttatttttttttagg

SEQ ID NO: 800 - DNA, 5276 bp, Artificial Sequence
  chemically treated genomic DNA (Homo sapiens)
tttagggaagaatagattcgttgattgagcggggttgtcggcgcggggcgtttattttagtcgcgttcggttcggggattttagggcgtcgggatttatttgttgcgcgtcggttggcggttattaggagtaggagtagtagcgttattcgtaggagtcggggattgttgggggcggcggagagcgtggcgtgggttatggggtttagtagacgcgtcgggaagttgtgcgagaagcgggagagttggcggggaggtgtttgcgattcgggttgtgtggttttttaagatcggcgaattttttttatgtatggttgagattggaaagttcggagcggtcgggttagggaaattttcggagttttagatcgattcggagtttcgaaggaaggcgacggtttcgttttcggggtggagtcggatacgggtagggggagtttattggtgacgtttacgtttcgttttttagagtaattttcgtgtattttgggattttgggatatttattttttgttttaaatttttggagaggtagtgagtttatttcgttgaagatatagtttgtgaggggggattttaggttttcgatgatttttcgcgtacggggtagggttggaggaaagagttggggggattcgtgagaattaggataggaaaggtacgatttttttagaggaagagagttttgtttttttagttattagatttgttggggattcggagataggcgagtttttttttagttattttttttttatatagtttattttttatgttaatttttcggtttttgttttttttattttcggtttagcgttattttatgtatatttaatattatgttttttgtgaaagtatagttatcgtttcggattttagagaagaatgttttatttgttttttgttttgtatattttttaattatatttagaatattttgtttacgttttttatttggtggtaatagattattagtgttaaaatttgaatttagtgttagtgttcgtggaagttagggttgtataatatgatttttttttttgtattttgtataacgttttttttttttttgaaatgttggaattttttaaattttttggagatttttttttagtgggagggatttagatttgatttagaaatatgatattggttgttattttgaagttgtggaggggttgggtttagtaggattatgggtttaatgtttttggttttgtttttgcgaatgatattagagagtaggtatttggtgtgtaaatattatttttattgaaggagtaaatagttgtttgttgatgatatttaaatattagattatatataaaattatattttatttattatagaattttttggtatttagtattgggggatttttttttggaaatattaatagggtatttttttttttcgtttggatttttagttttttaatttgatatttttgtttttttttttagttttagataatgtattttgatttgttattaggttttagagggtttaagtgtgattttataagttggttttagatttttttgagacgtggagtaggatggaggagaggagaaaggaatggtatttgtttgaagtatagggttttatataatttagtttaagggataagagtttttgtttttaattaaatatagagcgtgtaattgtgttgtttgtatttagttgtagagtattatttgtaagttgttaagtttttttgtgtttagtttaaggtggttatgagaaatgagttaatatttgtaagagataatatggattaagtgttttattaatggttgttaaataaataaaatggattatttttatttttaaaaggttatttttttttcgatattgtttgaataaaaatttagtttgttatgaattttgtaaaggaaaaaagaagaatttaatggaaagttttattttttagtgttttttatatttaaaattttttgtattttttattgttatttaattttttttgtttttaattgatataaagtagtgtgagtttttaagaaattaaagtatattttagaaagaagaatgtttatataaatattataattttagtttttaaaatggttttgtagttattggtgtttacgggtatttgtgatgttattataataattttggataagggatagaaaggtgtgttagaatgttttgttattttaaaatagatattataggtaatatatatgttttatttttttttaataatttttttttttatatttttttgattatttaaattttttgaaagaaaggatagatatagaaaaaatattgatttaatggaggttaaaatagtgttttaaatgttttttgtagttttaagttgtaataaatgttgtaaatttataaatgaaaaataaagtttaattgggaatttataaaaaataaaaaagttaaatgtttttaatttaggaaggtttttagaaaggaagatatatttgtattttattaggagatgtatatagatgggaggttattaaaaatttgtttgtttttttttagtaaatataaggtaaatgataagagtttataagattttgggtaaatgtggaatatgttgtttttttatttaataattttatgttatgggtaagttaaatttttgtattagagataaggggtagagaatttatttaatgtttttttaagtattttataaatattgatttatttaattttttaaataatattgtgaagtagatattaattgttatttttatgggatttaatggttataaataaaggaattgaggtatagagagattaagttatttgtttaattttatatatttttgaggttggaaattaaatttagagaaaatggtttttaattattaaattatggtaaaaatgtattgtgatatataattagtattttaaggggaggaaggatttttaaaaatgtatttgtttttgatttagttgaatagtttaaatttatatattttaaaatgaaaatatattaaaacgataatatatttttgtagttttgttttattaatagtataatttttttttgtggtattgatgtagtttattatttttttttaaggtgtttaattttgaagaataaaataggtatttttttatggagaaagttgataaattatttttttaaaaaaatggtgaagataaacgtttttagtgtgatgttatatggatattatgtatttatttgatatgatgttataagaatggtataagtaggatgtttttttggtattatttttaaaaatttattatttaaatttagttatgataaaaaatattttttaaatttatattgaagatttttaaagttaattagtattttttaaaattgttaaggttatgaaaataataaaagattgaaaaattattatagtttagaggaaattggagaagtgataatttattgtagtgtggtagtttggataggattttgggatagaaagatgatattaatggaaaagttggtgaaatataatttagtttggagtttagttaaaagtaacgtgttattggtggtttattagttttaatagacgtttcgtgttgttgtaaaatgtttattgttagggaaaaaggatgaagggtatatagatattgtattatttttgtaatgtttgtaaattgaaaattgttttaattaagtttatttttttttaagtttatttttttaaatttatttagaatattattaaaatgaaattagggtatgtgtatgttttatttgttagttttttagataggaaattgaattttgatttagtatatatttgtttaaatatgaaaatttaaaatatttgttgtcgtagtttgggtagtttattatgttttatagtgttaaatattttgtttttagtattatgttttttagattttttatttagtttttataattgaagaaaattagaaagtgtttgttattatgttttttagatttaatataaggagagtgttaagagaataatgtaaatgaaatatgttaagaggtcgtggatatttgtaggttatgtagaatttgatttttgaggaaaatgttattagaattatttgtttttgtaaatgaagtataaaggagaggattcgttgttgttggtggtggtggtgtttttttttaatatgtcgtttgtattaatgagatttttataagttaaagtttataatgttgttgattataaaaataaattgttttgttagagtaagtgtttttttaagtttattttttttttaatagttgaatgttagaattttatgtagtttttaaatttatttaagtaaaaatttttaaagaaatggaagaatttttaaaaatggaagttttggtggttaaattttatttgttttgtaattattatggaattttataaaattggtagacggttaaatttcggtgtttatattttttaggttatttgttttttagttattgttataatattagttgtttgtagatgttatttggaaatttttggttttagttgaattaggtattttttattttgtggtttagtgtttttttgttgttgttaggaaatattttttttataagaggaattggggttaatggataaatgttttttttttttgtatgttttgggtagaaattttatattattttttagagggtttttagtagaattgaattttagttgtttatgttttttttttttagtttgttttttttagtttttaagttttttgtattggtaatatgtttttaaataaattatttgtatggtaggtttatgatttaaattttgtattttggaggagtttaaatttaggtattgttttattttgagaaataattatgtttaaataaggagggtaattttgttttgttttagattgatttaggaattttttttttataattgttatttttatttttttatatttattttttttaatgtaatgattttggtttagagtagagaagaatgaagatgtgtgaatatgatattagatttttgaattagtttatttttatagtttaaggttatggtgcgtgttgaatttatggttttttttatttagttttttggagattgtttgtttggtagtttttttttttttcggtatatttaaaattaatttatgtatataaggtatagtgataggtttagtagaagagataaagttggattaaattcgatttttaatataaaattttttatttaatttgtttatttttttttgtaatgttagattatttatttttttgtttttggtataataatttcgtgatatgattaatatgtaagtatt
